United States Patent Application Publication US 2017/0114356 A1 - sequence listing, part 50

SEQ ID NO: 67501 - DNA, 7128 bp, Zea Mays
tacagttagcatttttgtttagaagtatggtatgataaatatatgtatgagaaatatgtatgagttaataatgcagcatcatacaaagcgatgatgaaaaacaaatgaaatctatacaggtagatcagtttactcctttcttaagtgaattaaaagagagtaaaattgtatgtaagtggagggaaaaggggggtaaaaagagagcaatgaattgtacctgcattaagggaaccaggagtactatagggcgcagagagcatcttctgtacatggatactatacataataggcttgtttaggatataaactgaaatataaaatgtattttttagatattattttgtacatgaacagcaagttgtagatcatccttaatgcgcaggaaaccgggaaaagatttccctgtaaacaatatttttggtttcatctgttgatttgccatcatcatcttcaatcagcactctgagtcctttttttgaagtaactctagagaaagcaacatatagttgcccatgtgtaaaaacaggtttcttcaagtacacagcaacactggataaagtttgtccttggctcttgtttattgtcatggcgtagcaaactttaatgggatactgccttctttctagagtgaatggtagcttcagtgtttttaaagttaaacaaacacgtggaatcaacacagttttgtccttatattttccagtcatgatcttagcttcaataatcagatctcctagagtaacaatgattaaccttgttccattgcaaaggccttcggattggttaatgttgcgcaaaagcataattggaactcctttttttaatattaactgatgttgagggaaattgttgccagtaattgaattgaggaattcaacaggatataataagtcatatgaatcgttgctgtctggtccttttactatgctatcacagctaagatattcccttggatcaccaggtattagagtgacaacgaagttgttgactgtgtctataacatcattcgttggagaaagtattgcacgttctttcaggtattgtatgtctgcataattatctgttagatctggatacgcggagtctacaatgcattgcaggctattattttgaggtgttagtaaaatgtcttgcggaatttttatccaatatttttctgtttcagagtcttttgctcgtgctggtactttgccatcacctatgtccaagagccatttgctaaaggaagcaatttcattcttacttgcagaatctaaatgaggtgattttaatctcatattttcagtcaagtataagacagtaatagaagtccatagaggagagctagttattgctgcgtctataatttgtgattgtgtaccaccttcaataactgggagtatctgtctagcatcacctcccaaaacaactacctttccaccaaaaggtgttttttcagctacaggacatcgaggtgaaagtaaatcacgcagtgttcggtctagagcttcaaaagctattctatgagtcatgaatgcctcgtcccaaatgattaatgaagcaacttcaatcagttcagctagcatagttcctctcttgatattgcaagtagtggtttcatttaaatcacatggtattttaaatcgggaatgtgctgtacgacctcctggaaggagtaatgcggcaacccctgaagaagcaactgtaagaacaacctttttctgcgaacgcagatatgctacgatggtattccaaaggaaggtttttccagtcccaccataccccgaaacaaagtagaagccaggctgtccagatagcacattttccacaatagtgttaaaggctttcatttgttctgtgtttaattgataaattaggacttcagattcatatgaaaggctgtttgcatcatatgacaactcttctttgagtaaatgattgacatttctaccttctaggttgtcggttttccttgggaggttgaagtcatgaatgttgccgccactcttgttaaataaaactgctagcttatctagtaaataattcttgagatcatcttctggtatctgataattagtctggttaagtgccttacgaatattatattcgatgtcatcagctaggtatttccaaactttcccaaaaagtgtatactcatcggctacctgacaataaagaagcattgtgacaaaaagttgtcttagctgagaagacgttgcccaagtagcagcttcattgaaagcagccaaccattcttgatcatcaccaaggagcccacgtgctttgcatgcttctttgaaggtattatagacaatattgttgtaggtccgaacctcctcataactgcgtgcacctttgacaactaacaaaagcattctaaggtaatacttgtcacctgccaggggatgcacatagtatagacgtcctatcttgccttctcttgtttgtctaggatgccaagttctggtcttgtcgtcccatctccattttgatgggaattgagagtatgtaagatttctagcattagaatgttgttgattagtggtaaaccattcagtaagcatggttttcctgagaaatgattgtgacaatatgcctgccatgttagctgaagtattatatgttatataattttcatttggtaaatgaacatgcattctttcaacagctgggtaatgtctatgtatctcaaacccaaatactcgccagcaagaatcaatgtcacaaaggtatctactgtcaatgtattctttgatttcatttcttgcatcagtttcttcatcataaggaacatcttcgccgctctgaatcctctgaagaaacattttgctacgatctggtcctttggtcacatatttgaaaaggtattttataaagatggttttgttgcaccattcaacatttgtatgtgcaccaaattttttcaataacaacaaatttgaaggcacaatgtacctattatccagtgcaatcttatttttgaaaacaacacgtccattatttcttcttctgtaaagaacaaagccattctcatcaaaggaagtttcctcttgaagtttttttggatagttttttgaacatcgaccatttttcatgcaaggagcatgtttgttgtaatttccacatgggccatggaccatatgttcagcaactaaggcgtaccctagcggatcagtttctggatctggtatctcagcagttataaatgagtcaattagctcaggtgttggttgagaagtgtcagtggagacccaaaatataatgtgtgcatgaggcaagccacgtttttggaattcaacggtatgtaacactgcatgtaaatatagataatgtagaatttcaatgcgttagatcataatggcaaaacataatcaggaaattttgcaaacgattttgcgtgaagaggagaacataggagaaatgtgtcagggtaactaatataagatagaaattttgttgcgttggaaatttttataggcagaagtgtacctgccagtaacggaccaaagatagttcctgatctaatatcctgaagtaattcatgaagctttagatggaagacccgtgtaactacgtctgatctgtcaggagctgtttgaccatgctgaaagatactttcagtaatttcaggccatgaagggttacatgtaaatgtaacaaaaaagtcaggaggaccatactttccacaaattgctagaccgtcatggtaattttgaatcatatagcgtcgtcctccaatgtgcgatgctggaagaacaactctttttcccatttcatcgccatttatgcatccacggctaacagcatctgctattccttggatactttccattcgtaagtttctttgattttgagcaatgtagtgaagtctactctcctcaatagcagcacgtgcatcaactttggcttggcttgataacagaccatagcataggtacggatttggctgattcttcctataatggaattgatagcaatagtattcttgcattgtcatatggcgtcctgtggttgccccaataggatttctattagtgtaatgaataccgagctggaatccacgttcaccataaggaaataaaagaggatattggagaggcatgtaagctggatgtaatgaggagattcttttaagctctctattatgtgtttcaatgatgatatcacgtttgtacgtatctaaagagaagtcaccaacaaccaacattgcaagttcatcagtagttggtaagttgtattgaactggatcacccttttttgcgccaacgattctgatgatgaaatcttcattattgtggtcagccaaccgatctcttgccattctaaatttcttagcaaatggattatgttggtctaacatgctaatcaaatcatgtacaattgatggatcgagcgattcaacgggtctatgatcagcatcaagacatttcaatctattactaacttcgttagcagtgtcgtacacataaagttgaagaaattgtggagcagagtcatcaaggggtaaaagagaaccaacacgatgatgtacttgaccacatatcttgaacagcggcggtcctcgaccatcattaatagagttatcaattcgtgcacccattgatgtgaaagcaaaaagacagttatattgcctgatactacgcatgaatttcttggacctagaatcaccattgaagattgccaaggaagccagtggttcaggccgatctctaaacgaaggtatataaattttcccactcttacagcaggtatgatactgaggccttccagtttcgcgatttatagaagacttctcaccataccagaataaagcatgacagtgttcacattcataatctagtgttccatggtatgatcgacctcgatatgacgctaataggacataaaaatgttagtaattaattaaaaattttctgaaacagaactttatatctataaataattatacaattatataagagtctatttattacttgcattagaggtgcattgttgtcatacctttaagggcagctatgtactcttcaggaaaataaccacaattcattggtgttctaatacttttggcaggacctgtgttattgtattgttagaggcagcggaccaagtattaatgttggtagtcattgtaattatcgtctatccattggtacctcgggtgagtaatcgccactggtctaacgctcttttacgttgttgtcgtgccagtgcagcgtttttgtgggtagtcacaattgaaaattttctccgaggagtaaaagcccaagtatcggttacatgtgaagtcacatgagaaatagggggatctgcttcgtcgtcgccgtccatttcctttgttgctgaagaatcactcgttttctagattaatctctatatgactggggaattacttgtcccataacattttgtcgaggtattatatgttagtttgcattatgtatgaatgtaagtactaattacgaaaacggggaaaaaatgcagacatatggtagaagtgtaatcaatcaaagagatgggagtggtaattaccattacagattctgtgaatcgaaactgaacacagtaaaattgtgatccaaaaaattattgcaatgatcagaacaggaaggaggtactatattgcgttatgcatgaatgtaagtattaattacgcaaacgaaaaaaatacagacatatggtagaagtgtaatcaatcaaagagatggggagtgctaattagcattacagattatgtgtaccgaaactgagtacagtaagatagtgatccaaaaaattattgcaataatcagaacatgaagaagttactatagtgtgaattaggaaggtaataccttatctttgttgatggtcgatattgagctgtcggaaccttttttacggatgaacttcgtactgctgcgaaacacggttattttacatgtatttgtttacgtaggtagcatagtaaatatatcagagaaaaagattatagttagaaactcagctctttggacctggcttcgaatgaaagcgtaatactgattgtttaataaagggatgataacatcttagttatttcatcagtaaactctaaagacaaaagattctattgttgttccttttttttcacataggaacctccgctagaaagagagagagagagaggcggaagagaacgaaaagaggggaccaaaaatgtatcttcttcaatgaagagagcaggaatcgaacgaaaagagggtcatctaggaaccttcgccaaacattttatcccatattttttaacaatttatcgctcatcacagtaccaatgagggcaaaaataaaaaaaatgataggatgaagtgctgaaatggcgtaagagaacatggacttcactgaagtgcggtaagataaactggaaggggatgaatggcggtaaaaaagtgaggttagcgcagagagtaaaaaatcacataagattttttcgtttttaaaaaaaaaaataaagaaggttagctgagcgagaagaaatcgcagaagatcgaattttttttttaacaatccacaacactttatagcacatctaaaatgttgactgaaggatggctggaaaaatactatacagtagcaatgagagtaaaatatggaggtagagaacttaagggaggcaagagaacctggagaacgatggatggtgggggagctgatgtcgtctggtgatggcggagttcttgatgtggttgcgtttcctctctctgtaaatgtgacgccctgccttcctttacttttgataggaggttacggtggtgaagcagtgtttctttcttcttctttttttattcaatccatggaagactctgcacgcaagcacaagcgaggacacctgccttctttcggaagactccggagcacctgactttttttttctttttctttatttctttcggaagactccggagcacctgacggaattttttttccttttattacaggacatcggatcacaatctaagggttggaaatatagtagtgacgtggatagcacggttgcgcggttatgttcagctggttaatatagtaaatatgtgttctctatttctctctctctcttggagtcaaagtaggacgaacatggtgacgtgagggaccgcctcttctgctctgggcggctggccctctcgaagctgc

SEQ ID NO: 67502 - DNA, 2212 bp, Zea Mays
ctctgtacgctcccatcactctctagaaccctagcgccccgcccgtcctgccgccgccgcagccgccatcgcacggccatgggtatcgatctcgtagccggcggccgcaacaagaagaccaagcgcacggcgcccaagtccgacgatgtctacctcaagctcctcgtcaaggacaaagagcaacttcaacgccgtgatcctcaagcgcctcttcatgagcaagaccaaccgcccgccgctctcgatgcgccgcctcgtcaggttcatggaggggaagggtgatcagatcgccgtgattgtgggcaccgtgaccgacgacaagaggatcagcgaggtgccggcgatgaaggtctgcgcgctcaggttcactgagacagcgagggccaggatcatcaatgctggcggagagtgcctcaccttcgaccagctcgcgctccgtgccccacttgggcaaaacacggttctgctgaggggtcctaagaacgctagggaagctgtcaggcacttcgggcctgcaccaggagtgcctcacagccacaccaagccttatgttcgctcgaagggtaggaagtttgagaaggcgagaggaaggaggaacagcaggggcttcaaggtctaagtggccactgccttgccaatctagtgccgttttgctcgtgtcagctcaatattaccgttttggtgtcatagttgtaatgttttagttgtcggaatctcgtgtcattatcggatatcgaaccaatcaaatttcgctccttttttgtttttgccatgagacttgcccgtcacgaagatgctcacatatcattgtgggccgtaactatgtgaaagtctagctgcccttttgctttgctcgtctatcttcacttgtcagctgttcattttaatccagcgccttcacaattttttaacagtgaggccgcctgaaacgaactatactgatacagtgacattatagtccgttattttggttgcacagcacaataaatgagccggtggtaaaataaaatgggacttaatccacggcaatttattactggagaattcatctttgcgcaagaaccgctagggcaggaagggaaagtgtttgtgagatgctagagttggacttggacccctagtattacatgggcagataaattgctcctatactaatatattgcaggtatagaaagcttgcaacgaatataaataaatattggaaagtagcaacatgttcattcataagaagcacaaagcaggccgcacagcagctagcatatccgcccgttgccctgtcgatcacatcacatgggcacgggcgtgttgatggcgtcgaacgtccacatgtccatcccggcagcgccctgcggttgctgcggcggcggctggtggtgcacgtacgcgaccgtgggcacctgctcctgctgcgccacggcgtcgggcacgtacgcgtggtgctggaagaagccgcccatgcccatgacgtcgacgacgtcgtagtcgactaggtggtcgtccctgcctccgccggcggacatggcgagcatcccctgcgccgcggcggcgtgggcgtgggcgtggccgtcgtcgtcgtcgtcgtactcgggcggcgggtcctcgttggggaagttgaccttggccttggccccgcggatgcggcgcgcggcgcggtcgtaggcgcgcgcggcggcctcggcggtggcgaaggtgccgagccagacgcgcgcgcccttggccgggtcccggatctccgccgcccacttgccccaggggcggcgccggatgccgcggtacatggtcttgcgctcccgcttgcgggccggcggctctgcggtgcagtatgcatgcatgtcagctctagctacgctgcgtgcatggctggtcgtcgtcgttagttgaatttacagaaagcaagcgtacgtgcgtaccttggtcgggatggaaggaggcggcggcggcgaagtcgtcgtcgtcgtggccgtgcgcgtgcgcgtgcgcgtggaggaggtcgtcgaagtcggcggccgcgtgcggccagatgtcctcggcgcagagaccccgcttggcgccgcgatgcgggatgaactcggagatgatcgcgccgccgcacatgtttcctagtcgatctgctgcggctgaggaggaagagctaggatgccaaggaaaagctaggagaggcaaaggtggtgggggtggagtggacagtggagtgggaggttgctgtgtctcg

SEQ ID NO: 67503 - DNA, 1467 bp, Zea Mays
gtggcatcgtataatggtgatatgaatggatggcagagtaacaaattattagaaagttgaaaggagcatcgagcacgtacgtacgacgtatcgctggtgacgggtgtacgtgtgcgtactgcgtacatatataagtggcatgtgggcgggcacgtaccggccatgcgacgcgccatcattgcggggtgagtactgtacgtgttccaccgacacgacacgcaccatcaagaggcgaaagtggcgtgccaaccacagctgacaaccaggagagctatctcgctggcagtggctgtgtgtgtctgcctgcctgctagtgctagctaccacgacacagaccgagatcaactttgcaacgcacgcgctcccgttccctcgatttggcagtgggccagtggccggcacggcagcgtagagccagccaggcccacgcgcgttccggcgcttgcttggctcctcctccattaacccaaagccattcattcccgtgctgcatagctccaaacgcatgcatgccaaaggacaaggagagcgtgtcctgcactgctcctcctccagttctcgagtgcagcgccgaccgcctgcttcaatcaatacagctagtactacccagcagatggcgtatttatttgccaacacccatgacccattgcatttgccttattattattattattattattattattattattattattattattattattattattattattattgttattgttgttgttgttgttgttgttgttgttgttgttgttgttgttgttgttaaagctgcatagcatatggagggagctggtatcagggggacagggggtgagtttttttgctttgcgtcggcggcagcagggcaaaggcaaaggcaggatcttgttccattcaccggtcgccacgctcgtgctcacctcaaccagcactgcagataactttttactactaggccgggatcacgatgatctaccgctgcgctgcgcgatcggtactagtatttgccatcttggcaatgcatgcgacgacgttttaggcgctgacgtggagagtgtatgtatatcactgacctagcgtggcggagcggaaggtggtggagttgtcgaccacgttccggctggccttgatcaccgtcctccacatgccgtcgccgacgaacatcagaatccttctagtggagttatgttatctgcttcccttgtgagtctgctcttcagaatccttgatgtcgtgctctctgaggaggtgctttcttttggaaataccaacctgagttctatgataaaatttggcttctactaatgataattacctgtccaactaaaagcaacttctcgatcttaaccccacatacaactagaccactttagccaaacgtgacatttgctgagtacgttgatgtgtactcacgcttgctaaaacaccaaacactagattatcccattgtaaacattgatggtaacagaagag

SEQ ID NO: 67504 - DNA, 1758 bp, Zea Mays
tccacggaagactcgtgtcttccacctcattcgcgattctccccggagcccgccacgcgtccaccaccctcccgctccggcacacctctagacgatcttctcgccgccgggcggcggatatgactatatatatacgtatgtaacctatcgccgccgcaggcagggtaatgtagttgtccctagcaccgccgagctgatccatcggaaggaactagtcttgcaacttgcaagcagacaagtcaggtggtcctagactcctagtactaggatggcaacggcacgagcactccgcctggtactcacgagttcgtcggtcccagccgccaaagacggcttcctggttgccgcgcgccgccgcctgctgtccgcctcgacggaagccggcggcgcgggcgacgcggcagtgcagtccggagacgcgccgagtgacgactacacggaccggccgccgcggttctccggcgccgaggaggccaccagcgcggggggtcgcgttggcaagcacccggggggaaaagcggcggagcgcgtcccgccgttcgcgccctcggggaagaagccgccactggccgggtccgaacacgagctcgcggacccggcgggagccgcgtcgttcacgcagaaacggcggttgtcttgctcctcctcctcctcctcgcgggagcgggagccgcgcgaggcggcgacgcccggcgggcccgagtccgcggcgcgcaaggtgagggaggaggacagggagtactaccggacgcacaagccgtcgccgctggcggaggtggagttcgcggacacgaggaagcccatcacgcgcgccaccgacggcagcgccgcggaccggtacgcggacgcgcaggggcggacggtggaggacacggtggacgactcgctcgcgcgcgccgaggccatgttcagggaggccgcggcgcgcggaaatcccgagtggccgcactcccgcgcgctcgccgagatgctggcgcgacgcgagctggggaaggacgctgctgccactgccagcggccacccctgctggggcagctgaatggacacggcccacgcagaagcagtgttgacggttgacgcgcacgaggcaacgatcgggccaacgtacgacgacaactcttgtttgcgcgcgcgatcgaacggaccaaaactggcatgccagcaggctactgcatgcatatgcgtgctctcgacgtcgacgtcaacgggcggatatataccagctacagcactgtgcatgctgctgacctgctgtacgtgtgccctgccgcctgcgcgtgcatgcgtttcttcagggagcaggccggagccagggacgcggcaccggcacgggcatgcaccgcgcgcacggcacggcacagcaccctaggtagctactatgcgctcgtgaacatgcaggccagccactcctatttttctcttgtatgtctgcattacgaatcctatccttactacatattttctttcatgcatgttctttcacctttggattgggctaccaatatgtgcatgtgcatttccaccctattttggatcgattttctcaaaagcagagagattgggagttaaagataaggagtaaattgttggagaacgcttttccagtcttaccaaaaaaagttaagagtgagagtgagttttggaaactcttgcgaagttctaatgtaaccaattatgagaatccacaaggtccaacccaactagtttgttcgttctcatatttccagttccatttgaaataagatctcaatttatctt

SEQ ID NO: 67505 - DNA, 4585 bp, Zea Mays
tccacggaagactcgtgtcttccacctcattcgcgattctccccggagcccgccacgcgtccaccaccctcccgctccggcacacctctagacgatcttctcgccgccgggcggcggatatgactatatatatacgtatgtaacctatcgccgccgcaggcagggtaatgtagttgtccctagcaccgccgagctgatccatcggaaggaactagtcttgcaacttgcaagcagacaagtcaggtggtcctagactcctagtactaggatggcaacggcacgagcactccgcctggtactcacgagttcgtcggtcccagccgccaaagacggcttcctggttgccgcgcgccgccgcctgctgtccgcctcgacggaagccggcggcgcgggcgacgcggcagtgcagtccggagacgcgccgagtgacgactacacggaccggccgccgcggttctccggcgccgaggaggccaccagcgcggggggtcgcgttggcaagcacccggggggaaaagcggcggagcgcgtcccgccgttcgcgccctcggggaagaagccgccactggccgggtccgaacacgagctcgcggacccggcgggagccgcgtcgttcacgcagaaacggcggttgtcttgctcctcctcctcctcctcgcgggagcgggagccgcgcgaggcggcgacgcccggcgggcccgagtccgcggcgcgcaaggtgagggaggaggacagggagtactaccggacgcacaagccgtcgccgctggcggaggtggagttcgcggacacgaggaagcccatcacgcgcgccaccgacggcagcgccgcggaccggtacgcggacgcgcaggggcggacggtggaggacacggtggacgactcgctcgcgcgcgccgaggccatgttcagggaggccgcggcgcgcggaaatcccgagtggccgcactcccgcgcgctcgccgagatgctggcgcgacgcgagctggggaaggacgctgctgccactgccagcggccacccctgctggggcagctgaatggacacggcccacgcagaagcagtgttgacggttgacgcgcacgtacgtggtacatgcacagtttgtttttgtgatatctctatactttttttatccgttcgtaatgtacacataatatattttgtgtactacttcataaaagtttaaatcttcataatgtacttaagaattagacgaggcatagtacagtaactattacaaatttgtatggttgagtatttacgtgctatgttagtgtagtgcccgccccaatgaccatatgcgggcaggccatatagaccatcgtacgtgccaagattgacgttagtttggtttatttggtaattgagtgcaactatagactcacgcttttactgagtatatagtttcttagagtcttactccaagatgatcaacaaaggtataacatgatagagatagagatcatacaaaagttcctcaaatgataagaagttgaaggaaaaatgaattataaggcaaaagcgtatgatagggctgcattgtatagtgtattattgaatttaggatagaagactatactataaaaccataaatatgagcttctactatgtttaataacatgacgaggtgaatgaaaaaaaaaactattttttatgtaaaatatctcaagtgacaattgctttggtccttttggttgaggtagcacttgaaaagggagtgaaaaggagaaattagatcatatattatagattaatattatatattataatctgttaacattataatttataattcgtatatagttgtttggatgaccaattttgtagttgtcttgatgaccagattatataattgaagattattgatttttgagacaaagtaaagcaacagtatatcctgtgatttggggaaagaacaaaaatgtctgacataattttgtgaacatgactgatttggggaaagaacataattggcagacataatttaattttgtgaacataacataatggttgtttttccaaaaataataagctattttgaggagattatgatattatgataagctggattttagattatatatcatgaatacctgattatcataatatggacttcagatatataatctgaatacctgctgaattatttatgagtattataggatctagacagattataatataaaataaaataaacagggtcttaggcttactattggttttttcgacccactggccaagaaattccgggtcagacaattggaccgtctcggtccagtattttcgggcccaagtcaggagagatcgaggtgcacctgcagagagaaaacgcgcgcggcaggcacgtgcgttgcgttggcgtgctttcctggcgcgcgagaaatttacccgccccagaaattcactcagggtttgattgagattagatgtgtttaaatttcaaacaagtcaattttttcttaattttttaaaatctcatctaatccatatataattaattggaataatcgaaaaaggtcttagttttttcggcagtgcgttgaccgccgttgcctcgctcaaatagctagctgatgtagatgtagtgctgagagaagaataaagatagtactgtgtctccattttcgatcgaatatgtgtcgtcgacactacaaataaaaacgaatgtgtcgtcgactagtttatttttaaagtttatttttaaactaaaacgtgacaaataaaaaaatagagggaataatttatttcaccaggttcaacatctaatacactctatttctcagaatacgttgttttttctatatttttttatctacgtagaaaagcctctagttattgttgttttccttgtattttttatctacgttgaaaagagagtgaatttagtgcccttaccgtgtgtgtgattgctgagccgttccgaccgttgatctcgatcttgtgaccgttggcgcaggctcttggaatggccgccaaatgggtcggaatttccggtacggagccgccagctgggccagaccttcttgggctgtcgaagaagcccacatattttcttttctatttgggttgttttttccactcgagtatacagcactttctgttatacaaacaaacaggtctagacccacacgtgtcaaaattaagagaaccgataaggcgaggccaaaggtttctctagacttaaaattggatcattttattttatcttgcgtgtagcttttcaccttacgcatatgcgtatagcgatgagatgcttttgtcttaaaactaacaatttaactcatcagagttccttagtaacaccaaccgagactaaagtatcaacgttcttagtctgaattattactaaagtatcaacgttatttagtctgaattgttaacatcaatcgtgactaaaatcgtgcctgtgtggttaaatgtaacttatgcttactttaatgctaatgctattttaccattttttctaaacacatccactgtaatttgttacctgaagcacatgaccgttatatactaacgactgcgcgtgctgtggagcacagaaattatgatgaaagaatctgcttatggtcttctattctaagaattttccaattcatgtgatgcatttctcattggctaagatgtaacgttctgatcattttccatttgccatttttttcttgaccttgtgatacaaattacaaatatatccatcgctcaaaggatacgattttaaagcactctagtcaattaccccctccgtttgttttttattagtacaaaattgaactataagtgacgtcaaataaataaaaatagaggtagtacttattaataaagttacaagagactaccttcttgacggatgatgtactccgatctctccgttccatatgcccctgatatgatgcacatctctttggcaggaggcaacgatcgggccaacgtacgacgacaactcttgtttgcgcgcgcgatcgaacggaccaaaactggcatgccagcaggctactgcatgcatatgcgtgctctcgacgtcgacgtcaacgggcggatatataccagctacagcactgtgcatgctgctgacctgctgtacgtgtgccctgccgcctgcgcgtgcatgcgtttcttcagggagcaggccggagccagggacgcggcaccggcacgggcatgcaccgcgcgcacggcacggcacagcaccctaggtagctactatgcgctcgtgaacatgcaggccagccactcctatttttctcttgtatgtctgcattacgaatcctatccttactacatattttctttcatgcatgttctttcacctttggattgggctaccaatatgtgcatgtgcatttccaccctattttggatcgattttctcaaaagcagagagattgggagttaaagataaggagtaaattgttggagaacgcttttccagtcttaccaaaaaaagttaagagtgagagtgagttttggaaactcttgcgaagttctaatgtaaccaattatgagaatccacaaggtccaacccaactagtttgttcgttctcatatttccagttccatttgaaataagatctcaatttatctt

SEQ ID NO: 67506 - DNA, 1846 bp, Zea Mays
cagggagaaaataaaccacgaatcggataatgctggtggacccagctgccacctgccatttgggcccccgatgcttgaaacacccgccgcgggccgcgtcggcgtcggcatccgtcgccacaaaactctcctcgcaagcgtcgccgccccgcacagatcaaccgctcgaaatttgggggaagcaagcgagagcagcagcaagcctcatcgggaagtggagagatggaggcggcgggtcgcctccccctcctcatcgtctcctccctcctcctgctcctctcgccggagcggccggcggaggccgcgccgcggcgaatccagccgctcgccaccgccgcgctgagccgcctctacgacacctccaactacggcaggctgcagctcaacaacggcctcgcgctcactccgcagatggggtggaacagctggaatttcttcgcctgcaacatcaacgagacggtcatccgcgagacagctgacgccctggtgtccacgggactggctgcgctgggctacaacttcgtcaatatcgatgattgctggtcatacgtgaaacgtggaaagcaggatcaattgctgcctgatccaaagactttcccttcaggcatcaaagcccttgcagattatgtgcatggaaaaggtctgaaacttggtatatactctgatgctgggaaatttacttgccaagttcgacctggatcactcggtcatgaaaatgacgatgctgcgatctttgcttcatggggtattgattacctgaagtatgataactgctacaatttgggaattaagcctcagaaaagatatcctcctatgcgagatgctcttaattcaactgggcgccaaatattctactctttgtgtgaatggggacagtatgatccagccttatgggctggcaaagtgggcaatagttggcgtacaactgacgacataacggatacatggaaaagacattgctgataagaacaacaagtgggcatcatatgctggacctggtggttggaatgacccagatatgctggaagtaggcaatggtggcatgaccttagcagagtatcgctcacattttagcatatgggctctcatgaaggcccctctattaattggctgtgatgtcagaaacatgacttctgaaacaatggaaatactgagcaacaaagaagtaattcaagtaaaccaagatcctcttggagttcaaggaagaaaaattttaggacaaggaaaatatggatgccgtgaggtgtgggctggtcccttgtctgggaatcggcttgttgttgctctgtggaaccgttgttcagatactgctaacgttacaatgaaactgccagcagtaggccttgatgggtatgctgcctattctgttagggatctgtggaagcacgaaactatatcggaaaatgtcgtaggaacttttggcgctcaagttgacgtgcatgacaccaatatgtacatcttttctcctgcaaccattgtcgcttcggtttgatcaggaccggtggatccaagatgacagcaccgctatgattcaaggatatgtcacgacaacaagggccttcgtttttcctgctgcattctgttccacccgagtgcagaagtccacttcgtgcagaactgtctcagtgatgtttgtatttctcacggaatagctctatttatctcaagattgagcaagctcgaggcttactcggtgtaccggcgttgtatccttggggcatccaagatcttgtacgatttgaaacagtctgaaccaatgatgtaaaacaagatagtgaaaatacaacttcacaaattgcagccgtacaagcagcacttgtacaagcactctttttttctgttcaca

SEQ ID NO: 67507 - DNA, 463 bp, Zea Mays
gtgtgaatgtatgatccagccttatgggctggcaaagtgggcaatagttgacgtgcatgacaccaatatgtacatcttttctcctgcaaccattgtcgcttcggtttgatcaggaccggtggatccaagatgacagcaccgctatgattcaaggatatgtcacgacaacaagggccttcgtttttcctgctgcattctgttccacccgagtgcagaagtccacttcgtgcagaactgtctcagtgatgtttgtatttctcacggaatagctctatttatctcaagattgagcaagctcgaggcttactcggtgtaccggcgttgtatccttggggcatccaagatcttgtacgatttgaaacagtctgaaccaatgatgtaaaacaagatagtgaaaatacaacttcacaaattgcagccgtacaagcagcacttgtacaagcactctttttttctgttcaca

SEQ ID NO: 67508 - DNA, 2493 bp, Zea Mays
ggccttcctcgcaaaggtacaagctggatggcctgacacggaagcgtcgtggcgtgctccccaacgtgcgccgtttcggaagccacacgcccacggccccacccttccgctttccccttcctccatccttcctcctccccggcacgccccactccccgccaccattaccaaccaaccaaccaacccgcgcacccccgaaggagaagagctggggtcggaggccccaggtcggagctgaacgcgcccccatctcccgtcggcgagaagagctttgtctgtttcagcttcatgagttctgggaaagcactggcatccaacatctcttattcaacagtgaacagcagcatcatctttctctgccttttcgcgggatacttgggaattcctggtggaagcttcgctggaggaagctaatttagtcttcactgtagtagaagtttggcctaagagtttgtaggctttcaagcttcagaaatggtttcttctcagccatcctctctgactgcaattctcgcacagggccccaaccactgcccagtcaatatactcctcccaacggggcccccagatgtcgtctcctcagataatgttgagtacgatttctctgatgtttttggttctaccccggtccaaacaccaacaaacctttgtggttttggtccggagagtcctgcacctactgttgagtccaatgaagaattttacagtgatcctgttgtcatcatcaaccgatcccattctcttgtcggtccaacatcacttgtcagccgctccttgcgacttagcaagcttagtctaggaaaaaacgagggatcatcggaacttgtcaagtgcctctcagaagaaaaggaaggggaccaagggcagctcagtgatgaagatctgggtaatgcgatgacagaggatgagggcattgggcttgatgacttagaaatcttgaagcttgttggccaaggggcattcggtaaagtatttcaggtgagaaagaaaaacacctcagagatatatgcaatgaaagttatgaggaaggacaggatactagaaaaaaaccattctgaatatatgaaggccgagagagagatattgacaaaagtcgaccaccctttcatagtgcagctgaggtactcatttcagacgaaatatcgactttaccttgtcctggacttcataaacggggggcatcttttctttcagctctacaagcaaggattatttagggaggagcttgcaagaatctatacagctgaaattgtatctgctgtagcgcatcttcatgctaatggaattatgcatagggatctcaagcccgaaaacatccttctggatgctgatggccatgccatgctcacagactttggccttgcgaaggaattctgtgaaaataccagatcaaactcgatgtgtggcactctcgagtacatggccccggaaattgttcttggccgggggcatgataaggctgctgactggtggagcgtgggaatcctgctgtttgaaatgcttacagcccccatttgttgggaatagggagaaagttcagcagaagattataaaagacaaactgaagcttccttcatttctgtctagtgaagctcattccctcctgagaggcctgctacacaaggaacccaacaagcggctgggcagctgccccggaggcagcaacgagataaaaaaccacaagtggttcaagccaatcaactggaggaagctggaggcccggcagatccagccgagctttcggccgaacgtcgccgggcttacctgtatcgccaacttcgacgagtgctggacgaagacgcccgtgctggactctccggtaagcacccccgctggtggcgggcacagcaacttcgcggggttcacctacgtcaggcccgcgccgatccttgaggaggtgaacgcatccggctctaggctcaaggactaaggatgtttagcccattgaagatgtgcttaaaattttgatcgagtgacatgtatggaaacttagggggtgtttgggaacaaagtttttctgcagttttggaagaatactgcagtattctcaaatactgcagtattatatacataatggtgtttggcaagctgggtaaaatctctgttttcaaaactgaagtattgcaaatactatagttgttttaaggcattctaaacttagctctggaccttagttttcaaaactgcggtattataaactacggtattgttataactaaagtatagtatagtatttcaaaaactgtagttttcaaaaactttgttcccaaacagggccttatgtgcacaagagacgctgattaaacatgtaacgtaccattagccttggtacaggataggaacagtaagctctggttctatcttgtactcttaaaatatgttcataaggtggcatatggtcatggtaaatgttaaggcgatgttggcactgtttggctgggagtttctcatcctttgatcgccttcaaacgcactattgagccagcaaaagtc

SEQ ID NO: 67509 - DNA, 2485 bp, Zea Mays
cgcaaaggtacaagctggatggcctgacacggaagcgtcgtggcgtgctccccaacgtgcgccgtttcggaagccacacgcccacggccccacccttccgctttccccttcctccatccttcctcctccccggcacgccccactccccgccaccattaccaaccaaccaaccaacccgcgcacccccgaaggagaagagctggggtcggaggccccaggtcggagctgaacgcgcccccatctcccgtcggcgagaagagctttgtctgtttcagcttcatgagttctgggaaagcactggcatccaacatctcttattcaacagtgaacagcagcatcatctttctctgccttttcgcgggatacttgggaattcctggtggaagcttcgctggaggaagctaatttagtcttcactgtagtagaagtttggcctaagagtttgtaggctttcaagcttcagaaatggtttcttctcagccatcctctctgactgcaattctcgcacagggccccaaccactgcccagtcaatatactcctcccaacggggcccccagatgtcgtctcctcagataatgttgagtacgatttctctgatgtttttggttctaccccggtccaaacaccaacaaacctttgtggttttggtccggagagtcctgcacctactgttgagtccaatgaagaattttacagtgatcctgttgtcatcatcaaccgatcccattctcttgtcggtccaacatcacttgtcagccgctccttgcgacttagcaagcttagtctaggaaaaaacgagggatcatcggaacttgtcaagtgcctctcagaagaaaaggaaggggaccaagggcagctcagtgatgaagatctgggtaatgcgatgacagaggatgagggcattgggcttgatgacttagaaatcttgaagcttgttggccaaggggcattcggtaaagtatttcaggtgagaaagaaaaacacctcagagatatatgcaatgaaagttatgaggaaggacaggatactagaaaaaaaccattctgaatatatgaaggccgagagagagatattgacaaaagtcgaccaccctttcatagtgcagctgaggtactcatttcagacgaaatatcgactttaccttgtcctggacttcataaacggggggcatcttttctttcagctctacaagcaaggattatttaggagcttgcaagaatctatacagctgaaattgtatctgctgtagcgcatcttcatgctaatggaattatgcatagggatctcaagcccgaaaacatccttctggatgctgatggccatgccatgctcacagactttggccttgcgaaggaattctgtgaaaataccagatcaaactcgatgtgtggcactctcgagtacatggccccggaaattgttcttggccgggggcatgataaggctgctgactggtggagcgtgggaatcctgctgtttgaaatgcttacaggcaagcccccatttgttgggaatagggagaaagttcagcagaagattataaaagacaaactgaagcttccttcatttctgtctagtgaagctcattccctcctgagaggcctgctacacaaggaacccaacaagcggctgggcagctgccccggaggcagcaacgagataaaaaaccacaagtggttcaagccaatcaactggaggaagctggaggcccggcagatccagccgagctttcggccgaacgtcgccgggcttacctgtatcgccaacttcgacgagtgctggacgaagacgcccgtgctggactctccggtaagcacccccgctggtggcgggcacagcaacttcgcggggttcacctacgtcaggcccgcgccgatccttgaggaggtgaacgcatccggctctaggctcaaggactaaggatgtttagcccattgaagatgtgcttaaaattttgatcgagtgacatgtatggaaacttagggggtgtttgggaacaaagtttttctgcagttttggaagaatactgcagtattctcaaatactgcagtattatatacataatggtgtttggcaagctgggtaaaatctctgttttcaaaactgaagtattgcaaatactatagttgttttaaggcattctaaacttagctctggaccttagttttcaaaactgcggtattataaactacggtattgttataactaaagtatagtatagtatttcaaaaactgtagttttcaaaaactttgttcccaaacagggccttatgtgcacaagagacgctgattaaacatgtaacgtaccattagccttggtacaggataggaacagtaagctctggttctatcttgtactcttaaaatatgttcataaggtggcatatggtcatggtaaatgttaaggcgatgttggcactgtttggctgggagtttctcatcctttgatcgccttcaaacgcactattgagccagcaaaagtc

SEQ ID NO: 67510 - DNA, 2307 bp, Zea Mays
cttccgctttccccttcctccatccttcctcctccccggcacgccccactccccgccaccattaccaaccaaccaaccaacccgcgcacccccgaaggagaagagctggggtcggaggccccaggtcggagctgaacgcgcccccatctcccgtcggcgagaagagctttgtctgtttcagcttcatgagttctgggaaagcactggcatccaacatctcttattcaacagtgaacagcagcatcatctttctctgccttttcgcgggatacttgggaattcctggtggaagcttcgctggaggaagctaatttagtcttcactgtagtagaagtttggcctaagagtttgtaggctttcaagcttcagaaatggtttcttctcagccatcctctctgactgcaattctcgcacagggccccaaccactgcccagtcaatatactcctcccaacggggcccccagatgtcgtctcctcagataatgttgagtacgatttctctgatgtttttggttctaccccggtccaaacaccaacaaacctttgtggttttggtccggagagtcctgcacctactgttgagtccaatgaagaattttacagtgatcctgttgtcatcatcaaccgatcccattctcttgtcggtccaacatcacttgtcagccgctccttgcgacttagcaagcttagtctaggaaaaaacgagggatcatcggaacttgtcaagtgcctctcagaagaaaaggaaggggaccaagggcagctcagtgatgaagatctgggtaatgcgatgacagaggatgagggcattgggcttgatgacttagaaatcttgaagcttgttggccaaggggcattcggtaaagtatttcaggtgagaaagaaaaacacctcagagatatatgcaatgaaagttatgaggaaggacaggatactagaaaaaaaccattctgaatatatgaaggccgagagagagatattgacaaaagtcgaccaccctttcatagtgcagctgaggtactcatttcagacgaaatatcgactttaccttgtcctggacttcataaacggggggcatcttttctttcagctctacaagcaaggattatttagcccgaaaacatccttctggatgctgatggccatgccatgctcacagactttggccttgcgaaggaattctgtgaaaataccagatcaaactcgatgtgtggcactctcgagtacatggccccggaaattgttcttggccgggggcatgataaggctgctgactggtggagcgtgggaatcctgctgtttgaaatgcttacaggcaagcccccatttgttgggaatagggagaaagttcagcagaagattataaaagacaaactgaagcttccttcatttctgtctagtgaagctcattccctcctgagaggcctgctacacaaggaacccaacaagcggctgggcagctgccccggaggcagcaacgagataaaaaaccacaagtggttcaagccaatcaactggaggaagctggaggcccggcagatccagccgagctttcggccgaacgtcgccgggcttacctgtatcgccaacttcgacgagtgctggacgaagacgcccgtgctggactctccggtaagcacccccgctggtggcgggcacagcaacttcgcggggttcacctacgtcaggcccgcgccgatccttgaggaggtgaacgcatccggctctaggctcaaggactaaggatgtttagcccattgaagatgtgcttaaaattttgatcgagtgacatgtatggaaacttagggggtgtttgggaacaaagtttttctgcagttttggaagaatactgcagtattctcaaatactgcagtattatatacataatggtgtttggcaagctgggtaaaatctctgttttcaaaactgaagtattgcaaatactatagttgttttaaggcattctaaacttagctctggaccttagttttcaaaactgcggtattataaactacggtattgttataactaaagtatagtatagtatttcaaaaactgtagttttcaaaaactttgttcccaaacagggccttatgtgcacaagagacgctgattaaacatgtaacgtaccattagccttggtacaggataggaacagtaagctctggttctatcttgtactcttaaaatatgttcataaggtggcatatggtcatggtaaatgttaaggcgatgttggcactgtttggctgggagtttctcatcctttgatcgccttcaaacgcactattgagccagcaaaagtc

SEQ ID NO: 67511 - DNA, 2280 bp, Zea Mays
ggaattcccccgctgcctccttccccagcggccgcatccctcgtctctctcctttgtctgtttcagcttcatgagttctgggaaagcactggcatccaacatctcttattcaacagtgaacagcagcatcatctttctctgccttttcgcgggatacttgggaattcctggtggaagcttcgctggaggaagctaatttagtcttcactgtagtagaagtttggcctaagagtttgtaggctttcaagcttcagaaatggtttcttctcagccatcctctctgactgcaattctcgcacagggccccaaccactgcccagtcaatatactcctcccaacggggcccccagatgtcgtctcctcagataatgttgagtacgatttctctgatgtttttggttctaccccggtccaaacaccaacaaacctttgtggttttggtccggagagtcctgcacctactgttgagtccaatgaagaattttacagtgatcctgttgtcatcatcaaccgatcccattctcttgtcggtccaacatcacttgtcagccgctccttgcgacttagcaagcttagtctaggaaaaaacgagggatcatcggaacttgtcaagtgcctctcagaagaaaaggaaggggaccaagggcagctcagtgatgaagatctgggtaatgcgatgacagaggatgagggcattgggcttgatgacttagaaatcttgaagcttgttggccaaggggcattcggtaaagtatttcaggtgagaaagaaaaacacctcagagatatatgcaatgaaagttatgaggaaggacaggatactagaaaaaaaccattctgaatatatgaaggccgagagagagatattgacaaaagtcgaccaccctttcatagtgcagctgaggtactcatttcagacgaaatatcgactttaccttgtcctggacttcataaacggggggcatcttttctttcagctctacaagcaaggattatttagggaggagcttgcaagaatctatacagctgaaattgtatctgctgtagcgcatcttcatgctaatggaattatgcatagggatctcaagcccgaaaacatccttctggatgctgatggccatgccatgctcacagactttggccttgcgaaggaattctgtgaaaataccagatcaaactcgatgtgtggcactctcgagtacatggccccggaaattgttcttggccgggggcatgataaggctgctgactggtggagcgtgggaatcctgctgtttgaaatgcttacaggcaagcccccatttgttgggaatagggagaaagttcagcagaagattataaaagacaaactgaagcttccttcatttctgtctagtgaagctcattccctcctgagaggcctgctacacaaggaacccaacaagcggctgggcagctgccccggaggcagcaacgagataaaaaaccacaagtggttcaagccaatcaactggaggaagctggaggcccggcagatccagccgagctttcggccgaacgtcgccgggcttacctgtatcgccaacttcgacgagtgctggacgaagacgcccgtgctggactctccggtaagcacccccgctggtggcgggcacagcaacttcgcggggttcacctacgtcaggcccgcgccgatccttgaggaggtgaacgcatccggctctaggctcaaggactaaggatgtttagcccattgaagatgtgcttaaaattttgatcgagtgacatgtatggaaacttagggggtgtttgggaacaaagtttttctgcagttttggaagaatactgcagtattctcaaatactgcagtattatatacataatggtgtttggcaagctgggtaaaatctctgttttcaaaactgaagtattgcaaatactatagttgttttaaggcattctaaacttagctctggaccttagttttcaaaactgcggtattataaactacggtattgttataactaaagtatagtatagtatttcaaaaactgtagttttcaaaaactttgttcccaaacagggccttatgtgcacaagagacgctgattaaacatgtaacgtaccattagccttggtacaggataggaacagtaagctctggttctatcttgtactcttaaaatatgttcataaggtggcatatggtcatggtaaatgttaaggcgatgttggcactgtttggctgggagtttctcatcctttgatcgccttcaaacgcactattgagccagcaaaagtc

SEQ ID NO: 67512 - DNA, 2262 bp, Zea Mays
ccagcgattccgcgggcgaggcgagaacgatcgctttgtctgtttcagcttcatgagttctgggaaagcactggcatccaacatctcttattcaacagtgaacagcagcatcatctttctctgccttttcgcgggatacttgggaattcctggtggaagcttcgctggaggaagctaatttagtcttcactgtagtagaagtttggcctaagagtttgtaggctttcaagcttcagaaatggtttcttctcagccatcctctctgactgcaattctcgcacagggccccaaccactgcccagtcaatatactcctcccaacggggcccccagatgtcgtctcctcagataatgttgagtacgatttctctgatgtttttggttctaccccggtccaaacaccaacaaacctttgtggttttggtccggagagtcctgcacctactgttgagtccaatgaagaattttacagtgatcctgttgtcatcatcaaccgatcccattctcttgtcggtccaacatcacttgtcagccgctccttgcgacttagcaagcttagtctaggaaaaaacgagggatcatcggaacttgtcaagtgcctctcagaagaaaaggaaggggaccaagggcagctcagtgatgaagatctgggtaatgcgatgacagaggatgagggcattgggcttgatgacttagaaatcttgaagcttgttggccaaggggcattcggtaaagtatttcaggtgagaaagaaaaacacctcagagatatatgcaatgaaagttatgaggaaggacaggatactagaaaaaaaccattctgaatatatgaaggccgagagagagatattgacaaaagtcgaccaccctttcatagtgcagctgaggtactcatttcagacgaaatatcgactttaccttgtcctggacttcataaacggggggcatcttttctttcagctctacaagcaaggattatttagggaggagcttgcaagaatctatacagctgaaattgtatctgctgtagcgcatcttcatgctaatggaattatgcatagggatctcaagcccgaaaacatccttctggatgctgatggccatgccatgctcacagactttggccttgcgaaggaattctgtgaaaataccagatcaaactcgatgtgtggcactctcgagtacatggccccggaaattgttcttggccgggggcatgataaggctgctgactggtggagcgtgggaatcctgctgtttgaaatgcttacaggcaagcccccatttgttgggaatagggagaaagttcagcagaagattataaaagacaaactgaagcttccttcatttctgtctagtgaagctcattccctcctgagaggcctgctacacaaggaacccaacaagcggctgggcagctgccccggaggcagcaacgagataaaaaaccacaagtggttcaagccaatcaactggaggaagctggaggcccggcagatccagccgagctttcggccgaacgtcgccgggcttacctgtatcgccaacttcgacgagtgctggacgaagacgcccgtgctggactctccggtaagcacccccgctggtggcgggcacagcaacttcgcggggttcacctacgtcaggcccgcgccgatccttgaggaggtgaacgcatccggctctaggctcaaggactaaggatgtttagcccattgaagatgtgcttaaaattttgatcgagtgacatgtatggaaacttagggggtgtttgggaacaaagtttttctgcagttttggaagaatactgcagtattctcaaatactgcagtattatatacataatggtgtttggcaagctgggtaaaatctctgttttcaaaactgaagtattgcaaatactatagttgttttaaggcattctaaacttagctctggaccttagttttcaaaactgcggtattataaactacggtattgttataactaaagtatagtatagtatttcaaaaactgtagttttcaaaaactttgttcccaaacagggccttatgtgcacaagagacgctgattaaacatgtaacgtaccattagccttggtacaggataggaacagtaagctctggttctatcttgtactcttaaaatatgttcataaggtggcatatggtcatggtaaatgttaaggcgatgttggcactgtttggctgggagtttctcatcctttgatcgccttcaaacgcactattgagccagcaaaagtc

SEQ ID NO: 67513 - DNA, 1429 bp, Zea Mays
cgacgatgccgaccaacgctgcagctagcagcctcgtcgatggatcaacaagctttaatttgtgtgcaatgcacctacgtcgtacattaattgtgttcttctataaaactaacccatgcatcgatcatcagcaagcatcgtcatcagcaattcagcatagcgaaggtccgacgacacgacgacgacgatatagcaaatatcgatgacgacgacgacgtccgctcgactccggccgctcgccgtcggcgtcgctctctttgtcttcctaccgtggctgagctacgtgctcgaggctgccgaggagggccgggcggcggcgccgtggttctggccaccacagatcggcggcgacgacccctactactactgcctcagctggcgcctgatggtggaggcgggcaacgccaaggggtggcgcgcggtgccggcgcagtgcgtgggctacgtgcgcgtgtacatggcctggggccagtaccaccgcgacgtgggcgccgtcgcggagctggcggccgccggtgcggacgggctgatcgacgcctgggtgctggacgtcgacgacacctgcctgtccaaccagccctactaccaggtgaagcagttcggggcgtatgatccggtggctttcagggcgtgggcgagctgggcgacctgcccggggatacctgcgatgcaatggctgttccagacgctgagaggcagagggttcagggtgttcctcgtgactgggagggacgaggagaccctgggctcaagcacggccgccaatctcgccgccgccggcttctccggaagcgcggcgtaccgtgggcagagcgcggtggcgttcaagtcggcggtgcggaggaagctggcggaggaggaggggtaccggatccggggcaacgtgggcgaccagtggagcgacctgcagggcgaatgcgccggggaccgcgtcttcaaggtgcccaaccccatgtacctggtcccatgatcgatcatctcctttcttcttactccctccgtttcttttagttgtctctggatagtttaattttgtactatccagcgacaactaaaacgaaacggatggagcaggtatcaccagctccaccgtacccgtggtggccggcgccatgcatgtactgtatttctactactactagtgggctgagcaaacttctcaatcttcgagcaagcctggaaaggaagctgcagttcgctgcccttaataaaaatattagggaagtcatgtagatggacctccaagggatccaacattcccttccttgtcacaataatttgctttggctgctcttctctgcaagaagagatcaaactaatgcaacaacctcctcagctgttttccacttgtccagctgcacaagacacttttgccccgcccatacacttgtatggataacctgcacattatgatccacttagtttaaac

SEQ ID NO: 67514 - DNA, 4485 bp, Zea Mays
aagaaagaaaactagaggcgcccgcacgcaaaatccaaacccaaaccctcggcgaggacgccaccgtggcgaccgcggtggatgcagcgggtctggtgcccgccgacctggagcggcgggtgatggcggcggtgaaggcgtcggaggcgcgcggggacccgccgcttctgcaggtggtggagctatcccgcatcgtcgccgtggagggcgcggggaccctctccagcgccgaccttgccaggatcctcgtctccaacctatgcttcgcgcacaactcgccctcgctctggaagctcctgggccaggccgtcgtgtcccgcctcctctgcccgctccacgttctcgcactcctcacccctagggtgctgccgcagcggcgagcgcagcctgaggcgtaccgcctgtacctggaactcctcaagtgtcatgtcacgtcgtccttactgtcgatggaggctgggcctaatcgtgacaagatagggaagtccattgctgaagctttgcaactatcaaaggtttatggattttctggaacagagtttggacatgttgtcattatgtttgtgttggctgttgtcagtaaactgattgatagtatatttgaggattgtggctttccatctgcgatggtagaggggcaagagagtgtcaatgccatcgatgggccacagcctatggacttagacgttaaaatgggatctactgagaaccaaaatgagcatcgcgaacagttacgtcggaagaacactctcatcgctttggacgtgttgcatatgatgactgctgatagaaagattcaatcatttctgcgcttgatattcctgaacatgttaggcctgaaaggttcagttctctacgccagaggttgagttctattgaagcacagaaggtgtccttggagactctactgccttctggacacaaaattaatgaattgttaataaatttctggagagtttgcaaaacagactatcaaccgaataacaaacacattcttggtgttcttggtaatatgggatctggtggatcccttctgggccaacttactggagctgggaggcctgcctgctggataatatttgatatatatgtggagaatgcaattgatgggaggcatctaagtgttatatcagctatccgaattataaaagaaatgaccaagacaatgcaagtgcttaacgaagcaagctggcaggaaacatttaaagctctttggatttctgcccttcgtcttgtacaacgggctagagaacctcttgaaggaccaattcctcatctagatgcaaggttatgcatgttgttagctcttataccattatcagttgctgcgattcttcaagaagaaagcgatatgcttggagctgaaggaaacaaaattcttccacaaagacaagggcttatatcgtctctccaggatctgatccagtattcaggacttcttgtgccaccttcatcagtggtgaatgcagctaatgctgcagcctcaaaagcggcaatatttaaggccaactatgaggctggggttggcaactctagcatgatggaccagactgactcttcaatgaaagctgctgggaacatgctccatcttattattgaagcctgtatctcgagaaagttgatcgatacatctgcttatttatggcctggttatgttgtaccatctgggactttaaaagatacagctttgccccaagaatccccttggttaaactttatgaaagggtctcgactttcaggaccccttattgatgctctggtcgcatctcctgcttcaagtgttgcggaattggacaaattatacagtatagcattaaatggttcagaagaagaaaaaacagctgctgcaaagattctttgtggtgcatcacttgttcgtggctggaacattcaggaacatgtggtcggtatggtggtcaagctattatcagcttctttaccctcagattctgcaacttcaactcctgggagcatgagcaactaccttgctcatatgtctacattaaacgaaatcttactcggtgtgtcttatggtgatgccatccacattctttcattgtatggaatggttccagatgttgctgtggcgttaatgccaatatgtgaggcttttgggtcaataccaccgccacctaatcacaagtctaccattcttggtgaaatatctgtttatacagtcttctcttgtgcattcctttgtcttcttcgtttgtggaagttttatagacctcctcaagagtattgtcttgctggtcgtggaggctcagtaaagctggaactgactctggactatctgttgttgatgcacaataatcacattgagttctcaaattcatctgcctctaatagggattcttgcaatgatatgggctcagtaaatgaggttcctgctcagctgatttatattgattcttttcccaagctaagggcttggtatttccagaatcaagcttgcattgcttctccactttctggtctttgcaacaaaaaccctgttcatcaagttgcgaacaaaattttgaatatgatttgccgaaaaatgaataaaggtgtggtatcgtcaagtactctttcatccacttctagtagtagtgtcagtggttcctctgtaagtgcatcagatgatccttgccaaaggcctgctgtttctggttgggaatttttagaagctgttccttttgttcttgaagctgttctgacagcatgtgctcatgggcagctttccagccgagacttgactacaagcttaagggatcttgtggactttttgcctgcttctcttgctgcaattgtgagctacttctcagcagaaattacacgaggaatctggaaacctgtcccaatgaatggaattgaatggcctagtcccggtgcttctcttcattccattgaagctgaagtaaaggaaattcttgcctctgctggtgttcagattaacagctgctatccacgtggtgtgccaccaatgcttcctttacctatggctgcacttgtcagcttgacgattacatttaagctagataggagtttggagtacattcaaggggtcattggacaggcgctagagaactgtgcaggggggagttcctggccaagcatgcccattattggggcattgtggacacagaaagtgcgaagatggcatgacttcatcgtcctctcttgtatgcgttctccattcggcagagacaaagatgcagttgcgcagctcatccaaagttgcttctcgtcctttctgcagtcttcatccagtggttctgatataattgcaaaccgtggagttggggctttactaggggactcaatcacgaatcaaggtcttaggctcccaatggcacctggtttcatctacttgagaacatgtcgaactttccatgacacttactttgttagtgaagtgatccttaagcaagtgattgagtgggctcacaaacttgcaaacggatggtgtttcaatggtcctccgcagttgaaatcagggcggacaccactatcttgtgcagcatccatggtgcagcaggtcgcgttgcttggtggaggtctcctatgcatagcaggtggaccacttgtggtccaggtgttgtatgaggaaacactgccaacactgctgctatcagccagagatcagagtttgaaaggccctgggccagtttctagcacactccaaggttacgccatggccaacatgctcttctactgtggtagcctgctttggggagcggataggacttctcctgtcatgaaattgtccttcctctcgaggcggccacgggtggtgagaacccacatggatttcatagctggtgtgttggacggacacattcttctgggctgtgacccgggtacgtggaaagcgtatgtgtcgcaatttatgttcctggtggtgaaatttgttccgtcatggttgcgggacataaagctggacacgctaaagaagatagcagctggacttcggagctggcacgaacacgaccttgctctgtctcttcttgaacgaggaggaccacaagcaatctctgttgtagtcgagacctttctgtaatccttccgtttggacattttgcccccacctgacatagcagccgccgttaagggtttgtagttggtgatctgaggtctagctgaagtaatccggatgacccttttgatccagaattacacttgtgctacccgggtaactgatgtttatctcatgtatggcgagctcatcggggttttcgtgaatccaatacggaagaacatgcaacctactagggtgtacttcagccctaacatgtataacatgtgggaagttcatgcaacctactagagtgaactttctgtatattttgttgcaatgcatcgtgtttcctatctgcggtaaaaggagagaaaataattcccgcgtttttgtccgtcaacttgttaaccgcactttgctcttctgggttcgcatctcactcttatcgtccacacatttgcaacccaaatctagaatgataccag

SEQ ID NO: 67515 - DNA, 4073 bp, Zea Mays
gaaaactagaggcgcccgcacgcaaaatccaaacccaaaccctcggcgaggacgccaccgtggcgaccgcggtggatgcagcgggtctggtgcccgccgacctggagcggcgggtgatggcggcggtgaaggcgtcggaggcgcgcggggacccgccgcttctgcaggtggtggagctatcccgcatcgtcgccgtggagggcgcggggaccctctccagcgccgaccttgccaggatcctcgtctccaacctatgcttcgcgcacaactcgccctcgctctggaagctcctgggccaggccgtcgtgtcccgcctcctctgcccgctccacgttctcgcactcctcacccctagggtgctgccgcagcggcgagcgcagcctgaggcgtaccgcctgtacctggaactcctcaagtgtcatgtcacgtcgtccttactgtcgatggaggctgggcctaatcgtgacaagcctgaaaggttcagttctctacgccagaggttgagttctattgaagcacagaaggtgtccttggagactctactgccttctggacacaaaattaatgaattgttaataaatttctggagagtttgcaaaacagactatcaaccgaataacaaacacattcttggtgttcttggtaatatgggatctggtggatcccttctgggccaacttactggagctgggaggcctgcctgctggataatatttgatatatatgtggagaatgcaattgatgggaggcatctaagtgttatatcagctatccgaattataaaagaaatgaccaagacaatgcaagtgcttaacgaagcaagctggcaggaaacatttaaagctctttggatttctgcccttcgtcttgtacaacgggctagagaacctcttgaaggaccaattcctcatctagatgcaaggttatgcatgttgttagctcttataccattatcagttgctgcgattcttcaagaagaaagcgatatgcttggagctgaaggaaacaaaattcttccacaaagacaagggcttatatcgtctctccaggatctgatccagtattcaggacttcttgtgccaccttcatcagtggtgaatgcagctaatgctgcagcctcaaaagcggcaatatttaaggccaactatgaggctggggttggcaactctagcatgatggaccagactgactcttcaatgaaagctgctgggaacatgctccatcttattattgaagcctgtatctcgagaaagttgatcgatacatctgcttatttatggcctggttatgttgtaccatctgggactttaaaagatacagctttgccccaagaatccccttggttaaactttatgaaagggtctcgactttcaggaccccttattgatgctctggtcgcatctcctgcttcaagtgttgcggaattggacaaattatacagtatagcattaaatggttcagaagaagaaaaaacagctgctgcaaagattctttgtggtgcatcacttgttcgtggctggaacattcaggaacatgtggtcggtatggtggtcaagctattatcagcttctttaccctcagattctgcaacttcaactcctgggagcatgagcaactaccttgctcatatgtctacattaaacgaaatcttactcggttccagatgttgctgtggcgttaatgccaatatgtgaggcttttgggtcaataccaccgccacctaatcacaagtctaccattcttggtgaaatatctgtttatacagtcttctcttgtgcattcctttgtcttcttcgtttgtggaagttttatagacctcctcaagagtattgtcttgctggtcgtggaggctcagtaaagctggaactgactctggactatctgttgttgatgcacaataatcacattgagttctcaaattcatctgcctctaatagggattcttgcaatgatatgggctcagtaaatgaggttcctgctcagctgatttatattgattcttttcccaagctaagggcttggtatttccagaatcaagcttgcattgcttctccactttctggtctttgcaacaaaaaccctgttcatcaagttgcgaacaaaattttgaatatgatttgccgaaaaatgaataaaggtgtggtatcgtcaagtactctttcatccacttctagtagtagtgtcagtggttcctctgtaagtgcatcagatgatccttgccaaaggcctgctgtttctggttgggaatttttagaagctgttccttttgttcttgaagctgttctgacagcatgtgctcatgggcagctttccagccgagacttgactacaagcttaagggatcttgtggactttttgcctgcttctcttgctgcaattgtgagctacttctcagcagaaattacacgaggaatctggaaacctgtcccaatgaatggaattgaatggcctagtcccggtgcttctcttcattccattgaagctgaagtaaaggaaattcttgcctctgctggtgttcagattaacagctgctatccacgtggtgtgccaccaatgcttcctttacctatggctgcacttgtcagcttgacgattacatttaagctagataggagtttggagtacattcaaggggtcattggacaggcgctagagaactgtgcaggggggagttcctggccaagcatgcccattattggggcattgtggacacagaaagtgcgaagatggcatgacttcatcgtcctctcttgtatgcgttctccattcggcagagacaaagatgcagttgcgcagctcatccaaagttgcttctcgtcctttctgcagtcttcatccagtggttctgatataattgcaaaccgtggagttggggctttactaggggactcaatcacgaatcaaggtcttaggctcccaatggcacctggtttcatctacttgagaacatgtcgaactttccatgacacttactttgttagtgaagtgatccttaagcaagtgattgagtgggctcacaaacttgcaaacggatggtgtttcaatggtcctccgcagttgaaatcagggcggacaccactatcttgtgcagcatccatggtgcagcaggtcgcgttgcttggtggaggtctcctatgcatagcaggtggaccacttgtggtccaggtgttgtatgaggaaacactgccaacactgctgctatcagccagagatcagagtttgaaaggccctgggccagtttctagcacactccaaggttacgccatggccaacatgctcttctactgtggtagcctgctttggggagcggataggacttctcctgtcatgaaattgtccttcctctcgaggcggccacgggtggtgagaacccacatggatttcatagctggtgtgttggacggacacattcttctgggctgtgacccgggtacgtggaaagcgtatgtgtcgcaatttatgttcctggtggtgaaatttgttccgtcatggttgcgggacataaagctggacacgctaaagaagatagcagctggacttcggagctggcacgaacacgaccttgctctgtctcttcttgaacgaggaggaccacaagcaatctctgttgtagtcgagacctttctgtaatccttccgtttggacattttgcccccacctgacatagcagccgccgttaagggtttgtagttggtgatctgaggtctagctgaagtaatccggatgacccttttgatccagaattacacttgtgctacccgggtaactgatgtttatctcatgtatggcgagctcatcggggttttcgtgaatccaatacggaagaacatgcaacctactagggtgtacttcagccctaacatgtataacatgtgggaagttcatgcaacctactagagtgaactttctgtatattttgttgcaatgcatcgtgtttcctatctgcggtaaaaggagagaaaataattcccgcgtttttgtccgtcaacttgttaaccgcactttgctcttctgggttcgcatctcactcttatcgtccacacatttgcaacccaaatctagaatgataccag

SEQ ID NO: 67516 - DNA, 4337 bp, Zea Mays
gaaaactagaggcgcccgcacgcaaaatccaaacccaaaccctcggcgaggacgccaccgtggcgaccgcggtggatgcagcgggtctggtgcccgccgacctggagcggcgggtgatggcggcggtgaaggcgtcggaggcgcgcggggacccgccgcttctgcaggtggtggagctatcccgcatcgtcgccgtggagggcgcggggaccctctccagcgccgaccttgccaggatcctcgtctccaacctatgcttcgcgcacaactcgccctcgctctggaagctcctgggccaggccgtcgtgtcccgcctcctctgcccgctccacgttctcgcactcctcacccctagggtgctgccgcagcggcgagcgcagcctgaggcgtaccgcctgtacctggaactcctcaagtgtcatgtcacgtcgtccttactgtcgatggaggctgggcctaatcgtgacaagatagggaagtccattgctgaagctttgcaactatcaaaggattgtggctttccatctgcgatggtagaggggcaagagagtgtcaatgccatcgatgggccacagcctatggacttagacgttaaaatgggatctactgagaaccaaaatgagcatcgcgaacagttacgtcggaagaacactctcatcgctttggacgtgttgcatatgatgactgctgatagaaagattcaatcatttctgcgcttgatattcctgaacatgcctgaaaggttcagttctctacgccagaggttgagttctattgaagcacagaaggtgtccttggagactctactgccttctggacacaaaattaatgaattgttaataaatttctggagagtttgcaaaacagactatcaaccgaataacaaacacattcttggtgttcttggtaatatgggatctggtggatcccttctgggccaacttactggagctgggaggcctgcctgctggataatatttgatatatatgtggagaatgcaattgatgggaggcatctaagtgttatatcagctatccgaattataaaagaaatgaccaagacaatgcaagtgcttaacgaagcaagctggcaggaaacatttaaagctctttggatttctgcccttcgtcttgtacaacgggctagagaacctcttgaaggaccaattcctcatctagatgcaaggttatgcatgttgttagctcttataccattatcagttgctgcgattcttcaagaagaaagcgatatgcttggagctgaaggaaacaaaattcttccacaaagacaagggcttatatcgtctctccaggatctgatccagtattcaggacttcttgtgccaccttcatcagtggtgaatgcagctaatgctgcagcctcaaaagcggcaatatttaaggccaactatgaggctggggttggcaactctagcatgatggaccagactgactcttcaatgaaagctgctgggaacatgctccatcttattattgaagcctgtatctcgagaaagttgatcgatacatctgcttatttatggcctggttatgttgtaccatctgggactttaaaagatacagctttgccccaagaatccccttggttaaactttatgaaagggtctcgactttcaggaccccttattgatgctctggtcgcatctcctgcttcaagtgttgcggaattggacaaattatacagtatagcattaaatggttcagaagaagaaaaaacagctgctgcaaagattctttgtggtgcatcacttgttcgtggctggaacattcaggaacatgtggtcggtatggtggtcaagctattatcagcttctttaccctcagattctgcaacttcaactcctgggagcatgagcaactaccttgctcatatgtctacattaaacgaaatcttactcggttccagatgttgctgtggcgttaatgccaatatgtgaggcttttgggtcaataccaccgccacctaatcacaagtctaccattcttggtgaaatatctgtttatacagtcttctcttgtgcattcctttgtcttcttcgtttgtggaagttttatagacctcctcaagagtattgtcttgctggtcgtggaggctcagtaaagctggaactgactctggactatctgttgttgatgcacaataatcacattgagttctcaaattcatctgcctctaatagggattcttgcaatgatatgggctcagtaaatgaggttcctgctcagctgatttatattgattcttttcccaagctaagggcttggtatttccagaatcaagcttgcattgcttctccactttctggtctttgcaacaaaaaccctgttcatcaagttgcgaacaaaattttgaatatgatttgccgaaaaatgaataaaggtgtggtatcgtcaagtactctttcatccacttctagtagtagtgtcagtggttcctctgtaagtgcatcagatgatccttgccaaaggcctgctgtttctggttgggaatttttagaagctgttccttttgttcttgaagctgttctgacagcatgtgctcatgggcagctttccagccgagacttgactacaagcttaagggatcttgtggactttttgcctgcttctcttgctgcaattgtgagctacttctcagcagaaattacacgaggaatctggaaacctgtcccaatgaatggaattgaatggcctagtcccggtgcttctcttcattccattgaagctgaagtaaaggaaattcttgcctctgctggtgttcagattaacagctgctatccacgtggtgtgccaccaatgcttcctttacctatggctgcacttgtcagcttgacgattacatttaagctagataggagtttggagtacattcaaggggtcattggacaggcgctagagaactgtgcaggggggagttcctggccaagcatgcccattattggggcattgtggacacagaaagtgcgaagatggcatgacttcatcgtcctctcttgtatgcgttctccattcggcagagacaaagatgcagttgcgcagctcatccaaagttgcttctcgtcctttctgcagtcttcatccagtggttctgatataattgcaaaccgtggagttggggctttactaggggactcaatcacgaatcaaggtcttaggctcccaatggcacctggtttcatctacttgagaacatgtcgaactttccatgacacttactttgttagtgaagtgatccttaagcaagtgattgagtgggctcacaaacttgcaaacggatggtgtttcaatggtcctccgcagttgaaatcagggcggacaccactatcttgtgcagcatccatggtgcagcaggtcgcgttgcttggtggaggtctcctatgcatagcaggtggaccacttgtggtccaggtgttgtatgaggaaacactgccaacactgctgctatcagccagagatcagagtttgaaaggccctgggccagtttctagcacactccaaggttacgccatggccaacatgctcttctactgtggtagcctgctttggggagcggataggacttctcctgtcatgaaattgtccttcctctcgaggcggccacgggtggtgagaacccacatggatttcatagctggtgtgttggacggacacattcttctgggctgtgacccgggtacgtggaaagcgtatgtgtcgcaatttatgttcctggtggtgaaatttgttccgtcatggttgcgggacataaagctggacacgctaaagaagatagcagctggacttcggagctggcacgaacacgaccttgctctgtctcttcttgaacgaggaggaccacaagcaatctctgttgtagtcgagacctttctgtaatccttccgtttggacattttgcccccacctgacatagcagccgccgttaagggtttgtagttggtgatctgaggtctagctgaagtaatccggatgacccttttgatccagaattacacttgtgctacccgggtaactgatgtttatctcatgtatggcgagctcatcggggttttcgtgaatccaatacggaagaacatgcaacctactagggtgtacttcagccctaacatgtataacatgtgggaagttcatgcaacctactagagtgaactttctgtatattttgttgcaatgcatcgtgtttcctatctgcggtaaaaggagagaaaataattcccgcgtttttgtccgtcaacttgttaaccgcactttgctcttctgggttcgcatctcactcttatcgtccacacatttgcaacccaaatctagaatgataccag

SEQ ID NO: 67517 - DNA, 4361 bp, Zea Mays
gaggcgcccgcacgcaaaatccaaacccaaaccctcggcgaggacgccaccgtggcgaccgcggtggatgcagcgggtctggtgcccgccgacctggagcggcgggtgatggcggcggtgaaggcgtcggaggcgcgcggggacccgccgcttctgcaggtggtggagctatcccgcatcgtcgccgtggagggcgcggggaccctctccagcgccgaccttgccaggatcctcgtctccaacctatgcttcgcgcacaactcgccctcgctctggaagctcctgggccaggccgtcgtgtcccgcctcctctgcccgctccacgttctcgcactcctcacccctagggtgctgccgcagcggcgagcgcagcctgaggcgtaccgcctgtacctggaactcctcaagtgtcatgtcacgtcgtccttactgtcgatggaggctgggcctaatcgtgacaataaactgattgatagtatatttgaggattgtggctttccatctgcgatggtagaggggcaagagagtgtcaatgccatcgatgggccacagcctatggacttagacgttaaaatgggatctactgagaaccaaaatgagcatcgcgaacagttacgtcggaagaacactctcatcgctttggacgtgttgcatatgatgactgctgatagaaagattcaatcatttctgcgcttgatattcctgaacatgcctgaaaggttcagttctctacgccagaggttgagttctattgaagcacagaaggtgtccttggagactctactgccttctggacacaaaattaatgaattgttaataaatttctggagagtttgcaaaacagactatcaaccgaataacaaacacattcttggtgttcttggtaatatgggatctggtggatcccttctgggccaacttactggagctgggaggcctgcctgctggataatatttgatatatatgtggagaatgcaattgatgggaggcatctaagtgttatatcagctatccgaattataaaagaaatgaccaagacaatgcaagtgcttaacgaagcaagctggcaggaaacatttaaagctctttggatttctgcccttcgtcttgtacaacgggctagagaacctcttgaaggaccaattcctcatctagatgcaaggttatgcatgttgttagctcttataccattatcagttgctgcgattcttcaagaagaaagcgatatgcttggagctgaaggaaacaaaattcttccacaaagacaagggcttatatcgtctctccaggatctgatccagtattcaggacttcttgtgccaccttcatcagtggtgaatgcagctaatgctgcagcctcaaaagcggcaatatttaaggccaactatgaggctggggttggcaactctagcatgatggaccagactgactcttcaatgaaagctgctgggaacatgctccatcttattattgaagcctgtatctcgagaaagttgatcgatacatctgcttatttatggcctggttatgttgtaccatctgggactttaaaagatacagctttgccccaagaatccccttggttaaactttatgaaagggtctcgactttcaggaccccttattgatgctctggtcgcatctcctgcttcaagtgttgcggaattggacaaattatacagtatagcattaaatggttcagaagaagaaaaaacagctgctgcaaagattctttgtggtgcatcacttgttcgtggctggaacattcaggaacatgtggtcggtatggtggtcaagctattatcagcttctttaccctcagattctgcaacttcaactcctgggagcatgagcaactaccttgctcatatgtctacattaaacgaaatcttactcggtgtgtcttatggtgatgccatccacattctttcattgtatggaatggttccagatgttgctgtggcgttaatgccaatatgtgaggcttttgggtcaataccaccgccacctaatcacaagtctaccattcttggtgaaatatctgtttatacagtcttctcttgtgcattcctttgtcttcttcgtttgtggaagttttatagacctcctcaagagtattgtcttgctggtcgtggaggctcagtaaagctggaactgactctggactatctgttgttgatgcacaataatcacattgagttctcaaattcatctgcctctaatagggattcttgcaatgatatgggctcagtaaatgaggttcctgctcagctgatttatattgattcttttcccaagctaagggcttggtatttccagaatcaagcttgcattgcttctccactttctggtctttgcaacaaaaaccctgttcatcaagttgcgaacaaaattttgaatatgatttgccgaaaaatgaataaaggtgtggtatcgtcaagtactctttcatccacttctagtagtagtgtcagtggttcctctgtaagtgcatcagatgatccttgccaaaggcctgctgtttctggttgggaatttttagaagctgttccttttgttcttgaagctgttctgacagcatgtgctcatgggcagctttccagccgagacttgactacaagcttaagggatcttgtggactttttgcctgcttctcttgctgcaattgtgagctacttctcagcagaaattacacgaggaatctggaaacctgtcccaatgaatggaattgaatggcctagtcccggtgcttctcttcattccattgaagctgaagtaaaggaaattcttgcctctgctggtgttcagattaacagctgctatccacgtggtgtgccaccaatgcttcctttacctatggctgcacttgtcagcttgacgattacatttaagctagataggagtttggagtacattcaaggggtcattggacaggcgctagagaactgtgcaggggggagttcctggccaagcatgcccattattggggcattgtggacacagaaagtgcgaagatggcatgacttcatcgtcctctcttgtatgcgttctccattcggcagagacaaagatgcagttgcgcagctcatccaaagttgcttctcgtcctttctgcagtcttcatccagtggttctgatataattgcaaaccgtggagttggggctttactaggggactcaatcacgaatcaaggtcttaggctcccaatggcacctggtttcatctacttgagaacatgtcgaactttccatgacacttactttgttagtgaagtgatccttaagcaagtgattgagtgggctcacaaacttgcaaacggatggtgtttcaatggtcctccgcagttgaaatcagggcggacaccactatcttgtgcagcatccatggtgcagcaggtcgcgttgcttggtggaggtctcctatgcatagcaggtggaccacttgtggtccaggtgttgtatgaggaaacactgccaacactgctgctatcagccagagatcagagtttgaaaggccctgggccagtttctagcacactccaaggttacgccatggccaacatgctcttctactgtggtagcctgctttggggagcggataggacttctcctgtcatgaaattgtccttcctctcgaggcggccacgggtggtgagaacccacatggatttcatagctggtgtgttggacggacacattcttctgggctgtgacccgggtacgtggaaagcgtatgtgtcgcaatttatgttcctggtggtgaaatttgttccgtcatggttgcgggacataaagctggacacgctaaagaagatagcagctggacttcggagctggcacgaacacgaccttgctctgtctcttcttgaacgaggaggaccacaagcaatctctgttgtagtcgagacctttctgtaatccttccgtttggacattttgcccccacctgacatagcagccgccgttaagggtttgtagttggtgatctgaggtctagctgaagtaatccggatgacccttttgatccagaattacacttgtgctacccgggtaactgatgtttatctcatgtatggcgagctcatcggggttttcgtgaatccaatacggaagaacatgcaacctactagggtgtacttcagccctaacatgtataacatgtgggaagttcatgcaacctactagagtgaactttctgtatattttgttgcaatgcatcgtgtttcctatctgcggtaaaaggagagaaaataattcccgcgtttttgtccgtcaacttgttaaccgcactttgctcttctgggttcgcatctcactcttatcgtccacacatttgcaacccaaatctagaatgataccag

SEQ ID NO: 67518 - DNA, 4248 bp, Zea Mays
gaggcgcccgcacgcaaaatccaaacccaaaccctcggcgaggacgccaccgtggcgaccgcggtggatgcagcgggtctggtgcccgccgacctggagcggcgggtgatggcggcggtgaaggcgtcggaggcgcgcggggacccgccgcttctgcaggtggtggagctatcccgcatcgtcgccgtggagggcgcggggaccctctccagcgccgaccttgccaggatcctcgtctccaacctatgcttcgcgcacaactcgccctcgctctggaagctcctgggccaggccgtcgtgtcccgcctcctctgcccgctccacgttctcgcactcctcacccctagggtgctgccgcagcggcgagcgcagcctgaggcgtaccgcctgtacctggaactcctcaagtgtcatgtcacgtcgtccttactgtcgatggaggctgggcctaatcgtgacaagatagggaagtccattgctgaagctttgcaactatcaaaggtttatggattttctggaacagagtttggacatgttgtcattatgtttgtgttggctgttgtcagtaaactgattgatagtatatttgaggattgtggctttccatctgcgatggtagaggggcaagagagtgtcaatgccatcgatgggccacagcctatggacttagacgttaaaatgggatctactgagaaccaaaatgagcatcgcgaacagttacgtcggaagaacactctcatcgctttggacgtgttgcatatgatgactgctgatagaaagattcaatcatttctgcgcttgatattcctgaacatgcctgaaaggttcagttctctacgccagaggttgagttctattgaagcacagaaggtgtccttggagactctactgccttctggacacaaaattaatgaattgttaataaatttctggagagtttgcaaaacagactatcaaccgaataacaaacacattcttggtgttcttggtaatatgggatctggtggatcccttctgggccaacttactggagctgggaggcctgcctgctggataatatttgatatatatgtggagaatgcaattgatgggaggcatctaagtgttatatcagctatccgaattataaaagaaatgaccaagacaatgcaagtgcttaacgaagcaagctggcaggaaacatttaaagctctttggatttctgcccttcgtcttgtacaacgggctagagaacctcttgaaggaccaattcctcatctagatgcaaggttatgcatgttgttagctcttataccattatcagttgctgcgattcttcaagaagaaagcgatatgcttggagctgaaggaaacaaaattcttccacaaagacaagggcttatatcgtctctccaggatctgatccagtattcaggacttcttgtgccaccttcatcagtggtgaatgcagctaatgctgcagcctcaaaagcggcaatatttaaggccaactatgaggctggggttggcaactctagcatgatggaccagactgactcttcaatgaaagctgctgggaacatgctccatcttattattgaagcctgtatctcgagaaagttgatcgatacatctgcttatttatggcctggttatgttgtaccatctgggactttaaaagatacagctttgccccaagaatccccttggttaaactttatgaaagggtctcgactttcaggaccccttattgatgctctggtcgcatctcctgcttcaagtgttgcggaattggacaaattatacagtatagcattaaatggttcagaagaagaaaaaacagctgctgcaaagattctttgtggtgcatcacttgttcgtggctggaacattcaggaacatgtggtcggtatggtggtcaagctattatcagcttctttaccctcagattctgcaacttcaactcctgggagcatgagcaactaccttgctcatatgtctacattaaacgaaatcttactcggtgtgtcttatggtgatgccatccacattctttcattgtatggaatggttccagatgttgctgtggcgttaatgccaatatgtgaggcttttgggtcaataccaccgccacctaatcacaagtctaccattcttggtgaaatatctgtttatacagtcttctcttgtgcattcctttgtcttcttcgtttgtggaagttttatagacctcctcaagagtattgtcttgctggtcgtggaggctcagtaaagctggaactgactctggactatctgttgttgatgcacaataatcacattgagttctcaaattcatctgcctctaatagggattcttgcaatgatatgggctcagtaaatgaggttcctgctcagctgatttatattgattcttttcccaagctaagggcttggtatttccagaatcaagcttgcattgcttctccactttctggtctttgcaacaaaaaccctgttcatcaagttgcgaacaaaattttgaatatgatttgccgaaaaatgaataaagaagctgttccttttgttcttgaagctgttctgacagcatgtgctcatgggcagctttccagccgagacttgactacaagcttaagggatcttgtggactttttgcctgcttctcttgctgcaattgtgagctacttctcagcagaaattacacgaggaatctggaaacctgtcccaatgaatggaattgaatggcctagtcccggtgcttctcttcattccattgaagctgaagtaaaggaaattcttgcctctgctggtgttcagattaacagctgctatccacgtggtgtgccaccaatgcttcctttacctatggctgcacttgtcagcttgacgattacatttaagctagataggagtttggagtacattcaaggggtcattggacaggcgctagagaactgtgcaggggggagttcctggccaagcatgcccattattggggcattgtggacacagaaagtgcgaagatggcatgacttcatcgtcctctcttgtatgcgttctccattcggcagagacaaagatgcagttgcgcagctcatccaaagttgcttctcgtcctttctgcagtcttcatccagtggttctgatataattgcaaaccgtggagttggggctttactaggggactcaatcacgaatcaaggtcttaggctcccaatggcacctggtttcatctacttgagaacatgtcgaactttccatgacacttactttgttagtgaagtgatccttaagcaagtgattgagtgggctcacaaacttgcaaacggatggtgtttcaatggtcctccgcagttgaaatcagggcggacaccactatcttgtgcagcatccatggtgcagcagagatcagagtttgaaaggccctgggccagtttctagcacactccaaggttacgccatggccaacatgctcttctactgtggtagcctgctttggggagcggataggacttctcctgtcatgaaattgtccttcctctcgaggcggccacgggtggtgagaacccacatggatttcatagctggtgtgttggacggacacattcttctgggctgtgacccgggtacgtggaaagcgtatgtgtcgcaatttatgttcctggtggtgaaatttgttccgtcatggttgcgggacataaagctggacacgctaaagaagatagcagctggacttcggagctggcacgaacacgaccttgctctgtctcttcttgaacgaggaggaccacaagcaatctctgttgtagtcgagacctttctgtaatccttccgtttggacattttgcccccacctgacatagcagccgccgttaagggtttgtagttggtgatctgaggtctagctgaagtaatccggatgacccttttgatccagaattacacttgtgctacccgggtaactgatgtttatctcatgtatggcgagctcatcggggttttcgtgaatccaatacggaagaacatgcaacctactagggtgtacttcagccctaacatgtataacatgtgggaagttcatgcaacctactagagtgaactttctgtatattttgttgcaatgcatcgtgtttcctatctgcggtaaaaggagagaaaataattcccgcgtttttgtccgtcaacttgttaaccgcactttgctcttctgggttcgcatctcactcttatcgtccacacatttgcaacccaaatctagaatgataccag

SEQ ID NO: 67519 - DNA, 4117 bp, Zea Mays
gaggcgcccgcacgcaaaatccaaacccaaaccctcggcgaggacgccaccgtggcgaccgcggtggatgcagcgggtctggtgcccgccgacctggagcggcgggtgatggcggcggtgaaggcgtcggaggcgcgcggggacccgccgcttctgcaggtggtggagctatcccgcatcgtcgccgtggagggcgcggggaccctctccagcgccgaccttgccaggatcctcgtctccaacctatgcttcgcgcacaactcgccctcgctctggaagctcctgggccaggccgtcgtgtcccgcctcctctgcccgctccacgttctcgcactcctcacccctagggtgctgccgcagcggcgagcgcagcctgaggcgtaccgcctgtacctggaactcctcaagtgtcatgtcacgtcgtccttactgtcgatggaggctgggcctaatcgtgacaagttaggcctgaaaggttcagttctctacgccagaggttgagttctattgaagcacagaaggtgtccttggagactctactgccttctggacacaaaattaatgaattgttaataaatttctggagagtttgcaaaacagactatcaaccgaataacaaacacattcttggtgttcttggtaatatgggatctggtggatcccttctgggccaacttactggagctgggaggcctgcctgctggataatatttgatatatatgtggagaatgcaattgatgggaggcatctaagtgttatatcagctatccgaattataaaagaaatgaccaagacaatgcaagtgcttaacgaagcaagctggcaggaaacatttaaagctctttggatttctgcccttcgtcttgtacaacgggctagagaacctcttgaaggaccaattcctcatctagatgcaaggttatgcatgttgttagctcttataccattatcagttgctgcgattcttcaagaagaaagcgatatgcttggagctgaaggaaacaaaattcttccacaaagacaagggcttatatcgtctctccaggatctgatccagtattcaggacttcttgtgccaccttcatcagtggtgaatgcagctaatgctgcagcctcaaaagcggcaatatttaaggccaactatgaggctggggttggcaactctagcatgatggaccagactgactcttcaatgaaagctgctgggaacatgctccatcttattattgaagcctgtatctcgagaaagttgatcgatacatctgcttatttatggcctggttatgttgtaccatctgggactttaaaagatacagctttgccccaagaatccccttggttaaactttatgaaagggtctcgactttcaggaccccttattgatgctctggtcgcatctcctgcttcaagtgttgcggaattggacaaattatacagtatagcattaaatggttcagaagaagaaaaaacagctgctgcaaagattctttgtggtgcatcacttgttcgtggctggaacattcaggaacatgtggtcggtatggtggtcaagctattatcagcttctttaccctcagattctgcaacttcaactcctgggagcatgagcaactaccttgctcatatgtctacattaaacgaaatcttactcggtgtgtcttatggtgatgccatccacattctttcattgtatggaatggttccagatgttgctgtggcgttaatgccaatatgtgaggcttttgggtcaataccaccgccacctaatcacaagtctaccattcttggtgaaatatctgtttatacagtcttctcttgtgcattcctttgtcttcttcgtttgtggaagttttatagacctcctcaagagtattgtcttgctggtcgtggaggctcagtaaagctggaactgactctggactatctgttgttgatgcacaataatcacattgagttctcaaattcatctgcctctaatagggattcttgcaatgatatgggctcagtaaatgaggttcctgctcagctgatttatattgattcttttcccaagctaagggcttggtatttccagaatcaagcttgcattgcttctccactttctggtctttgcaacaaaaaccctgttcatcaagttgcgaacaaaattttgaatatgatttgccgaaaaatgaataaaggtgtggtatcgtcaagtactctttcatccacttctagtagtagtgtcagtggttcctctgtaagtgcatcagatgatccttgccaaaggcctgctgtttctggttgggaatttttagaagctgttccttttgttcttgaagctgttctgacagcatgtgctcatgggcagctttccagccgagacttgactacaagcttaagggatcttgtggactttttgcctgcttctcttgctgcaattgtgagctacttctcagcagaaattacacgaggaatctggaaacctgtcccaatgaatggaattgaatggcctagtcccggtgcttctcttcattccattgaagctgaagtaaaggaaattcttgcctctgctggtgttcagattaacagctgctatccacgtggtgtgccaccaatgcttcctttacctatggctgcacttgtcagcttgacgattacatttaagctagataggagtttggagtacattcaaggggtcattggacaggcgctagagaactgtgcaggggggagttcctggccaagcatgcccattattggggcattgtggacacagaaagtgcgaagatggcatgacttcatcgtcctctcttgtatgcgttctccattcggcagagacaaagatgcagttgcgcagctcatccaaagttgcttctcgtcctttctgcagtcttcatccagtggttctgatataattgcaaaccgtggagttggggctttactaggggactcaatcacgaatcaaggtcttaggctcccaatggcacctggtttcatctacttgagaacatgtcgaactttccatgacacttactttgttagtgaagtgatccttaagcaagtgattgagtgggctcacaaacttgcaaacggatggtgtttcaatggtcctccgcagttgaaatcagggcggacaccactatcttgtgcagcatccatggtgcagcaggtcgcgttgcttggtggaggtctcctatgcatagcaggtggaccacttgtggtccaggtgttgtatgaggaaacactgccaacactgctgctatcagccagagatcagagtttgaaaggccctgggccagtttctagcacactccaaggttacgccatggccaacatgctcttctactgtggtagcctgctttggggagcggataggacttctcctgtcatgaaattgtccttcctctcgaggcggccacgggtggtgagaacccacatggatttcatagctggtgtgttggacggacacattcttctgggctgtgacccgggtacgtggaaagcgtatgtgtcgcaatttatgttcctggtggtgaaatttgttccgtcatggttgcgggacataaagctggacacgctaaagaagatagcagctggacttcggagctggcacgaacacgaccttgctctgtctcttcttgaacgaggaggaccacaagcaatctctgttgtagtcgagacctttctgtaatccttccgtttggacattttgcccccacctgacatagcagccgccgttaagggtttgtagttggtgatctgaggtctagctgaagtaatccggatgacccttttgatccagaattacacttgtgctacccgggtaactgatgtttatctcatgtatggcgagctcatcggggttttcgtgaatccaatacggaagaacatgcaacctactagggtgtacttcagccctaacatgtataacatgtgggaagttcatgcaacctactagagtgaactttctgtatattttgttgcaatgcatcgtgtttcctatctgcggtaaaaggagagaaaataattcccgcgtttttgtccgtcaacttgttaaccgcactttgctcttctgggttcgcatctcactcttatcgtccacacatttgcaacccaaatctagaatgataccag

SEQ ID NO: 67520 - DNA, 4292 bp, Zea Mays
gaggcgcccgcacgcaaaatccaaacccaaaccctcggcgaggacgccaccgtggcgaccgcggtggatgcagcgggtctggtgcccgccgacctggagcggcgggtgatggcggcggtgaaggcgtcggaggcgcgcggggacccgccgcttctgcaggtggtggagctatcccgcatcgtcgccgtggagggcgcggggaccctctccagcgccgaccttgccaggatcctcgtctccaacctatgcttcgcgcacaactcgccctcgctctggaagctcctgggccaggccgtcgtgtcccgcctcctctgcccgctccacgttctcgcactcctcacccctagggtgctgccgcagcggcgagcgcagcctgaggcgtaccgcctgtacctggaactcctcaagtgtcatgtcacgtcgtccttactgtcgatggaggctgggcctaatcgtgacaagatagggaagtccattgctgaagctttgcaactatcaaaggtttatggattttctggaacagagtttggacatgttgtcattatgtttgtgttggctgttgtcagtaaactgattgatagtatatttgaggattgtggctttccatctgcgatggtagaggggcaagagagtgtcaatgccatcgatgggccacagcctatggacttagacgttaaaatgggatctactgagaaccaaaatgagcatcgcgaacagttacgtcggaagaacactctcatcgctttggacgtgttgcatatgatgactgctgatagaaagattcaatcatttctgcgcttgatattcctgaacatgcctgaaaggttcagttctctacgccagaggttgagttctattgaagcacagaaggtgtccttggagactctactgccttctggacacaaaattaatgaattgttaataaatttctggagagtttgcaaaacagactatcaaccgaataacaaacacattcttggtgttcttggtaatatgggatctggtggatcccttctgggccaacttactggagctgggaggcctgcctgctggataatatttgatatatatgtggagaatgcaattgatgggaggcatctaagtgttatatcagctatccgaattataaaagaaatgaccaagacaatgcaagtgcttaacgaagcaagctggcaggaaacatttaaagctctttggatttctgcccttcgtcttgtacaacgggctagagaacctcttgaaggaccaattcctcatctagatgcaaggttatgcatgttgttagctcttataccattatcagttgctgcgattcttcaagaagaaagcgatatgcttggagctgaaggaaacaaaattcttccacaaagacaagggcttatatcgtctctccaggatctgatccagtattcaggacttcttgtgccaccttcatcagtggtgaatgcagctaatgctgcagcctcaaaagcggcaatatttaaggccaactatgaggctggggttggcaactctagcatgatggaccagactgactcttcaatgaaagctgctgggaacatgctccatcttattattgaagcctgtatctcgagaaagttgatcgatacatctgcttatttatggcctggttatgttgtaccatctgggactttaaaagatacagctttgccccaagaatccccttggttaaactttatgaaagggtctcgactttcaggaccccttattgatgctctggtcgcatctcctgcttcaagtgttgcggaattggacaaattatacagtatagcattaaatggttcagaagaagaaaaaacagctgctgcaaagattctttgtggtgcatcacttgttcgtggctggaacattcaggttccagatgttgctgtggcgttaatgccaatatgtgaggcttttgggtcaataccaccgccacctaatcacaagtctaccattcttggtgaaatatctgtttatacagtcttctcttgtgcattcctttgtcttcttcgtttgtggaagttttatagacctcctcaagagtattgtcttgctggtcgtggaggctcagtaaagctggaactgactctggactatctgttgttgatgcacaataatcacattgagttctcaaattcatctgcctctaatagggattcttgcaatgatatgggctcagtaaatgaggttcctgctcagctgatttatattgattcttttcccaagctaagggcttggtatttccagaatcaagcttgcattgcttctccactttctggtctttgcaacaaaaaccctgttcatcaagttgcgaacaaaattttgaatatgatttgccgaaaaatgaataaaggtgtggtatcgtcaagtactctttcatccacttctagtagtagtgtcagtggttcctctgtaagtgcatcagatgatccttgccaaaggcctgctgtttctggttgggaatttttagaagctgttccttttgttcttgaagctgttctgacagcatgtgctcatgggcagctttccagccgagacttgactacaagcttaagggatcttgtggactttttgcctgcttctcttgctgcaattgtgagctacttctcagcagaaattacacgaggaatctggaaacctgtcccaatgaatggaattgaatggcctagtcccggtgcttctcttcattccattgaagctgaagtaaaggaaattcttgcctctgctggtgttcagattaacagctgctatccacgtggtgtgccaccaatgcttcctttacctatggctgcacttgtcagcttgacgattacatttaagctagataggagtttggagtacattcaaggggtcattggacaggcgctagagaactgtgcaggggggagttcctggccaagcatgcccattattggggcattgtggacacagaaagtgcgaagatggcatgacttcatcgtcctctcttgtatgcgttctccattcggcagagacaaagatgcagttgcgcagctcatccaaagttgcttctcgtcctttctgcagtcttcatccagtggttctgatataattgcaaaccgtggagttggggctttactaggggactcaatcacgaatcaaggtcttaggctcccaatggcacctggtttcatctacttgagaacatgtcgaactttccatgacacttactttgttagtgaagtgatccttaagcaagtgattgagtgggctcacaaacttgcaaacggatggtgtttcaatggtcctccgcagttgaaatcagggcggacaccactatcttgtgcagcatccatggtgcagcaggtcgcgttgcttggtggaggtctcctatgcatagcaggtggaccacttgtggtccaggtgttgtatgaggaaacactgccaacactgctgctatcagccagagatcagagtttgaaaggccctgggccagtttctagcacactccaaggttacgccatggccaacatgctcttctactgtggtagcctgctttggggagcggataggacttctcctgtcatgaaattgtccttcctctcgaggcggccacgggtggtgagaacccacatggatttcatagctggtgtgttggacggacacattcttctgggctgtgacccgggtacgtggaaagcgtatgtgtcgcaatttatgttcctggtggtgaaatttgttccgtcatggttgcgggacataaagctggacacgctaaagaagatagcagctggacttcggagctggcacgaacacgaccttgctctgtctcttcttgaacgaggaggaccacaagcaatctctgttgtagtcgagacctttctgtaatccttccgtttggacattttgcccccacctgacatagcagccgccgttaagggtttgtagttggtgatctgaggtctagctgaagtaatccggatgacccttttgatccagaattacacttgtgctacccgggtaactgatgtttatctcatgtatggcgagctcatcggggttttcgtgaatccaatacggaagaacatgcaacctactagggtgtacttcagccctaacatgtataacatgtgggaagttcatgcaacctactagagtgaactttctgtatattttgttgcaatgcatcgtgtttcctatctgcggtaaaaggagagaaaataattcccgcgtttttgtccgtcaacttgttaaccgcactttgctcttctgggttcgcatctcactcttatcgtccacacatttgcaacccaaatctagaatgataccag

SEQ ID NO: 67521 - DNA, 2473 bp, Zea Mays
gtgtgctttgctttgtccatcaaaaaatgtgttttatctgtttcattataatcaaggttccagatgttgctgtggcgttaatgccaatatgtgaggcttttgggtcaataccaccgccacctaatcacaagtctaccattcttggtgaaatatctgtttatacagtcttctcttgtgcattcctttgtcttcttcgtttgtggaagttttatagacctcctcaagagtattgtcttgctggtcgtggaggctcagtaaagctggaactgactctggactatctgttgttgatgcacaataatcacattgagttctcaaattcatctgcctctaatagggattcttgcaatgatatgggctcagtaaatgaggttcctgctcagctgatttatattgattcttttcccaagctaagggcttggtatttccagaatcaagcttgcattgcttctccactttctggtctttgcaacaaaaaccctgttcatcaagttgcgaacaaaattttgaatatgatttgccgaaaaatgaataaaggtgtggtatcgtcaagtactctttcatccacttctagtagtagtgtcagtggttcctctgtaagtgcatcagatgatccttgccaaaggcctgctgtttctggttgggaatttttagaagctgttccttttgttcttgaagctgttctgacagcatgtgctcatgggcagctttccagccgagacttgactacaagcttaagggatcttgtggactttttgcctgcttctcttgctgcaattgtgagctacttctcagcagaaattacacgaggaatctggaaacctgtcccaatgaatggaattgaatggcctagtcccggtgcttctcttcattccattgaagctgaagtaaaggaaattcttgcctctgctggtgttcagattaacagctgctatccacgtggtgtgccaccaatgcttcctttacctatggctgcacttgtcagcttgacgattacatttaagctagataggagtttggagtacattcaaggggtcattggacaggcgctagagaactgtgcaggggggagttcctggccaagcatgcccattattggggcattgtggacacagaaagtgcgaagatggcatgacttcatcgtcctctcttgtatgcgttctccattcggcagagacaaagatgcagttgcgcagctcatccaaagttgcttctcgtcctttctgcagtcttcatccagtggttctgatataattgcaaaccgtggagttggggctttactaggggactcaatcacgaatcaaggtcttaggctcccaatggcacctggtttcatctacttgagaacatgtcgaactttccatgacacttactttgttagtgaagtgatccttaagcaagtgattgagtgggctcacaaacttgcaaacggatggtgtttcaatggtcctccgcagttgaaatcagggcggacaccactatcttgtgcagcatccatggtgcagcaggtcgcgttgcttggtggaggtctcctatgcatagcaggtggaccacttgtggtccaggtgttgtatgaggaaacactgccaacactgctgctatcagccagagatcagagtttgaaaggccctgggccagtttctagcacactccaaggttacgccatggccaacatgctcttctactgtggtagcctgctttggggagcggataggacttctcctgtcatgaaattgtccttcctctcgaggcggccacgggtggtgagaacccacatggatttcatagctggtgtgttggacggacacattcttctgggctgtgacccgggtacgtggaaagcgtatgtgtcgcaatttatgttcctggtggtgaaatttgttccgtcatggttgcgggacataaagctggacacgctaaagaagatagcagctggacttcggagctggcacgaacacgaccttgctctgtctcttcttgaacgaggaggaccacaagcaatctctgttgtagtcgagacctttctgtaatccttccgtttggacattttgcccccacctgacatagcagccgccgttaagggtttgtagttggtgatctgaggtctagctgaagtaatccggatgacccttttgatccagaattacacttgtgctacccgggtaactgatgtttatctcatgtatggcgagctcatcggggttttcgtgaatccaatacggaagaacatgcaacctactagggtgtacttcagccctaacatgtataacatgtgggaagttcatgcaacctactagagtgaactttctgtatattttgttgcaatgcatcgtgtttcctatctgcggtaaaaggagagaaaataattcccgcgtttttgtccgtcaacttgttaaccgcactttgctcttctgggttcgcatctcactcttatcgtccacacatttgcaacccaaatctagaatgataccag

SEQ ID NO: 67522 - DNA, 2466 bp, Zea Mays
cacttgcttcactaacatatgatggctgcccaacctcattgaccaataggttccagatgttgctgtggcgttaatgccaatatgtgaggcttttgggtcaataccaccgccacctaatcacaagtctaccattcttggtgaaatatctgtttatacagtcttctcttgtgcattcctttgtcttcttcgtttgtggaagttttatagacctcctcaagagtattgtcttgctggtcgtggaggctcagtaaagctggaactgactctggactatctgttgttgatgcacaataatcacattgagttctcaaattcatctgcctctaatagggattcttgcaatgatatgggctcagtaaatgaggttcctgctcagctgatttatattgattcttttcccaagctaagggcttggtatttccagaatcaagcttgcattgcttctccactttctggtctttgcaacaaaaaccctgttcatcaagttgcgaacaaaattttgaatatgatttgccgaaaaatgaataaaggtgtggtatcgtcaagtactctttcatccacttctagtagtagtgtcagtggttcctctgtaagtgcatcagatgatccttgccaaaggcctgctgtttctggttgggaatttttagaagctgttccttttgttcttgaagctgttctgacagcatgtgctcatgggcagctttccagccgagacttgactacaagcttaagggatcttgtggactttttgcctgcttctcttgctgcaattgtgagctacttctcagcagaaattacacgaggaatctggaaacctgtcccaatgaatggaattgaatggcctagtcccggtgcttctcttcattccattgaagctgaagtaaaggaaattcttgcctctgctggtgttcagattaacagctgctatccacgtggtgtgccaccaatgcttcctttacctatggctgcacttgtcagcttgacgattacatttaagctagataggagtttggagtacattcaaggggtcattggacaggcgctagagaactgtgcaggggggagttcctggccaagcatgcccattattggggcattgtggacacagaaagtgcgaagatggcatgacttcatcgtcctctcttgtatgcgttctccattcggcagagacaaagatgcagttgcgcagctcatccaaagttgcttctcgtcctttctgcagtcttcatccagtggttctgatataattgcaaaccgtggagttggggctttactaggggactcaatcacgaatcaaggtcttaggctcccaatggcacctggtttcatctacttgagaacatgtcgaactttccatgacacttactttgttagtgaagtgatccttaagcaagtgattgagtgggctcacaaacttgcaaacggatggtgtttcaatggtcctccgcagttgaaatcagggcggacaccactatcttgtgcagcatccatggtgcagcaggtcgcgttgcttggtggaggtctcctatgcatagcaggtggaccacttgtggtccaggtgttgtatgaggaaacactgccaacactgctgctatcagccagagatcagagtttgaaaggccctgggccagtttctagcacactccaaggttacgccatggccaacatgctcttctactgtggtagcctgctttggggagcggataggacttctcctgtcatgaaattgtccttcctctcgaggcggccacgggtggtgagaacccacatggatttcatagctggtgtgttggacggacacattcttctgggctgtgacccgggtacgtggaaagcgtatgtgtcgcaatttatgttcctggtggtgaaatttgttccgtcatggttgcgggacataaagctggacacgctaaagaagatagcagctggacttcggagctggcacgaacacgaccttgctctgtctcttcttgaacgaggaggaccacaagcaatctctgttgtagtcgagacctttctgtaatccttccgtttggacattttgcccccacctgacatagcagccgccgttaagggtttgtagttggtgatctgaggtctagctgaagtaatccggatgacccttttgatccagaattacacttgtgctacccgggtaactgatgtttatctcatgtatggcgagctcatcggggttttcgtgaatccaatacggaagaacatgcaacctactagggtgtacttcagccctaacatgtataacatgtgggaagttcatgcaacctactagagtgaactttctgtatattttgttgcaatgcatcgtgtttcctatctgcggtaaaaggagagaaaataattcccgcgtttttgtccgtcaacttgttaaccgcactttgctcttctgggttcgcatctcactcttatcgtccacacatttgcaacccaaatctagaatgataccag

SEQ ID NO: 67523 - DNA, 5720 bp, Zea Mays
ggcgggaacatcgataatatgccgccgttttccttccccgaaccctccaccttcgccggcccgtcagccacgaccgccaccattcaatccttccacttccatccctactccgtctcctctaccgtccacccattccggcggagctccccgccagaatggaggcggcgctgaagggctatttcgggtactcaacgttccggccgtaccagagggagatcatacagaaggtcctggatgggcgggattgcctcgtcgtcatggccaccggaagcggcaagtccatctgctatcagattcccccactggttacgaagaaaacagctgtcgttgtaagccctcttctgtccctgatgcaagaccaggttatgagtttaaaacaaaaaggtgtgaaatctgagtaccttggcagcacccaaacgaatagctccgtcagtaatgaggcagaaaaaggcacgtttgatgtgctttacatgacaccggagaaagccatttcacttccttcaagattttggagtaacttgcaggcttctggaatctgcttgttagctgttgacgaagctcattgcatatcagaatggggccatgatttcaggacagagtacaagcagctgcattcattgcgcaaccttcttgtgggtgttccctttgttgctttaactgctacagccacagaaagggtacgccaagatatttctacttccttggttctttgcagtcctcacgtggtggttggttcatttgatcgtcataaccttttctatggtgtgaaaacatgcaaccgatctatgtcctttataagtgaacttgtgaaagatgtttcaaagaggagtgatgtgggtgagtcaacaataatatattgtacgaccatccgggacacagaacaggttcatgaggctttagttacttctggaatcaagactggaatctatcatggtcaaatgggcagcagagctagagaggaatcccatagatccttcattagggatgaagttcttgtaatggtggcaactatagcttttgggatgggtattgataagcctgatgttagatgtgtaatacactatggatgtccaaagagcctagagtcttactaccaggaaagtgggcgttgtggaagagatggactgccttcaatctgctggctatattaccaaagaagtgatattacaaaagctgatttctattgttctgaggcaaaaaatgaaacccagaggaaagcaatcatggattccttcatggcagcacaaaaatattgcttgcttgctacatgccgtaggaggttcttattgcaatattttggtgaagaatggaacattgactgtggtaattgtgataattgcacagcagtgaaaaatgagagggatttgtcaaaagaagtctttttgttgctgtcctgcatcaaatcttgtggaggacgctggggcctcaatttacctattgatgttctccgtggctcacgagccaagaagattgttgacaacaattatgataaactacaaatgcatgggcgtggtaaagattattcgtcaaactggtggaaagcacttggtggtcttcttatagcacatgattatttgaaggagactgttcgtgatacatttagatttgtcagaaatgcttaaggacaaccgcccctaacccgcgtctatatattcagtgtcagtccaaaaggggtcaagtttctctctactgctgataaaatagatggagcaccactggtatttcagctgactgcagagatgattgaactagaggagcacggtagttcacatcataaagaaggtggtttgaatcttgtgccaacattagaatctgaaaaattttctgaggatgaatcaaaactctatcaaaggctcctgaatgttaggatgaagattgctcaagatattggcactgctccgtatgctgtatgtggcgatcagacaataagaaactttgcaaagatgagaccttctactggagctagacttgctaatatcgatggtgtcaaccagcattttatttcacgtttcagtaacattttcatccaaaatattgcggaattgtcgaaggagttaaacctcccgttggataattcaccatttccaccaccaccaccaacaaatccagctgcagaaaatattgctggtataccaaaacctgtacaaaacaatcttcctgggatcttgggtgatgcaaagctgactgcatgggaattgtggcataagcaggagtactcattcctgaaaattgcttatttccgcagagcagtgccaataaaagagcaaacagttattgcgtacattcttgatgctgctcgagaaggatgtgagatggactggagtaggttttgcagggaagtagggctgacacctgatatagccaccgcaattcgtcttgcaatctcaaaggttggatcacgtgagaaaatgaagccaatcaaagaggagctcccagagaatgtaacttatgacatgatcaagacattcctgactattgaggggtgtggattgtcagagcaagtctttggtaacggtaccgctgacggtgtctctagtagaatagcagagtcaccaatatcttcctgccatgcaagtgaagcaggcggaaatggtgtcccagcagcggcagaggccagtgatgcaaacccttcagcaaagagaggtcaaactgtttgtgctgaggagccagcaacaaaactgcaaaggacatacgagcatggagctgagttaactggcacggcgactgctactgtagattctgtgctagatctggttgcgagctgcaatggggtatcgctggaggatgttgccaagcacttcaagggatccaagagagaatcggtcctggagatattggagggccttgaatctgaattcacaatttacaagaaaaacgggaactacatggtcctgtgacaaacttgcccgcgtagtctgggaaggggatatgcctcagctgtgtgtgtatatatatatatctatacgatggtgggtgacttactgactttggactatggtagcaaggttgttggctggtgtgcatgtgctcattttggggattgggcagaactagcagatgtacgaacgtgtgtgtttggagctgggatcctttctgtcatctcgcatatgagtatcttggactaattgaccccgcgtattttcgttgggttttgatgcgttcaccctactcgttcaacagcttaagatcaggtttgactcctattgcaattttcctacgtgtccatttggagcaaattatcaaaggttttagaaccacacagaattcctatagaatgccttaacaattcgtaagaatttcggaggaaacattccatggtaaaaacttccgccacagatatcaaccaccactcttaccatacattttctttgctccgatgatattttatgattattacggtctagcgaaatcacgtgatgccttgcaagtgggaaacacgagaaaccgtactcggccattggagagcaggtgaaccagttgtcttaacaaaaagggacacgtactcggctcgggcacgcccgcacggccgcaccgcaccaccaagcgaacccattggctgtctctctcacggctcacttcactgttcactcggcggcaccgcactgcgccagtgccccgtcgccgatcaaagcaaccgcctccaacgcggcaacggcaacggcaacggcaagcgccgtcagtcactcccgtagtagccgccccgcagtgagtgtgtgagcgagtgagatgatcagcggaggggccgcggccgccgggaacccgaggagtaggaggacgcgatgaaggcgcagccgctgctactgccggcgctcaagaggcggagaggccctcgcgtggcggtgctggcgctcgtcctctgctccctgctcgtgcccttggccttcctcttcgaccgcgccccctccggatacgtgacgacggaggagcggcaccgacaggaggtcgttctgcctttgttggatcacgtggcggagaagagacgtccgagtggtagtggcgctgacacgcgacaggatgcgctggagaagaaggtccccggtagtagtgcaggagtcattcatcaacaaacaccggataagaacatctccaaagtcattcgtcaacaaacaccggagaagaccatctccaaaggcagtgcaggtgtcgttcatcagtataagcaaattggtagccactccacaagtgatggtgctaaaccaaaagtttccccagcaccaaaagttgaaccatcagatgctgtttcagattcaactaaagtcgcaagagatactagccaagaaggtgaaaaggctgatgaagtggaaaagtcaaagtcttgtcaacttgaatttgggagttattgtctctggtccattgagcacaaagaagtaatgaaagattatacagtgaaaaggctaaaagatcaactcttcgtagcacgctcatactatccaagcattgcaaaacttcaaggacaggaagctctgactcaggaaatgaagcaaaacatacaagaccatgagaagattcttagtgtatcaacagttgatgctgatctaccatcctctatcaacagaaggatgaagcagatggagcaaacaatagtgagagccaaatcttgcacagtagattgtagaagtgttgacaggaagcttcgccagattctttatatgactgaggatgaagctcattttcatatgcagcagagtgcattcctctacaatctcggtgcccagacattgccgaaaagtcatcattgcctttctatgaggttcagtagtccagaatacaggcacttcgttatactatcaaggaacgttcttgcggcttctgtagcaatcaactcaactgtgagcagttgtaaggagccaggctactttgcttttcatatcctaactgacgctcagaacttctatgccatgaaacactgccactcacatttcgttattccagaaatattcaagtatctaaacaaggtggtcgtgttggatgacgatgtagttgttcaacgtgatctgtctttcttgtggaatattgatatgggagacaaggtaaatggcgctgtcgaactttgtggtctgaaactgggtgagatgaaaaatgtcttgggtaaaacagcatatgatccaaagtcgtgtgcgtggatgtcgggggtgaatttgattaatctggataaatggagggagcataatgtcacagagaactatctgcggctcatgaaaaagttcgaagtcaaggatgagctgtccctgcgagcagcagcatttcctctaagcttgctatccttccaacatctaatataccccctagatgaaaaattgacgctggctggacttggatatgattacggaatcgatgaagaggttgcgcggagatctgcatcattgcactacaatggcaacatgaaaccttggcttgaattaggtataccggagtacaagaagtactggaagaggtttcttgtccgaggagatcgatttatggacgagtgcaacgtaaatccgtgacgtagagttggacccgaaacgagaacgattgcgtgaatctgtgacgcagagttggatctgaaatcagaacaactggaatagacatcagctagcctcactgaagtttgtgtcggcaaattgtgaacgagaatgaattctggtggtggagctaggatttttttgagtggagattccaaacatgaaagtagtaaacactaatatatatacggtagtataaatttgagtaaatgatgg

SEQ ID NO: 67524 - DNA, 2592 bp, Zea Mays
cacagctcttctgcgtgttcaagaaaaaatgttcactgtctataaaatttggaagtgggattttagacgttttatctatggttcatgaggctttagttacttctggaatcaagactggaatctatcatggtcaaatgggcagcagagctagagaggaatcccatagatccttcattagggatgaagttcttgtaatggtggcaactatagcttttgggatgggtattgataagcctgatgttagatgtgtaatacactatggatgtccaaagagcctagagtcttactaccaggaaagtgggcgttgtggaagagatggactgccttcaatctgctggctatattaccaaagaagtgatattacaaaagctgatttctattgttctgaggcaaaaaatgaaacccagaggaaagcaatcatggattccttcatggcagcacaaaaatattgcttgcttgctacatgccgtaggaggttcttattgcaatattttggtgaagaatggaacattgactgtggtaattgtgataattgcacagcagtgaaaaatgagagggatttgtcaaaagaagtctttttgttgctgtcctgcatcaaatcttgtggaggacgctggggcctcaatttacctattgatgttctccgtggctcacgagccaagaagattgttgacaacaattatgataaactacaaatgcatgggcgtggtaaagattattcgtcaaactggtggaaagcacttggtggtcttcttatagcacatgattatttgaaggagactgttcgtgatacatttagatttgtcagtgtcagtccaaaaggggtcaagtttctctctactgctgataaaatagatggagcaccactggtatttcagctgactgcagagatgattgaactagaggagcacggtagttcacatcataaagaaggtggtttgaatcttgtgccaacattagaatctgaaaaattttctgaggatgaatcaaaactctatcaaaggctcctgaatgttaggatgaagattgctcaagatattggcactgctccgtatgctgtatgtggcgatcagacaataagaaactttgcaaagatgagaccttctactggagctagacttgctaatatcgatggtgtcaaccagcattttatttcacgtttcagtaacattttcatccaaaatattgcggaattgtcgaaggagttaaacctcccgttggataattcaccatttccaccaccaccaccaacaaatccagctgcagaaaatattgctggtataccaaaacctgtacaaaacaatcttcctgggatcttgggtgatgcaaagctgactgcatgggaattgtggcataagcaggagtactcattcctgaaaattgcttatttccgcagagcagtgccaataaaagagcaaacagttattgcgtacattcttgatgctgctcgagaaggatgtgagatggactggagtaggttttgcagggaagtagggctgacacctgatatagccaccgcaattcgtcttgcaatctcaaaggttggatcacgtgagaaaatgaagccaatcaaagaggagctcccagagaatgtaacttatgacatgatcaagacattcctgactattgaggggtgtggattgtcagagcaagtctttggtaacggtaccgctgacggtgtctctagtagaatagcagagtcaccaatatcttcctgccatgcaagtgaagcaggcggaaatggtgtcccagcagcggcagaggccagtgatgcaaacccttcagcaaagagaggtcaaactgtttgtgctgaggagccagcaacaaaactgcaaaggacatacgagcatggagctgagttaactggcacggcgactgctactgtagattctgtgctagatctggttgcgagctgcaatggggtatcgctggaggatgttgccaagcacttcaagggatccaagagagaatcggtcctggagatattggagggccttgaatctgaattcacaatttacaagaaaaacgggaactacatggtcctgtgacaaacttgcccgcgtagtctgggaaggggatatgcctcagctgtgtgtgtatatatatatatctatacgatggtgggtgacttactgactttggactatggtagcaaggttgttggctggtgtgcatgtgctcattttggggattgggcagaactagcagatgtacgaacgtgtgtgtttggagctgggatcctttctgtcatctcgcatatgagtatcttggactaattgaccccgcgtattttcgttgggttttgatgcgttcaccctactcgttcaacagcttaagatcaggtttgactcctattgcaattttcctacgtgtccatttggagcaaattatcaaaggttttagaaccacacagaattcctatagaatgccttaacaattcgtaagaatttcggaggaaacattccatggtaaaaacttccgccacagatatcaaccaccactcttaccatacattttctttgctccgatgatattttatgattattacggtctagcgaaatcacgtgatgccttgcaagtgggaaacacgag

SEQ ID NO: 67525 - DNA, 1911 bp, Zea Mays
ccgaggagtaggaggacgcgatgaaggcgcagccgctgctactgccggcgctcaagaggcggagaggccctcgcgtggcggtgctggcgctcgtcctctgctccctgctcgtgcccttggccttcctcttcgaccgcgccccctccggatgcgctggagaagaaggtccccggtagtagtgcaggagtcattcatcaacaaacaccggataagaacatctccaaagtcattcgtcaacaaacaccggagaagaccatctccaaaggcagtgcaggtgtcgttcatcagtataagcaaattggtagccactccacaagtgatggtgctaaaccaaaagtttccccagcaccaaaagttgaaccatcagatgctgtttcagattcaactaaagtcgcaagagatactagccaagaaggtgaaaaggctgatgaagtggaaaagtcaaagtcttgtcaacttgaatttgggagttattgtctctggtccattgagcacaaagaagtaatgaaagattatacagtgaaaaggctaaaagatcaactcttcgtagcacgctcatactatccaagcattgcaaaacttcaaggacaggaagctctgactcaggaaatgaagcaaaacatacaagaccatgagaagattcttagtgtatcaacagttgatgctgatctaccatcctctatcaacagaaggatgaagcagatggagcaaacaatagtgagagccaaatcttgcacagtagattgtagaagtgttgacaggaagcttcgccagattctttatatgactgaggatgaagctcattttcatatgcagcagagtgcattcctctacaatctcggtgcccagacattgccgaaaagtcatcattgcctttctatgaggttgacactagaatatttcaaatcatcttcattggattctgatgattctcctggcaggttcagtagtccagaatacaggcacttcgttatactatcaaggaacgttcttgcggcttctgtagcaatcaactcaactgtgagcagttgtaaggagccaggctactttgcttttcatatcctaactgacgctcagaacttctatgccatgaaacactgccactcacatttcgttattccagaaatattcaagtatctaaacaaggtggtcgtgttggatgacgatgtagttgttcaacgtgatctgtctttcttgtggaatattgatatgggagacaaggtaaatggcgctgtcgaactttgtggtctgaaactgggtgagatgaaaaatgtcttgggtaaaacagcatatgatccaaagtcgtgtgcgtggatgtcgggggtgaatttgattaatctggataaatggagggagcataatgtcacagagaactatctgcggctcatgaaaaagttcgaagtcaaggatgagctgtccctgcgagcagcagcatttcctctaagcttgctatccttccaacatctaatataccccctagatgaaaaattgacgctggctggacttggatatgattacggaatcgatgaagaggttgcgcggagatctgcatcattgcactacaatggcaacatgaaaccttggcttgaattaggtataccggagtacaagaagtactggaagaggtttcttgtccgaggagatcgatttatggacgagtgcaacgtaaatccgtgacgtagagttggacccgaaacgagaacgattgcgtgaatctgtgacgcagagttggatctgaaatcagaacaactggaatagacatcagctagcctcactgaagtttgtgtcggcaaattgtgaacgagaatgaattctggtggtggagctaggatttttttgagtggagattccaaacatgaaagtagtaaacactaatatatatacggtagtataaatttgagtaaatgatgg

SEQ ID NO: 67526 - DNA, 1946 bp, Zea Mays
taggaggacgcgatgaaggcgcagccgctgctactgccggcgctcaagaggcggagaggccctcgcgtggcggtgctggcgctcgtcctctgctccctgctcgtgcccttggccttcctcttcgaccgcgccccctccggatacgtgacgacggaggagcggcaccgacaggaggtcgttctgcctttgttggatcacgtggcggagaagagacgtccgagtggtagtggcgctgacacgcgacaggatgcgctggagaagaaggtccccggtagtagtgcaggagtcattcatcaacaaacaccggataagaacatctccaaagtcattcgtcaacaaacaccggagaagaccatctccaaaggcagtgcaggtgtcgttcatcagtataagcaaattggtagccactccacaagtgatggtgctaaaccaaaagtttccccagcaccaaaagttgaaccatcagatgctgtttcagattcaactaaagtcgcaagagatactagccaagaaggtgaaaaggctgatgaagtggaaaagtcaaagtcttgtcaacttgaatttgggagttattgtctctggtccattgagcacaaagaagtaatgaaagattatacagtgaaaaggctaaaagatcaactcttcgtagcacgctcatactatccaagcattgcaaaacttcaaggacaggaagctctgactcaggaaatgaagcaaaacatacaagaccatgagaagattcttagtgtatcaacagttgatgctgatctaccatcctctatcaacagaaggatgaagcagatggagcaaacaatagtgagagccaaatcttgcacagtagattgtagaagtgttgacaggaagcttcgccagattctttatatgactgaggatgaagctcattttcatatgcagcagagtgcattcctctacaatctcggtgcccagacattgccgaaaagtcatcattgcctttctatgaggttcagtagtccagaatacaggcacttcgttatactatcaaggaacgttcttgcggcttctgtagcaatcaactcaactgtgagcagttgtaaggctactttgcttttcatatcctaactgacgctcagaacttctatgccatgaaacactgccactcacatttcgttattccagaaatattcaagtatctaaacaaggtggtcgtgttggatgacgatgtagttgttcaacgtgatctgtctttcttgtggaatattgatatgggagacaaggtaaatggcgctgtcgaactttgtggtctgaaactgggtgagatgaaaaatgtcttgggtaaaacagcatatgatccaaagtcgtgtgcgtggatgtcgggggtgaatttgattaatctggataaatggagggagcataatgtcacagagaactatctgcggctcatgaaaaagttcgaagtcaaggatgagctgtccctgcgagcagcagcatttcctctaagcttgctatccttccaacatctaatataccccctagatgaaaaattgacgctggctggacttggatatgattacggaatcgatgaagaggttgcgcggagatctgcatcattgcactacaatggcaacatgaaaccttggcttgaattaggtataccggagtacaagaagtactggaagaggtttcttgtccgaggagatcgatttatggacgagtgcaacgtaaatccgtgacgtagagttggacccgaaacgagaacgattgcgtgaatctgtgacgcagagttggatctgaaatcagaacaactggaatagacatcagctagcctcactgaagtttgtgtcggcaaattgtgaacgagaatgaattctggtggtggagctaggatttttttgagtggagattccaaacatgaaagtagtaaacactaatatatatacggtagtataaatttgagtaaatgatgg

SEQ ID NO: 67527 - DNA, 1572 bp, Zea Mays
cgatcacatgccaaaacaattaataagagattaggtttcaggaagctctccaatatgagattcctcctcctcgccaacccagtcgaagaatcaacagtttgttctcttctctagcgctagctcatggatggatgatcagttgccgagtagtggtggtggtgcatgattgagacgcgccggccgtctgcctatatattcctttctttccttcgtctcccgcgtctcagtctacctccagcgctccatcaccatatgacaacaaaggattccaccttgatccttgaagtggacctccagtgcgagaaatgttacaagaagatccagaaagttctctgcaagctccagtccaaggagaagatcaacaagatcgactacgagaacaccaagaacaaggtcaccgtcgtcggcgccttcgaccccaagaagctttccaagacgctgagatgcaaggcctgtgatgtcatcagggacatcaccatcgtcaagcctcccgaggtgaagaaaccggccgcggaggagaagaagaagccggaggaagaggagaagaagaagaagccggaggaagaggagaagaagaagcccgcagaggagaagaacaagggcggcgaggagaaggccgccaagccagcggcggcggcgccaccgtcgacgacggtgaacctgcagttcaccaacatatgcgggatctgctacccgtggccgtgcagcgacccggcgcaccggggcggtttccaccacccgcagcagctgccgcagccgtggctgccgtgcggagggatggctccagctccagctcccgcgcctgcaccgccggttcacacccacccgcaaccgccctgcggcggtgcccctcagaaatgggcgccgtgcggcggccctccgctgtgcggaggctgcgcgtggtgcctcggcggcggcatcggctgctggtcgccgccgccgcagcagccgatgtgctgccccgggccgtcgctgtgcagagggtgcaacgggtgcaagatcgtgcgcgagaccaagttcagctacgaggagtacccttccagtgcatgtgccatcatgtgatctttgctcctacttgtgttcttcgattgctcagtcctgaattctggtcaaacgagtagcggtctcaaagaaacattgtttttcctgcaaagaaaaaaaaagctccttttctgctgtggcaattttgattcttttcaaatctccgtgactccagatatgtttaattatgtattattgtccaccaacaatacatgtatctgttcacgactcgagtatatgaaacagtagccagtacaactaacaaagtagcggtatacaacaattttgttttaaaaaaaaaacaggaccacgcagtcacactctaaaattagggcattggcagaatcacccccaaaccactaaaatgacttaaattacaagaacgagggagtttttttttctttattccgttagttttcgcacaaataaggacatcgtttttatataataaaaaatatggacgacttgcatgtgtcgtttcatgaataggtttggtatgtgggccgagaattgatctgctctttgagggag

SEQ ID NO: 67528 - DNA, 398 bp, Zea Mays
cgtcaatcatgctccataatcccggagcaagaagcatagccaatcttaacattggtgtttgagatgtggacagtggatgtcgtcgctggggctcggcggattgctgtttgtgaaatttatactcatctcttgtatgtcactgaataacatatacaagatattttttgtgtgtatgatatatgggtacataagagattagtctaattgtctcttgatattgctgctactccgtcgactgaagtactgctggtggtggctgctgcatcgcactagccagcagcagcagcatcatcgccaaaagcatcgccttttccacgcgttgcgttgccagatgccagacgccagtgccagccacggagaaaagcaccagagcaaattatttccatatcttccacttt

SEQ ID NO: 67529 - DNA, 2404 bp, Zea Mays
ctcagagccgttttatttcaactagctctggagtctggaccaaacactatcgccgtataatgagatttggcaggatgaatcaacgtgccgcatgcttgtgctactatttgccatctgaaccatgtcgtcgcggcgacgccagtcatcctcgtggcttcacagtccatcgacgggacaaagctgtgaatccatcaacggagtccccggattccttactacattcgttcgttccacgccgccgtagaaagcaacccgaagtccccaacgccaccggcaccggcacggcgaactcgggcacgcaccgcagccagccggccggttcggcaggcaggcaggcagagaggattgcattgcactgcttccatctcccctgcccgccccgccgcggcagatcccgaggcggctcgcacttccaggtcaactcaaagtacgcccgcgcagcaggaggcggccaaccagtcgccgtcgcccccggcccccaccccgcctgccgcagcaagcggcgtccgctaccgcacgccctcgtccccggacctcctcctccccgccgacgccgccaagatgcgccgctactccgcgctgcccaacggcggccgccaggagacgctggccgaccgcgcgcaccgctaccggggcgtcgtgctcgtcatcctcgccccgctcgcgctcgtctctctcgtcctcctcctcatgccacgctcacccgctggcaccatgggcggcgcccggaggtccgggccggccggggcagacaggtacgccgtcatcttcgacgccggtagctccggcagccgcgtccacgtcttccgcttcgacgccaacctggatctcgtccgcattggcagcgagatcgagctcttcgtccagataaaaccggggcttagccactatgccaacgacccccgggaggctgccgagtcgctcgtctctctccttgacgatgccaagcgagtggtgcccgccgaattgcgcgaccaaacgcctgtcagggtcggggccaccgcagggctgagaaatttgggtgcacaaaaatccgaggcaatactgcaagcggttagggaccttcttcgcgaaaagagttcctttaaaaaccaaccggattgggttacagttcttgatggaacacaggaaggtgcatacgagtgggttactatcaattatctgttggggaacttgggaaagacttatgcagacacagttggagtagtcgatcttggtggtggatctgtccaaatggcatatgctattgcggagaaggatgcagaaaaggctcctaagccatccgatggggaagatgcatatgtgaagaaactgtttctcaaaggaaccacatattatctttatgttcatagttatttgcattatgggttgctggcagctagagcagaggtcttaaaagctggcaatggcaatggttacagcaactgtatgttagagggatttcaagggcaatacaaatatggcgacaattcatttgaagcatctgcttcaccttctggtgctagttattcaaaatgcaaggatgatgcagtgaaagctcttaaggttgatgaagcatgcacccacatgaagtgttcttttggtggcatttggaatggtggtggtggtgctggacagaataatctctttgtagcatcctttttcttcgatagggctgctgaggctggatttgtgaacgccaatgcacctgttgctaaggttaaaccctcagacttcagacaagctgctgagcgcgcttgctctttgagtgtgaagaacgccgaggctacctttcctggtgtccaaaaggataacattccatatatctgcatggaccttgtttatcagtacacattacttgtgcacggattcggcgttgatccagaccatgagatgaccttggtaaagaaggtcccctacagtggtgcatatgtcgaagccgcatggcctcttggcagtgccatcgaggtggcatcttcatcatagcaaggagacacagtttagcaaggtaacatcggacggcattgttgtcatgaagttttagcgttgggagtcccccccccccctgaccgcttactgaattcacaccattttgtcactcaatccatccatcctccccatacggtaacgggtagctttacacaccaagggaagcctcggctgtacttggttctagcggccattgtaagccctattactattattgttattaatatctgtatactactaatgcaagtaagatgagagcctcaggcattctttttgacctctgtatactgggatgtgcatgatataaagtgccatcattcgctcactcaaatgcgtacatgtttggtcattgtgtttactggcagccctttgctgctggaaaaagagtacatatttattaaccgtgtgggcctgagctgcttatctactgctggct

SEQ ID NO: 67530 - DNA, 2446 bp, Zea Mays
gagccgttttatttcaactagctctggagtctggaccaaacactatcgccgtataatgagatttggcaggatgaatcaacgtgccgcatgcttgtgctactatttgccatctgaaccatgtcgtcgcggcgacgccagtcatcctcgtggcttcacagtccatcgacgggacaaagctgtgaatccatcaacggagtccccggattccttactacattcgttcgttccacgccgccgtagaaagcaacccgaagtccccaacgccaccggcaccggcacggcgaactcgggcacgcaccgcagccagccggccggttcggcaggcaggcaggcagagaggattgcattgcactgcttccatctcccctgcccgccccgccgcggcagatcccgaggcggctcgcacttccaggtcaactcaaagtacgcccgcgcagcaggaggcggccaaccagtcgccgtcgcccccggcccccaccccgcctgccgcagcaagcggcgtccgctaccgcacgccctcgtccccggacctcctcctccccgccgacgccgccaagatgcgccgctactccgcgctgcccaacggcggccgccaggagacgctggccgaccgcgcgcaccgctaccggggcgtcgtgctcgtcatcctcgccccgctcgcgctcgtctctctcgtcctcctcctcatgccacgctcacccgctggcaccatgggcggcgcccggaggtccgggccggccggggcagacaggtacgccgtcatcttcgacgccggtagctccggcagccgcgtccacgtcttccgcttcgacgccaacctggatctcgtccgcattggcagcgagatcgagctcttcgtccagataaaaccggggcttagccactatgccaacgacccccgggaggctgccgagtcgctcgtctctctccttgacgatgccaagcgagtggtgcccgccgaattgcgcgaccaaacgcctgtcagggtcggggccaccgcagggctgagaaatttgggtgcacaaaaatccgaggcaatactgcaagcggttagggaccttcttcgcgaaaagagttcctttaaaaaccaaccggattgggttacagttcttgatggaacacaggaaggtgcatacgagtggaggttttaggaattattcgtgggtgatgtgagagtgttcaggaatttctcctgaatcgtgctcctgtattcacacttaagtccagcaacaagtaacaattggagtagtcgatcttggtggtggatctgtccaaatggcatatgctattgcggagaaggatgcagaaaaggctcctaagccatccgatggggaagatgcatatgtgaagaaactgtttctcaaaggaaccacatattatctttatgttcatagttatttgcattatgggttgctggcagctagagcagaggtcttaaaagctggcaatggcaatggttacagcaactgtatgttagagggatttcaagggcaatacaaatatggcgacaattcatttgaagcatctgcttcaccttctggtgctagttattcaaaatgcaaggatgatgcagtgaaagctcttaaggttgatgaagcatgcacccacatgaagtgttcttttggtggcatttggaatggtggtggtggtgctggacagaataatctctttgtagcatcctttttcttcgatagggctgctgaggctggatttgtgaacgccaatgcacctgttgctaaggttaaaccctcagacttcagacaagctgctgagcgcgcttgctctttgagtgtgaagaacgccgaggctacctttcctggtgtccaaaaggataacattccatatatctgcatggaccttgtttatcagtacacattacttgtgcacggattcggcgttgatccagaccatgagatgaccttggtaaagaaggtcccctacagtggtgcatatgtcgaagccgcatggcctcttggcagtgccatcgaggtggcatcttcatcatagcaaggagacacagtttagcaaggtaacatcggacggcattgttgtcatgaagttttagcgttgggagtcccccccccccctgaccgcttactgaattcacaccattttgtcactcaatccatccatcctccccatacggtaacgggtagctttacacaccaagggaagcctcggctgtacttggttctagcggccattgtaagccctattactattattgttattaatatctgtatactactaatgcaagtaagatgagagcctcaggcattctttttgacctctgtatactgggatgtgcatgatataaagtgccatcattcgctcactcaaatgcgtacatgtttggtcattgtgtttactggcagccctttgctgctggaaaaagagtacatatttattaaccgtgtgggcctgagctgcttatctactgctggct

SEQ ID NO: 67531 - DNA, 2457 bp, Zea Mays
aaacactatcgccgtataatgagatttggcaggatgaatcaacgtgccgcatgcttgtgctactatttgccatctgaaccatgtcgtcgcggcgacgccagtcatcctcgtggcttcacagtccatcgacgggacaaagctgtgaatccatcaacggagtccccggattccttactacattcgttcgttccacgccgccgtagaaagcaacccgaagtccccaacgccaccggcaccggcacggcgaactcgggcacgcaccgcagccagccggccggttcggcaggcaggcaggcagagaggattgcattgcactgcttccatctcccctgcccgccccgccgcggcagatcccgaggcggctcgcacttccaggtcaactcaaagtacgcccgcgcccgcctagacgttgtcttccctccctgcactccccgccacgacgccgcagcagatccaccatcgacgcgcgcgccgcgcgccccgacgcggaacgctggatcccgcgcagcaggaggcggccaaccagtcgccgtcgcccccggcccccaccccgcctgccgcagcaagcggcgtccgctaccgcacgccctcgtccccggacctcctcctccccgccgacgccgccaagatgcgccgctactccgcgctgcccaacggcggccgccaggagacgctggccgaccgcgcgcaccgctaccggggcgtcgtgctcgtcatcctcgccccgctcgcgctcgtctctctcgtcctcctcctcatgccacgctcacccgctggcaccatgggcggcgcccggaggtccgggccggccggggcagacaggtacgccgtcatcttcgacgccggtagctccggcagccgcgtccacgtcttccgcttcgacgccaacctggatctcgtccgcattggcagcgagatcgagctcttcgtccagataaaaccggggcttagccactatgccaacgacccccgggaggctgccgagtcgctcgtctctctccttgacgatgccaagcgagtggtgcccgccgaattgcgcgaccaaacgcctgtcagggtcggggccaccgcagggctgagaaatttgggtgcacaaaaatccgaggcaatactgcaagcggttagggaccttcttcgcgaaaagagttcctttaaaaaccaaccggattgggttacagttcttgatggaacacaggaaggttactatcaattatctgttggggaacttgggaaagacttatgcagacacagttggagtagtcgatcttggtggtggatctgtccaaatggcatatgctattgcggagaaggatgcagaaaaggctcctaagccatccgatggggaagatgcatatgtgaagaaactgtttctcaaaggaaccacatattatctttatgttcatagttatttgcattatgggttgctggcagctagagcagaggtcttaaaagctggcaatggcaatggttacagcaactgtatgttagagggatttcaagggcaatacaaatatggcgacaattcatttgaagcatctgcttcaccttctggtgctagttattcaaaatgcaaggatgatgcagtgaaagctcttaaggttgatgaagcatgcacccacatgaagtgttcttttggtggcatttggaatggtggtggtggtgctggacagaataatctctttgtagcatcctttttcttcgatagggctgctgaggctggatttgtgaacgccaatgcacctgttgctaaggttaaaccctcagacttcagacaagctgctgagcgcgcttgctctttgagtgtgaagaacgccgaggctacctttcctggtgtccaaaaggataacattccatatatctgcatggaccttgtttatcagtacacattacttgtgcacggattcggcgttgatccagaccatgagatgaccttggtaaagaaggtcccctacagtggtgcatatgtcgaagccgcatggcctcttggcagtgccatcgaggtggcatcttcatcatagcaaggagacacagtttagcaaggtaacatcggacggcattgttgtcatgaagttttagcgttgggagtcccccccccccctgaccgcttactgaattcacaccattttgtcactcaatccatccatcctccccatacggtaacgggtagctttacacaccaagggaagcctcggctgtacttggttctagcggccattgtaagccctattactattattgttattaatatctgtatactactaatgcaagtaagatgagagcctcaggcattctttttgacctctgtatactgggatgtgcatgatataaagtgccatcattcgctcactcaaatgcgtacatgtttggtcattgtgtttactggcagccctttgctgctggaaaaagagtacatatttattaaccgtgtgggcctgagctgcttatctactgctggct

SEQ ID NO: 67532 - DNA, 2504 bp, Zea Mays
gtataatgagatttggcaggatgaatcaacgtgccgcatgcttgtgctactatttgccatctgaaccatgtcgtcgcggcgacgccagtcatcctcgtggcttcacagtccatcgacgggacaaagctgtgaatccatcaacggagtccccggattccttactacattcgttcgttccacgccgccgtagaaagcaacccgaagtccccaacgccaccggcaccggcacggcgaactcgggcacgcaccgcagccagccggccggttcggcaggcaggcaggcagagaggattgcattgcactgcttccatctcccctgcccgccccgccgcggcagatcccgaggcggctcgcacttccaggtcaactcaaagtacgcccgcgcagcaggaggcggccaaccagtcgccgtcgcccccggcccccaccccgcctgccgcagcaagcggcgtccgctaccgcacgccctcgtccccggacctcctcctccccgccgacgccgccaagatgcgccgctactccgcgctgcccaacggcggccgccaggagacgctggccgaccgcgcgcaccgctaccggggcgtcgtgctcgtcatcctcgccccgctcgcgctcgtctctctcgtcctcctcctcatgccacgctcacccgctggcaccatgggcggcgcccggaggtccgggccggccggggcagacaggtacgccgtcatcttcgacgccggtagctccggcagccgcgtccacgtcttccgcttcgacgccaacctggatctcgtccgcattggcagcgagatcgagctcttcgtccagataaaaccggggcttagccactatgccaacgacccccgggaggctgccgagtcgctcgtctctctccttgacgatgccaagcgagtggtgcccgccgaattgcgcgaccaaacgcctgtcagggtcggggccaccgcagggctgagaaatttgggtgcacaaaaatccgaggcaatactgcaagcggttagggaccttcttcgcgaaaagagttcctttaaaaaccaaccggattgggttacagttcttgatggaacacaggaaggtgcatacgagtgggtatgatgctgttattatccatttgtaaagaaggttttaggaattattcgtgggtgatgtgagagtgttcaggaatttctcctgaatcgtgctcctgtattcacacttaagtccagcaacaagtaacaagtattacctttccctctacttttaggttactatcaattatctgttggggaacttgggaaagacttatgcagacacagttggagtagtcgatcttggtggtggatctgtccaaatggcatatgctattgcggagaaggatgcagaaaaggctcctaagccatccgatggggaagatgcatatgtgaagaaactgtttctcaaaggaaccacatattatctttatgttcatagttatttgcattatgggttgctggcagctagagcagaggtcttaaaagctggcaatggcaatggttacagcaactgtatgttagagggatttcaagggcaatacaaatatggcgacaattcatttgaagcatctgcttcaccttctggtgctagttattcaaaatgcaaggatgatgcagtgaaagctcttaaggttgatgaagcatgcacccacatgaagtgttcttttggtggcatttggaatggtggtggtggtgctggacagaataatctctttgtagcatcctttttcttcgatagggctgctgaggctggatttgtgaacgccaatgcacctgttgctaaggttaaaccctcagacttcagacaagctgctgagcgcgcttgctctttgagtgtgaagaacgccgaggctacctttcctggtgtccaaaaggataacattccatatatctgcatggaccttgtttatcagtacacattacttgtgcacggattcggcgttgatccagaccatgagatgaccttggtaaagaaggtcccctacagtggtgcatatgtcgaagccgcatggcctcttggcagtgccatcgaggtggcatcttcatcatagcaaggagacacagtttagcaaggtaacatcggacggcattgttgtcatgaagttttagcgttgggagtcccccccccccctgaccgcttactgaattcacaccattttgtcactcaatccatccatcctccccatacggtaacgggtagctttacacaccaagggaagcctcggctgtacttggttctagcggccattgtaagccctattactattattgttattaatatctgtatactactaatgcaagtaagatgagagcctcaggcattctttttgacctctgtatactgggatgtgcatgatataaagtgccatcattcgctcactcaaatgcgtacatgtttggtcattgtgtttactggcagccctttgctgctggaaaaagagtacatatttattaaccgtgtgggcctgagctgcttatctactgctggct

SEQ ID NO: 67533 - DNA, 2065 bp, Zea Mays
tactatttgccatctgaaccatgtcgtcgcggcgacgccagtcatcctcgtggcttcacagtccatcgacgggacaaagctgtgaatccatcaacggagtccccggattccttactacattcgttcgttccacgccgccgtagaaagcaacccgaagtccccaacgccaccggcaccggcacggcgaactcgggcacgcaccgcagccagccggccggttcggcaggcaggcaggcagagaggattgcattgcactgcttccatctcccctgcccgccccgccgcggcagatcccgaggcggctcgcacttccaggtcaactcaaagtacgcccgcgcagcaggaggcggccaaccagtcgccgtcgcccccggcccccaccccgcattggcagcgagatcgagctcttcgtccagataaaaccggggcttagccactatgccaacgacccccgggaggctgccgagtcgctcgtctctctccttgacgatgccaagcgagtggtgcccgccgaattgcgcgaccaaacgcctgtcagggtcggggccaccgcagggctgagaaatttgggtgcacaaaaatccgaggcaatactgcaagcgaggttttaggaattattcgtgggtgatgtgagagtgttcaggaatttctcctgaatcgtgctcctgtattcacacttaagtccagcaacaagtaacaagtattacctttccctctacttttaggttactatcaattatctgttggggaacttgggaaagacttatgcagacacagttggagtagtcgatcttggtggtggatctgtccaaatggcatatgctattgcggagaaggatgcagaaaaggctcctaagccatccgatggggaagatgcatatgtgaagaaactgtttctcaaaggaaccacatattatctttatgttcatagttatttgcattatgggttgctggcagctagagcagaggtcttaaaagctggcaatggcaatggttacagcaactgtatgttagagggatttcaagggcaatacaaatatggcgacaattcatttgaagcatctgcttcaccttctggtgctagttattcaaaatgcaaggatgatgcagtgaaagctcttaaggttgatgaagcatgcacccacatgaagtgttcttttggtggcatttggaatggtggtggtggtgctggacagaataatctctttgtagcatcctttttcttcgatagggctgctgaggctggatttgtgaacgccaatgcacctgttgctaaggttaaaccctcagacttcagacaagctgctgagcgcgcttgctctttgagtgtgaagaacgccgaggctacctttcctggtgtccaaaaggataacattccatatatctgcatggaccttgtttatcagtacacattacttgtgcacggattcggtattgacctgattgagatcgaacaaaacaaatcagaatagcataagcctgttctcacttttttttgcaaacattcttgtaggcgttgatccagaccatgagatgaccttggtaaagaaggtcccctacagtggtgcatatgtcgaagccgcatggcctcttggcagtgccatcgaggtggcatcttcatcatagcaaggagacacagtttagcaaggtaacatcggacggcattgttgtcatgaagttttagcgttgggagtcccccccccccctgaccgcttactgaattcacaccattttgtcactcaatccatccatcctccccatacggtaacgggtagctttacacaccaagggaagcctcggctgtacttggttctagcggccattgtaagccctattactattattgttattaatatctgtatactactaatgcaagtaagatgagagcctcaggcattctttttgacctctgtatactgggatgtgcatgatataaagtgccatcattcgctcactcaaatgcgtacatgtttggtcattgtgtttactggcagccctttgctgctggaaaaagagtacatatttattaaccgtgtgggcctgagctgcttatctactgctggct

SEQ ID NO: 67534 - DNA, 2365 bp, Zea Mays
catcctcgtggcttcacagtccatcgacgggacaaagctgtgaatccatcaacggagtccccggattccttactacattcgttcgttccacgccgccgtagaaagcaacccgaagtccccaacgccaccggcaccggcacggcgaactcgggcacgcaccgcagccagccggccggttcggcaggcaggcaggcagagaggattgcattgcactgcttccatctcccctgcccgccccgccgcggcagatcccgaggcggctcgcacttccaggtcaactcaaagtacgcccgcgcccgcctagacgttgtcttccctccctgcactccccgccacgacgccgcagcagatccaccatcgacgcgcgcgccgcgcgccccgacgcggaacgctggatcccgcgcagcaggaggcggccaaccagtcgccgtcgcccccggcccccaccccgcctgccgcagcaagcggcgtccgctaccgcacgccctcgtccccggacctcctcctccccgccgacgccgccaagatgcgccgctactccgcgctgcccaacggcggccgccaggagacgctggccgaccgcgcgcaccgctaccggggcgtcgtgctcgtcatcctcgccccgctcgcgctcgtctctctcgtcctcctcctcatgccacgctcacccgctggcaccatgggcggcgcccggaggtccgggccggccggggcagacaggtacgccgtcatcttcgacgccggtagctccggcagccgcgtccacgtcttccgcttcgacgccaacctggatctcgtccgcattggcagcgagatcgagctcttcgtccagataaaaccggggcttagccactatgccaacgacccccgggaggctgccgagtcgctcgtctctctccttgacgatgccaagcgagtggtgcccgccgaattgcgcgaccaaacgcctgtcagggtcggggccaccgcagggctgagaaatttgggtgcacaaaaatccgaggcaatactgcaagcggttagggaccttcttcgcgaaaagagttcctttaaaaaccaaccggattgggttacagttcttgatggaacacaggaaggtgcatacgagttactatcaattatctgttggggaacttgggaaagacttatgcagacacagttggagtagtcgatcttggtggtggatctgtccaaatggcatatgctattgcggagaaggatgcagaaaaggctcctaagccatccgatggggaagatgcatatgtgaagaaactgtttctcaaaggaaccacatattatctttatgttcatagttatttgcattatgggttgctggcagctagagcagaggtcttaaaagctggcaatggcaatggttacagcaactgtatgttagagggatttcaagggcaatacaaatatggcgacaattcatttgaagcatctgcttcaccttctggtgctagttattcaaaatgcaaggatgatgcagtgaaagctcttaaggttgatgaagcatgcacccacatgaagtgttcttttggtggcatttggaatggtggtggtggtgctggacagaataatctctttgtagcatcctttttcttcgatagggctgctgaggctggatttgtgaacgccaatgcacctgttgctaaggttaaaccctcagacttcagacaagctgctgagcgcgcttgctctttgagtgtgaagaacgccgaggctacctttcctggtgtccaaaaggataacattccatatatctgcatggaccttgtttatcagtacacattacttgtgcacggattcggcgttgatccagaccatgagatgaccttggtaaagaaggtcccctacagtggtgcatatgtcgaagccgcatggcctcttggcagtgccatcgaggtggcatcttcatcatagcaaggagacacagtttagcaaggtaacatcggacggcattgttgtcatgaagttttagcgttgggagtcccccccccccctgaccgcttactgaattcacaccattttgtcactcaatccatccatcctccccatacggtaacgggtagctttacacaccaagggaagcctcggctgtacttggttctagcggccattgtaagccctattactattattgttattaatatctgtatactactaatgcaagtaagatgagagcctcaggcattctttttgacctctgtatactgggatgtgcatgatataaagtgccatcattcgctcactcaaatgcgtacatgtttggtcattgtgtttactggcagccctttgctgctggaaaaagagtacatatttattaaccgtgtgggcctgagctgcttatctactgctggct

SEQ ID NO: 67535 - DNA, 2160 bp, Zea Mays
cgccgccgtagaaagcaacccgaagtccccaacgccaccggcaccggcacggcgaactcgggcacgcaccgcagccagccggccggttcggcaggcaggcaggcagagaggattgcattgcactgcttccatctcccctgcccgccccgccgcggcagatcccgaggcggctcgcacttccaggtcaactcaaagtacgcccgcgcagcaggaggcggccaaccagtcgccgtcgcccccggcccccaccccgcattggcagcgagatcgagctcttcgtccagataaaaccggggcttagccactatgccaacgacccccgggaggctgccgagtcgctcgtctctctccttgacgatgccaagcgagtggtgcccgccgaattgcgcgaccaaacgcctgtcagggtcggggccaccgcagggctgagaaatttgggtgcacaaaaatccgaggcaatactgcaagcggttagggaccttcttcgcgaaaagagttcctttaaaaaccaaccggattgggttacagttcttgatggaacacaggaaggtgcatacgagtgggtatgatgctgttattatccatttgtaaagagtgagcattctgtaaatctgcatgatatggtatcatataaacaataacgaatgtggattcatcgaatctattaagttttaatccatccaaatctattgcaataagccatcttgatatagtttttgttttgatatatctcctcaccaaacattaagattacccatatcactgcagaggttttaggaattattcgtgggtgatgtgagagtgttcaggaatttctcctgaatcgtgctcctgtattcacacttaagtccagcaacaagtaacaaacacagttggagtagtcgatcttggtggtggatctgtccaaatggcatatgctattgcggagaaggatgcagaaaaggctcctaagccatccgatggggaagatgcatatgtgaagaaactgtttctcaaaggaaccacatattatctttatgttcatagttatttgcattatgggttgctggcagctagagcagaggtcttaaaagctggcaatggcaatggttacagcaactgtatgttagagggatttcaagggcaatacaaatatggcgacaattcatttgaagcatctgcttcaccttctggtgctagttattcaaaatgcaaggatgatgcagtgaaagctcttaaggttgatgaagcatgcacccacatgaagtgttcttttggtggcatttggaatggtggtggtggtgctggacagaataatctctttgtagcatcctttttcttcgatagggctgctgaggctggatttgtgaacgccaatgcacctgttgctaaggttaaaccctcagacttcagacaagctgctgagcgcgcttgctctttgagtgtgaagaacgccgaggctacctttcctggtgtccaaaaggataacattccatatatctgcatggaccttgtttatcagtacacattacttgtgcacggattcggtattgacctgattgagatcgaacaaaacaaatcagaatagcataagcctgttctcacttttttttgcaaacattcttgtaggcgttgatccagaccatgagatgaccttggtaaagaaggtcccctacagtggtgcatatgtcgaagccgcatggcctcttggcagtgccatcgaggtggcatcttcatcatagcaaggagacacagtttagcaaggtaacatcggacggcattgttgtcatgaagttttagcgttgggagtcccccccccccctgaccgcttactgaattcacaccattttgtcactcaatccatccatcctccccatacggtaacgggtagctttacacaccaagggaagcctcggctgtacttggttctagcggccattgtaagccctattactattattgttattaatatctgtatactactaatgcaagtaagatgagagcctcaggcattctttttgacctctgtatactgggatgtgcatgatataaagtgccatcattcgctcactcaaatgcgtacatgtttggtcattgtgtttactggcagccctttgctgctggaaaaagagtacatatttattaaccgtgtgggcctgagctgcttatctactgctggct

SEQ ID NO: 67536 - DNA, 2499 bp, Zea Mays
catcaactgtatatataagcttcatttatactcttatttggtcttcagttagttcttcacaagccggatacttaataatctgtctatatatctggaattaaaattacattctagaaatatcccattgatctagcaagacaatataatatatacttcatattgaataataaataagagtactagtgtagtagtacatggacccatcaagctccagctaccttcgcactgcgcctgaaatgaatatagagtacctgtactctacaacggagggaaaaaaatgggatacataccatggttacgcctaacgttgatcaacactggctccagtacaaatagtgctacgtactgctacaattgttcttcaccgcacgacccatctttattaatggcctccaatccacgagctcgatccttgctttccatgtcgccgcaggttgctagctattccgcgtagacgatccaccatattgatcagttgatgacgcagtacatgcacggaagatgtgcccccaacaaagtcagctaccagaagtcgtctatctagaactgtgggagcatgtggtggttgaggccgccgccaagcacggacgacatcgtcgccggcaagccgctggccggctgcggcgcgtcgtcgaagcaggagccaccgttgagccgcttggccgccggagactggtgctggtgggcagtggcggcgcactcgtcagctgggctcatgttcatcgccaccatcgccttgcgcttcccgcctgctgcggcggccgggggcggcgagaacatcatgagatcggagccgtcgtcgccgacggccaggagctggttgagggacgggtgcacggcgaacgaggcgtggtcggcggccacgtcggccggggggtccaagatctgcgcgagcgcgtactcgtcccacagcagctcggagatggaggggatcttggggagcctcggcagcgccgccggctgctggtgctgctgcatgacgacggccggcgtcgtagtagtgtttgtagtaccagcagcagcagcaccgccgccgatggccggcgcggcggcggcgtacaagctggtgctgccgcagaagtagtcgtcgaagaagccgccgggagaaggtccgtcgcggtcgaggtgctcgtagtcggcgagcggcggcaccatcggcgacgcgtggccggacttcttgtagatccggcacagcacccagtcgtccagctgcacgcaacaacgacaccagcaagggcatgcaaacaaggaaacgttatcgtcgtcgtcaccgtcatggccgtcgctgtcaacgcgtacagccagctatagagccaccatggccagcagagcagtcgtgtgaatgtataatgcatgcgtcttttcctttgcgtgcgccggcaagctgccattcaccttcacggcgatgagatgcgaggcgatgcgagctagtgccggtagatgtgacgcgctgctggtttggcggctgattgatgcatggctagctgcctagctctagctacggcgcttttggagaacgacgaattcggccggtgagggcagtttggtcatcgatctggaaaagcagccaaaccaacggcggctggcggtgcacgacgagcgacatgccgccgcacactgcacaccgccgggcgggcgtggcgtgcatgcgaccggcgtgacccacgaatattgttgcggtcgttacgaacgaatcagatgaaagcggcccgtgcatgcgtgtgaccaccagctcagctcaacatgacaccatggataggatagataatgggaagaacatatgtacaggtcatgcaatggatatgattcagggatgatcgaggtcgattgacttaccctcatggagacgttcctgaacttggagggcgggcggtaggcggcgagggggctggtgcagccggcgacggcggcgaggcggtactcgtgcatgatccagttggtcttggagcccctgggcgggcggcccttgtagaagacgagcgccttcttgacgccgacgccctcgccggtggcggcgtcgtggatgggcttgtcggtgccggtggccttccagtagccggagccggcggcgcggttggggcggatgccgttggggtacttgcggtcccgcgggctgaagaagtagtactcgccgtcgccgtacagcgccttggccggcaggtcccatgggtcgaacttgtagatgtcgacgtcggcgatgatgggcacggggcacggcgccgacgcggcgcggttgcggaggtagtgcaggatgagctcctcgtccgtcgggtggaaccggaaccccggcggcagctgcgacgtcgccgcctgcgctgctgctgacatcatcgtcgtcgtagctgccatcgtcatggccctgatggatggatggagcaatcaacaatcgtcaatggacggcctaactaattaattaagaatccgacgatggatgtgtacggtggatcgagttcggagctagaccacctgctgcagctcgatggatggaatggaatcgat

SEQ ID NO: 67537 - DNA, 3563 bp, Zea Mays
cgcctccgcctgctcacgccccaccgcgcgccatcttctccccccgctccgctctccgtcgatggaagggtcgctactgccgttgccctctcccttgcagtccatgtccgtcgatggaagggtcgctacagcccctgccctcgcctccgcaatccatggacgcccccgccccgagacgtgcccacctagagagccgctcgctcaccttgctacccggcccacacccgtctcgttctcctcctcatcccggcgctcctactactcccctccatggcgcgcaggtacacctcctcgttcccccacctgcctccctgttccacttttgttgcctccttacaggcaaaagctctgtggggtccctttgctacgtgggggacgaatcagcgagggcgcttagcgtcggcgaggagctcatggccaagagaccatgccgttgggtgtacaggatcgacggactgccctatctgtgtggtacgaaatcaagatctgttgggggacaggctctgttggtgttcaatttgctatcttgttttagttcttgcttgtttcgatagccatattaattttcgtacagatctggtagggttttgtttcccctgcgaggcgatttcctttttctctgttgtggttggggttgggtggggttaggtttggttaaacaattccccttttggattagaggggacagggcaatgaactaatttgccaactcaagcccttgctgtacacatgatttaatcatgggttacggcacatgtaccttttagatcgcttgcaaaaggttgtttagctatcctattagacatgtgtagttctttacttattcgtcggatgaagatgaagtaatggaggagattaggttggggccaaaaggcggtctcatgtactgcatggagtatcctattatttttgcagtgtctttgttcattctataggctgccatataagcccattgtttcctttggctttttccatacgtgattagtcgtacctgattttgccacctaatttttcattatatttttcttttttgttttgttgtcatgtgaattgtctccattcatgtttgtggttcgctttattacttaactattttctgaggtatatttttttttgtaaaaaacggattatcgatctgtcatccttgtataaccatctggtgtctacataagtttgatatctaacaccaaggccagacaatgattgtataaccatctggtgtccgtataagctttgaaaatgtcatccttttgcaagcgatcaaatatcttctagcattattattcagttggcaagactggtcgccagaagctactcaagcagaaaggatgtgttgtttgcatcacgggcctttagtgcttcaggtaaccaaaccttgctttctctcaaactggtttgttgtgttatagaacaaaaggaagaaaattacagattgttacagtattcctggaagaaatacttccattgctggaccatgggttacttaataagtagaatttctgggctcctaataaagtaccataatgttctgttaggactatgtttttatgcagcataatcaggttatgaagcacgaattgtacatcagctttcaggtgccaagttcagttaccttgaatattttaagtaatggtatgttgattccacttttattagttctttgagttccatttccagcgctgatcttgatgcctaatcaactattgagagcagacagccatgagcctgagacaaatggaaagtacaaattattgcatggattattaatcatcacatgccatagataaaaattcctgttgttatagccataacatcgtaaggttagttgataattacgcacatacgagaagtaaaaaaatagaagtttgacgttaatagaaatggggatacttctcttttcagaaaaagagcttaagaaggtcatcagaaagggaatcaacaacacgtggtgggcaacaaaaacaacttcaatgtcctaagaaatctagaaattctttctctgagtttttcttttctgttctagagtcaatagctgactgtttctgttaactgaaaatgtatttgtcacacaatgcttatataaaccacttgattaagttatattatgttaggacattttggcagtccactatttatatctggtttgatgttgttataaagtgatctctgctatctaatctattttggtggtcgtaaagttttgcttgcttgaaatttgatcacattagttgaattttgtctataatcacatcagatgagaaattatacagccttcttgcttaaatgtacagaccactgtttaattttttgaactttatttcccaccgcgagaaactgatttatttccaccgagagaaactggtttatttccatcttttcttctttttagaaccggaggctatcctctagcttgataatctcacctgcaagattcgtttttttggctaatccagtctggcgacctaggtctcttggcttgcccgtagcccgccggtcagtaatggcgcaggatgatccggttgtttctgctcagtggatgcacgagcacctagtgatgcctgatgttaaggtaaaaaatcatctagtttgcgtgttcatattcacttcagagacacttcaataatgcttccttcatcgaagaagaaagttcagagatatacttctatcccctgcgttagtgttatcagcttgttttaggttttggatgcttcctggtacatgccggtagagaacagggaatcatggaaagaatatcaggtggcacacatccccggtgcgctattcttcgacttagatggcatagttgatcggacaactgatgctaggcaaatagttggttcagctgtacttgtgaaagctcgagatagaccagaaattgaggatgatgaattctattcacttgacctttattgtcaaggatacaggcaagctcgtaggaacagttggtcagggtttcaatttcggaggtggagatcttctacaggtgataatgggctcttctgagggtactactgttgatccagattcagaaaatcaagattcaatctcatcacgtgagcatgtgtggactccatttgctgaagatattgtacctgatgttgatatgggaagcagagaaatgcggattacacctccgaaggggttacttgagctcaattctcgttctgacaagagatcgaagaaagaaaggcatgcgatggttaggtctgcatcatccttttctagcatccatgctcgcatctacagccatgatttgcatcttaaaagaaataaagaatgtgtcaggtccatagtactgaaatgttgatagcagcagatgtcctggctgaagattgtagatattatcttgcatgtattataacaaatgactcctcccctcacgatgactttgcggacagatgtctcaattctagtggtggagctacgaacaacaatctgatgtcctgatcgagagcgatggagctaatatttgaacttgtgtgtttgaacttgtgaactaaaaatgtgaactatggatgtgaacttgtgtgaatttgtgaacttatttatttggacttatgtga

SEQ ID NO: 67538 - DNA, 3231 bp, Zea Mays
cgcctccgcctgctcacgccccaccgcgcgccatcttctccccccgctccgctctccgtcgatggaagggtcgctactgccgttgccctctcccttgcagtccatgtccgtcgatggaagggtcgctacagcccctgccctcgcctccgcaatccatggacgcccccgccccgagacgtgcccacctagagagccgctcgctcaccttgctacccggcccacacccgtctcgttctcctcctcatcccggcgctcctactactcccctccatggcgcgcaggtacacctcctcgttcccccacctgcctccctgttccacttttgttgcctccttacaggcaaaagctctgtggggtccctttgctacgtgggggacgaatcagcgagggcgcttagcgtcggcgaggagctcatggccaagagaccatgccgttgggtgtacaggatcgacggactgccctatctgtgtggtacgaaatcaagatctgttgggggacaggctctgttggtgttcaatttgctatcttgttttagttcttgcttgtttcgatagccatattaattttcgtacagatctggtagggttttgtttcccctgcgaggcgatttcctttttctctgttgtggttggggttgggtggggttaggtttggttaaacaattccccttttggattagaggggacagggcaatgaactaatttgccaactcaagcccttgctgtacacatgatttaatcatgggttacggcacatgtaccttttagatcgcttgcaaaaggttgtttagctatcctattagacatgtgtagttctttacttattcgtcggatgaagatgaagtaatggaggagattaggttggggccaaaaggcggtctcatgtactgcatggagtatcctattatttttgcagtgtctttgttcattctataggctgccatataagcccattgtttcctttggctttttccatacgtgattagtcgtacctgattttgccacctaatttttcattatatttttcttttttgttttgttgtcatgtgaattgtctccattcatgtttgtggttcgctttattacttaactattttctgaggtatatttttttttgtaaaaaacggattatcgatctgtcatccttgtataaccatctggtgtctacataagtttgatatctaacaccaaggccagacaatgattgtataaccatctggtgtccgtataagctttgaaaatgtcatccttttgcaagcgatcaaatatcttctagcattattattcagttggcaagactggtcgccagaagctactcaagcagaaaggatgtgttgtttgcatcacgggcctttagtgcttcaggtaaccaaaccttgctttctctcaaactggtttgttgtgttatagaacaaaaggaagaaaattacagattgttacagtattcctggaagaaatacttccattgctggaccatgggttacttaataagtagaatttctgggctcctaataaagtaccataatgttctgttaggactatgtttttatgcagcataatcaggttatgaagcacgaattgtacatcagctttcaggtgccaagttcagttaccttgaatattttaagtaatgacagccatgagcctgagacaaatggaaagtacaaattattgcatggattattaatcatcacatgccatagataaaaattcctgttgttatagccataacatcgtaaggttagttgataattacgcacatacgagaagtaaaaaaatagaagtttgacgttaatagaaatggggatacttctcttttcagaaaaagagcttaagaaggtcatcagaaagggaatcaacaacacgtggtgggcaacaaaaacaacttcaatgtcctaagaaatctagaaattctttctctgagtttttcttttctgttctagagtcaatagctgactgtttctgttaactgaaaatgtatttgtcacacaatgcttatataaaccacttgattaagttatattatgttaggacattttggcagtccactatttatatctggtttgatgttgttataaagtgatctctgctatctaatctattttggtggtcgtaaagttttgcttgcttgaaatttgatcacattagttgaattttgtctataatcacatcagatgagaaattatacagccttcttgcttaaatgtacagaccactgtttaattttttgaactttatttcccaccgcgagaaactgatttatttccaccgagagaaactggtttatttccatcttttcttctttttagaaccggaggctatcctctagcttgataatctcacctgcaagattcgtttttttggctaatccagtctggcgacctaggtctcttggcttgcccgtagcccgccggtcagtaatggcgcaggatgatccggttgtttctgctcagtggatgcacgagcacctagtgatgcctgatgttaaggctaggcaaatagttggttcagctgtacttgtgaaagctcgagatagaccagaaattgaggatgatgaattctattcacttgacctttattgtcaaggatacaggcaagctcgtaggaacagttggtcagggtttcaatttcggaggtggagatcttctacaggtgataatgggctcttctgagggtactactgttgatccagattcagaaaatcaagattcaatctcatcacgtgagcatgtgtggactccatttgctgaagatattgtacctgatgttgatatgggaagcagagaaatgcggattacacctccgaaggggttacttgagctcaattctcgttctgacaagagatcgaagaaagaaaggcatgcgatggttaggtctgcatcatccttttctagcatccatgctcgcatctacagccatgatttgcatcttaaaagaaataaagaatgtgtcaggtccatagtactgaaatgttgatagcagcagatgtcctggctgaagattgtagatattatcttgcatgtattataacaaatgactcctcccctcacgatgactttgcggacagatgtctcaattctagtggtggagctacgaacaacaatctgatgtcctgatcgagagcgatggagctaatatttgaacttgtgtgtttgaacttgtgaactaaaaatgtgaactatggatgtgaacttgtgtgaatttgtgaacttatttatttggacttatgtga

SEQ ID NO: 67539 - DNA, 2807 bp, Zea Mays
cgcctccgcctgctcacgccccaccgcgcgccatcttctccccccgctccgctctccgtcgatggaagggtcgctactgccgttgccctctcccttgcagtccatgtccgtcgatggaagggtcgctacagcccctgccctcgcctccgcaatccatggacgcccccgccccgagacgtgcccacctagagagccgctcgctcaccttgctacccggcccacacccgtctcgttctcctcctcatcccggcgctcctactactcccctccatggcgcgcaggtacacctcctcgttcccccacctgcctccctgttccacttttgttgcctccttacaggcaaaagctctgtggggtccctttgctacgtgggggacgaatcagcgagggcgcttagcgtcggcgaggagctcatggccaagagaccatgccgttgggtgtacaggatcgacggactgccctatctgtgtggtacgaaatcaagatctgttgggggacaggctctgttggtgttcaatttgctatcttgttttagttcttgcttgtttcgatagccatattaattttcgtacagatctggtagggttttgtttcccctgcgaggcgatttcctttttctctgttgtggttggggttgggtggggttaggtttggttaaacaattccccttttggattagaggggacagggcaatgaactaatttgccaactcaagcccttgctgtacacatgatttaatcatgggttacggcacatgtaccttttagatcgcttgcaaaaggttgtttagctatcctattagacatgtgtagttctttacttattcgtcggatgaagatgaagtaatggaggagattaggttggggccaaaaggcggtctcatgtactgcatggagtatcctattatttttgcagtgtctttgttcattctataggctgccatataagcccattgtttcctttggctttttccatacgtgattagtcgtacctgattttgccacctaatttttcattatatttttcttttttgttttgttgtcatgtgaattgtctccattcatgtttgtggttcgctttattacttaactattttctgaggtatatttttttttgtaaaaaacggattatcgatctgtcatccttgtataaccatctggtgtctacataagtttgatatctaacaccaaggccagacaatgattgtataaccatctggtgtccgtataagctttgaaaatgtcatccttttgcaagcgatcaaatatcttctagcattattattcagttggcaagactggtcgccagaagctactcaagcagaaaggatgtgttgtttgcatcacgggcctttagtgcttcaggtaaccaaaccttgctttctctcaaactggtttgttgtgttatagaacaaaaggaagaaaattacagattgttacagtattcctggaagaaatacttccattgctggaccatgggttacttaataagtagaatttctgggctcctaataaagtaccataatgttctgttaggactatgtttttatgcagcataatcaggttatgaagcacgaattgtacatcagctttcaggtgccaagttcagttaccttgaatattttaagtaatggtatgttgattccacttttattagttctttgagttccatttccagcgctgatcttgatgcctaatcaactattgagagcagacagccatgagcctgagacaaatggaaagtacaaattattgcatggattattaatcatcacatgccatagataaaaattcctgttgttatagccataacatcgtaaggttagttgataattacgcacatacgagaagtaaaaaaatagaagtttgacgttaatagaaatggggatacttctcttttcagaaaaagagcttaagaaggtcatcagaaagggaatcaacaacacgtgtctggcgacctaggtctcttggcttgcccgtagcccgccggtcagtaatggcgcaggatgatccggttgtttctgctcagtggatgcacgagcacctagtgatgcctgatgttaaggctaggcaaatagttggttcagctgtacttgtgaaagctcgagatagaccagaaattgaggatgatgaattctattcacttgacctttattgtcaaggatacaggcaagctcgtaggaacagttggtcagggtttcaatttcggaggtggagatcttctacaggtgataatgggctcttctgagggtactactgttgatccagattcagaaaatcaagattcaatctcatcacgtgagcatgtgtggactccatttgctgaagatattgtacctgatgttgatatgggaagcagagaaatgcggattacacctccgaaggggttacttgagctcaattctcgttctgacaagagatcgaagaaagaaaggcatgcgatggttaggtctgcatcatccttttctagcatccatgctcgcatctacagccatgatttgcatcttaaaagaaataaagaatgtgtcaggtccatagtactgaaatgttgatagcagcagatgtcctggctgaagattgtagatattatcttgcatgtattataacaaatgactcctcccctcacgatgactttgcggacagatgtctcaattctagtggtggagctacgaacaacaatctgatgtcctgatcgagagcgatggagctaatatttgaacttgtgtgtttgaacttgtgaactaaaaatgtgaactatggatgtgaacttgtgtgaatttgtgaacttatttatttggacttatgtga

SEQ ID NO: 67540 - DNA, 2859 bp, Zea Mays
cgcctccgcctgctcacgccccaccgcgcgccatcttctccccccgctccgctctccgtcgatggaagggtcgctactgccgttgccctctcccttgcagtccatgtccgtcgatggaagggtcgctacagcccctgccctcgcctccgcaatccatggacgcccccgccccgagacgtgcccacctagagagccgctcgctcaccttgctacccggcccacacccgtctcgttctcctcctcatcccggcgctcctactactcccctccatggcgcgcaggtacacctcctcgttcccccacctgcctccctgttccacttttgttgcctccttacaggcaaaagctctgtggggtccctttgctacgtgggggacgaatcagcgagggcgcttagcgtcggcgaggagctcatggccaagagaccatgccgttgggtgtacaggatcgacggactgccctatctgtgtggtacgaaatcaagatctgttgggggacaggctctgttggtgttcaatttgctatcttgttttagttcttgcttgtttcgatagccatattaattttcgtacagatctggtagggttttgtttcccctgcgaggcgatttcctttttctctgttgtggttggggttgggtggggttaggtttggttaaacaattccccttttggattagaggggacagggcaatgaactaatttgccaactcaagcccttgctgtacacatgatttaatcatgggttacggcacatgtaccttttagatcgcttgcaaaaggttgtttagctatcctattagacatgtgtagttctttacttattcgtcggatgaagatgaagtaatggaggagattaggttggggccaaaaggcggtctcatgtactgcatggagtatcctattatttttgcagtgtctttgttcattctataggctgccatataagcccattgtttcctttggctttttccatacgtgattagtcgtacctgattttgccacctaatttttcattatatttttcttttttgttttgttgtcatgtgaattgtctccattcatgtttgtggttcgctttattacttaactattttctgaggtatatttttttttgtaaaaaacggattatcgatctgtcatccttgtataaccatctggtgtctacataagtttgatatctaacaccaaggccagacaatgattgtataaccatctggtgtccgtataagctttgaaaatgtcatccttttgcaagcgatcaaatatcttctagcattattattcagttggcaagactggtcgccagaagctactcaagcagaaaggatgtgttgtttgcatcacgggcctttagtgcttcaggtaaccaaaccttgctttctctcaaactggtttgttgtgttatagaacaaaaggaagaaaattacagattgttacagtattcctggaagaaatacttccattgctggaccatgggttacttaataagtagaatttctgggctcctaataaagtaccataatgttctgttaggactatgtttttatgcagcataatcaggttatgaagcacgaattgtacatcagctttcaggtgccaagttcagttaccttgaatattttaagtaatgtctggcgacctaggtctcttggcttgcccgtagcccgccggtcagtaatggcgcaggatgatccggttgtttctgctcagtggatgcacgagcacctagtgatgcctgatgttaaggtaaaaaatcatctagtttgcgtgttcatattcacttcagagacacttcaataatgcttccttcatcgaagaagaaagttcagagatatacttctatcccctgcgttagtggtatgtgagaatataacagtttggttgtctatcaatttgatcttcctttttatgcgttgtgttcttattactcccagaaataattagagggttagggacatatgtgctttgtggcagttatcagcttgttttaggttttggatgcttcctggtacatgccggtagagaacagggaatcatggaaagaatatcaggtggcacacatccccggtgcgctattcttcgacttagatggcatagttgatcggacaactgatgctaggcaaatagttggttcagctgtacttgtgaaagctcgagatagaccagaaattgaggatgatgaattctattcacttgacctttattgtcaaggatacaggcaagctcgtaggaacagttggtcagggtttcaatttcggaggtggagatcttctacaggtgataatgggctcttctgagggtactactgttgatccagattcagaaaatcaagattcaatctcatcacgtgagcatgtgtggactccatttgctgaagatattgtacctgatgttgatatgggaagcagagaaatgcggattacacctccgaaggggttacttgagctcaattctcgttctgacaagagatcgaagaaagaaaggcatgcgatggttaggtctgcatcatccttttctagcatccatgctcgcatctacagccatgatttgcatcttaaaagaaataaagaatgtgtcaggtccatagtactgaaatgttgatagcagcagatgtcctggctgaagattgtagatattatcttgcatgtattataacaaatgactcctcccctcacgatgactttgcggacagatgtctcaattctagtggtggagctacgaacaacaatctgatgtcctgatcgagagcgatggagctaatatttgaacttgtgtgtttgaacttgtgaactaaaaatgtgaactatggatgtgaacttgtgtgaatttgtgaacttatttatttggacttatgtga

SEQ ID NO: 67541 - DNA, 1669 bp, Zea Mays
ccgcctgctcacgccccaccgcgcgccatcttctccccccgctccgctctccgtcgatggaagggtcgctactgccgttgccctctcccttgcagtccatgtccgtcgatggaagggtcgctacagcccctgccctcgcctccgcaatccatggacgcccccgccccgagacgtgcccacctagagagccgctcgctcaccttgctacccggcccacacccgtctcgttctcctcctcatcccggcgctcctactactcccctccatggcgcgcaggtacacctcctcgttcccccacctgcctccctgttccacttttgttgcctccttacaggcaaaagctctgtggggtccctttgctacgtgggggacgaatcagcgagggcgcttagcgtcggcgaggagctcatggccaagagaccatgccgttgggtgtacaggatcgacggactgccctatctgtgtgttggcaagactggtcgccagaagctactcaagcagaaaggatgtgttgtttgcatcacgggcctttagtgcttcaggtaaccaaaccttgctttctctcaaactggtttgttgtgttatagaacaaaaggaagaaaattacagattgttacagtattcctggaagaaatacttccattgctggaccatgggttacttaataagtagaatttctgggctcctaataaagtaccataatgttctgttaggactatgtttttatgcagcataatcaggttatgaagcacgaattgtacatcagctttcaggtgccaagttcagttaccttgaatattttaagtaatgtctggcgacctaggtctcttggcttgcccgtagcccgccggtcagtaatggcgcaggatgatccggttgtttctgctcagtggatgcacgagcacctagtgatgcctgatgttaaggctaggcaaatagttggttcagctgtacttgtgaaagctcgagatagaccagaaattgaggatgatgaattctattcacttgacctttattgtcaaggatacaggcaagctcgtaggaacagttggtcagggtttcaatttcggaggtggagatcttctacaggtgataatgggctcttctgagggtactactgttgatccagattcagaaaatcaagattcaatctcatcacgtgagcatgtgtggactccatttgctgaagatattgtacctgatgttgatatgggaagcagagaaatgcggattacacctccgaaggggttacttgagctcaattctcgttctgacaagagatcgaagaaagaaaggcatgcgatggttaggtctgcatcatccttttctagcatccatgctcgcatctacagccatgatttgcatcttaaaagaaataaagaatgtgtcaggtccatagtactgaaatgttgatagcagcagatgtcctggctgaagattgtagatattatcttgcatgtattataacaaatgactcctcccctcacgatgactttgcggacagatgtctcaattctagtggtggagctacgaacaacaatctgatgtcctgatcgagagcgatggagctaatatttgaacttgtgtgtttgaacttgtgaactaaaaatgtgaactatggatgtgaacttgtgtgaatttgtgaacttatttatttggacttatgtga

SEQ ID NO: 67542 - DNA, 2315 bp, Zea Mays
ccgcctgctcacgccccaccgcgcgccatcttctccccccgctccgctctccgtcgatggaagggtcgctactgccgttgccctctcccttgcagtccatgtccgtcgatggaagggtcgctacagcccctgccctcgcctccgcaatccatggacgcccccgccccgagacgtgcccacctagagagccgctcgctcaccttgctacccggcccacacccgtctcgttctcctcctcatcccggcgctcctactactcccctccatggcgcgcaggtacacctcctcgttcccccacctgcctccctgttccacttttgttgcctccttacaggcaaaagctctgtggggtccctttgctacgtgggggacgaatcagcgagggcgcttagcgtcggcgaggagctcatggccaagagaccatgccgttgggtgtacaggatcgacggactgccctatctgtgtggtacgaaatcaagatctgttgggggacaggctctgttggtgttcaatttgctatcttgttttagttcttgcttgtttcgatagccatattaattttcgtacagatctggtagggttttgtttcccctgcgaggcgatttcctttttctctgttgtggttggggttgggtggggttaggtttggttaaacaattccccttttggattagaggggacagggcaatgaactaatttgccaactcaagcccttgctgtacacatgatttaatcatgggttacggcacatgtaccttttagatcgcttgcaaaaggttgtttagctatcctattagacatgtgtagttctttacttattcgtcggatgaagatgaagtaatggaggagattaggttggggccaaaaggcggtctcatgtactgcatggagtatcctattatttttgcagtgtctttgttcattctataggctgccatataagcccattgtttcctttggctttttccatacgtgattagtcgtacctgattttgccacctaatttttcattatatttttcttttttgttttgttgtcatgtgaattgtctccattcatgtttgtggttcgctttattacttaactattttctgaggtatatttttttttgtaaaaaacggattatcgatctgtcatccttgtataaccatctggtgtctacataagtttgatatctaacaccaaggccagacaatgattgtataaccatctggtgtccgtataagctttgaaaatgtcatccttttgcaagcgatcaaatatcttctagcattattattcagttggcaagactggtcgccagaagctactcaagcagaaaggatgtgttgtttgcatcacgggcctttagtgcttcaggactatgtttttatgcagcataatcaggttatgaagcacgaattgtacatcagctttcaggtgccaagttcagttaccttgaatattttaagtaatgtctggcgacctaggtctcttggcttgcccgtagcccgccggtcagtaatggcgcaggatgatccggttgtttctgctcagtggatgcacgagcacctagtgatgcctgatgttaaggctaggcaaatagttggttcagctgtacttgtgaaagctcgagatagaccagaaattgaggatgatgaattctattcacttgacctttattgtcaaggatacaggcaagctcgtaggaacagttggtcagggtttcaatttcggaggtggagatcttctacaggtgataatgggctcttctgagggtactactgttgatccagattcagaaaatcaagattcaatctcatcacgtgagcatgtgtggactccatttgctgaagatattgtacctgatgttgatatgggaagcagagaaatgcggattacacctccgaaggggttacttgagctcaattctcgttctgacaagagatcgaagaaagaaaggcatgcgatggttaggtctgcatcatccttttctagcatccatgctcgcatctacagccatgatttgcatcttaaaagaaataaagaatgtgtcaggtccatagtactgaaatgttgatagcagcagatgtcctggctgaagattgtagatattatcttgcatgtattataacaaatgactcctcccctcacgatgactttgcggacagatgtctcaattctagtggtggagctacgaacaacaatctgatgtcctgatcgagagcgatggagctaatatttgaacttgtgtgtttgaacttgtgaactaaaaatgtgaactatggatgtgaacttgtgtgaatttgtgaacttatttatttggacttatgtga

SEQ ID NO: 67543 - DNA, 1345 bp, Zea Mays
catcccggcgctcctactactcccctccatggcgcgcagcataatcaggttatgaagcacgaattgtacatcagctttcaggtgccaagttcagttaccttgaatattttaagtaatgtctggcgacctaggtctcttggcttgcccgtagcccgccggtcagtaatggcgcaggatgatccggttgtttctgctcagtggatgcacgagcacctagtgatgcctgatgttaaggtaaaaaatcatctagtttgcgtgttcatattcacttcagagacacttcaataatgcttccttcatcgaagaagaaagttcagagatatacttctatcccctgcgttagtggtatgtgagaatataacagtttggttgtctatcaatttgatcttcctttttatgcgttgtgttcttattactcccagaaataattagagggttagggacatatgtgctttgtggcagttatcagcttgttttaggttttggatgcttcctggtacatgccggtagagaacagggaatcatggaaagaatatcaggtggcacacatccccggtgcgctattcttcgacttagatggcatagttgatcggacaactgatgctaggcaaatagttggttcagctgtacttgtgaaagctcgagatagaccagaaattgaggatgatgaattctattcacttgacctttattgtcaaggatacaggcaagctcgtaggaacagttggtcagggtttcaatttcggaggtggagatcttctacaggtgataatgggctcttctgagggtactactgttgatccagattcagaaaatcaagattcaatctcatcacgtgagcatgtgtggactccatttgctgaagatattgtacctgatgttgatatgggaagcagagaaatgcggattacacctccgaaggggttacttgagctcaattctcgttctgacaagagatcgaagaaagaaaggcatgcgatggttaggtctgcatcatccttttctagcatccatgctcgcatctacagccatgatttgcatcttaaaagaaataaagaatgtgtcaggtccatagtactgaaatgttgatagcagcagatgtcctggctgaagattgtagatattatcttgcatgtattataacaaatgactcctcccctcacgatgactttgcggacagatgtctcaattctagtggtggagctacgaacaacaatctgatgtcctgatcgagagcgatggagctaatatttgaacttgtgtgtttgaacttgtgaactaaaaatgtgaactatggatgtgaacttgtgtgaatttgtgaacttatttatttggacttatgtga

SEQ ID NO: 67544 - DNA, 2089 bp, Zea Mays
catcccggcgctcctactactcccctccatggcgcgcagcataatcaggttatgaagcacgaattgtacatcagctttcaggtgccaagttcagttaccttgaatattttaagtaatggtatgttgattccacttttattagttctttgagttccatttccagcgctgatcttgatgcctaatcaactattgagagcagacagccatgagcctgagacaaatggaaagtacaaattattgcatggattattaatcatcacatgccatagataaaaattcctgttgttatagccataacatcgtaaggttagttgataattacgcacatacgagaagtaaaaaaatagaagtttgacgttaatagaaatggggatacttctcttttcagaaaaagagcttaagaaggtcatcagaaagggaatcaacaacacgtggtgggcaacaaaaacaacttcaatgtcctaagaaatctagaaattctttctctgagtttttcttttctgttctagagtcaatagctgactgtttctgttaactgaaaatgtatttgtcacacaatgcttatataaaccacttgattaagttatattatgttaggacattttggcagtccactatttatatctggtttgatgttgttataaagtgatctctgctatctaatctattttggtggtcgtaaagttttgcttgcttgaaatttgatcacattagttgaattttgtctataatcacatcagatgagaaattatacagccttcttgcttaaatgtacagaccactgtttaattttttgaactttatttcccaccgcgagaaactgatttatttccaccgagagaaactggtttatttccatcttttcttctttttagaaccggaggctatcctctagcttgataatctcacctgcaagattcgtttttttggctaatccagtctggcgacctaggtctcttggcttgcccgtagcccgccggtcagtaatggcgcaggatgatccggttgtttctgctcagtggatgcacgagcacctagtgatgcctgatgttaaggtaaaaaatcatctagtttgcgtgttcatattcacttcagagacacttcaataatgcttccttcatcgaagaagaaagttcagagatatacttctatcccctgcgttagtgaaataattagagggttagggacatatgtgctttgtggcagttatcagcttgttttaggttttggatgcttcctggtacatgccggtagagaacagggaatcatggaaagaatatcaggtggcacacatccccggtgcgctattcttcgacttagatggcatagttgatcggacaactgatgctaggcaaatagttggttcagctgtacttgtgaaagctcgagatagaccagaaattgaggatgatgaattctattcacttgacctttattgtcaaggatacaggcaagctcgtaggaacagttggtcagggtttcaatttcggaggtggagatcttctacaggtgataatgggctcttctgagggtactactgttgatccagattcagaaaatcaagattcaatctcatcacgtgagcatgtgtggactccatttgctgaagatattgtacctgatgttgatatgggaagcagagaaatgcggattacacctccgaaggggttacttgagctcaattctcgttctgacaagagatcgaagaaagaaaggcatgcgatggttaggtctgcatcatccttttctagcatccatgctcgcatctacagccatgatttgcatcttaaaagaaataaagaatgtgtcaggtccatagtactgaaatgttgatagcagcagatgtcctggctgaagattgtagatattatcttgcatgtattataacaaatgactcctcccctcacgatgactttgcggacagatgtctcaattctagtggtggagctacgaacaacaatctgatgtcctgatcgagagcgatggagctaatatttgaacttgtgtgtttgaacttgtgaactaaaaatgtgaactatggatgtgaacttgtgtgaatttgtgaacttatttatttggacttatgtga

SEQ ID NO: 67545 - DNA, 1732 bp, Zea Mays
gccctctctttctgtcttgtgccctaaaaaaagggcccgctgctctgcttttctccccctcgtctccgcatccgcagtcgcacacccgccattgcattcgcagcaccagcgccgcttctccttcctcgagctcacccccctctcttctcctattcgctcgcgtgctctctctctctctctctccgctgcctcagccgccctcgctgtcgctgacccgagagattcatttggccggtcatggctgacgcgttgtgcaacggcgtcgtggcgtccccgtgcggccgggacgtcgccggccgggccaggggcgccgccagggccgcgctcgcggagtccctgcaggtcgccgggcacgccagcaagacctccttctccgccgggaggatgtcggtcaaggacagcaagccgaggcccctgtcgcgtagcctcgaggccgccgcgccaggacaggtcggtttcggttcgccgctgcaactcttcgtctgtctgtcctgttgcttgctcctgggaatctttttagtgtttgctcatgcggttcctgtgttcttgtttcacttgcaagattcccccattttttttagattcagttcccgccgtgagaataatttggcgctcacaattttttcactctctctttctctcttgtttgctcaacctttgaatttatttcttctggctgctgcagatgaacctgtcgttccccaaagccatgcggtggtggaagaaggggctgcaccccaacatgcgcgaggtcgagtccgcgcaggacctggccgactcgctgctcagcgccggcgacaagctcgtggtcgtcgacttcttctccccaggctgcggcggctgccgcgccctccaccccaagatcgcccagttcgccgagaagaacccgggcgtgcagttcttgcaggtgaactacgagacgcacaagtccatgtgctacagcctccgcgtccacgtcctccctttcttcaggttctaccggggagccgagggccgggtcagcagcttcagctgcaccaacgcaacgatcaacaagttcaaggacgcgctcgccaagcacggggctgagaggtgtagcctcgggcctgcgcgggggctggacgagtcggagctcatggccttggctgagaacagggacctgcacttcacctacgacaagccgggcggcctcgtccccctcgccgaagctattgccaaggaggctgccgcaccgggaggcccgtggcttcctctgcctgcgtccctgctcggccagggatccgacaactcattgctgccctctggaagatagaccgtgctccgtgctcggttggtgtcattcattggaggtggctcctccgtcttgtacagatttgattcgttcgtagtggtctgatgatgctggagtgacagaaatattcagatgcgggatgcgcaggctttaagcttttagtttgtaaagtctgactattgcgcctgtattgttgcatctagacctttgctgaaacatgaaaaatccattgcttggcgaacctgtctggatcgttctcattcctctatgcaatgcagccgaggagggctcgttcctgcatggttgataatatgtattcatgcagcttcagctgccttttttttctttccagtttgtcttgctgctgcaagacccctgcctgcatcaacttatctgtttgttactttatccgcatgaccttgtcctgatacagatgtctttcggttgggtattggtgtgctg

SEQ ID NO: 67546 - DNA, 1482 bp, Zea Mays
cggggatgttcgcgcacggcgccacctacggctcgtctgcgtccgcgtcctggccgccgccgccgtcgtgcgaggggatgatgggcgacctggactacggcggcggcgacgacctgttcgccatctcgcggcagatgggctacgccagcggcggtggctccggctccgcgtcctcggcggccatcgcacaccacgagcagcagcagcagcagctttactactcgccgtgccagccagcagcgagcatgacggtgttcatcaatggcgtggcgacggaggtgccgcgggggccgatcgacctgcggtccatgttcgggcaggacgtgatgctggtgcactccaccgccggcctcctccccgtcaacgagtacggcgtgctcacgcagagcctgcagatgggcgagagctacttcctggtcacgaggggctactaggtagctagctatagcacattgcattgccgacatggagaccccagagctagctgcagtacacgtactcctccttaccatgcatggaattggatgttatttggatcgtcggagacgcatgcatgctgcagtacctagtatctctgtgtacgtgttcttcagtgaatgtctgtcagctcttgccgtccgtccgtccggtgtagatcagaaaaaggaggcaaagaattcgataccagcagtgtgtgtgtgtttactatatagagagagacagacagacacacacaaacaaatagagtgtacctacgacgcatccacatcgaacatctatactaagtatgtatgtaatgatcaatcatatgatgagtcgcaccattgcacgcatttgctttaatgaacctgaatgcaatgcatgttgcaacttgctgctgctgcgtggtgtgctcgggtcaagtcacatcaggcattatccatccatccatcgggctggcatcggacggcgtgtcgagcgcactcggccgcaagtggcgacctcaccgcccgcgccggccaaatggaggccaccgcgtgtctccttccgagacctctatctctgccgaccgaccgaccgcccgcccgcccgccagcttcagcaatcagcaatcagctagaagcagacaacactcaacagagcgagcagcagctacccaccctcttcattcttcaccgtactgtagttgccatagacagacatcagttcaagcacaagtgatcaatctcttatacttctctgggatgaaggaaacagtccgattacgaccaattcgttctaggtgtgtgtgtgttaagagacgacatactcccccagtcaagtcagtttaccaacgacccatttggaggctggagctgtgctggatcggtggcagcagagcactagctgtaaccctaaaagctgggcgccgcatgacccagcacacacttcaattctctgcacccggtcacctgtcacatctgcaaagagagggtactgaaccacgaagctagcaagctttacgaccaagctgatggtacaaag

SEQ ID NO: 67547 - DNA, 1336 bp, Zea Mays
cggcgccacctacggctcgtctgcgtccgcgtcctggccgccgccgccgtcgtgcgaggggatgatgggcgacctggactacggcggcggcgacgacctgttcgccatctcgcggcagatgggctacgccagcggcggtggctccggctccgcgtcctcggcggccatcgcacaccacgagcagcagcagcagcagctttactactcgccgtgccagccagcgagcatgacggtgttcatcaatggcgtggcgacggaggtgccgcgggggccgatcgacctgcggtccatgttcgggcaggacgtgatgctggtgcactccaccgccggcctcctccccgtcaacgagtacggcgtgctcacgcagagcctgcagatgggcgagagctacttcctggtcacgaggggctactaggtagctagctatagcacattgcattgccgacatggagaccccagagctagctgcagtacacgtactcctccttaccatgcatggaattggatgttatttggatcgtcggagacgcatgcatgctgcagtacctagtatctctgtgtacgtgttcttcagtgaatgtctgtcagctcttgccgtccgtccgtccggtgtagatcagaaaaaggaggcaaagaattcgataccagcagtgtgtgtgtgtttactatatagagagagacagacagacacacacaaacaaatagagtgtacctacgacgcatccacatcgaacatctatactaagcattatccatccatccatcgggctggcatcggacggcgtgtcgagcgcactcggccgcaagtggcgacctcaccgcccgcgccggccaaatggaggccaccgcgtgtctccttccgagacctctatctctgccgaccgaccgaccgcccgcccgcccgccagcttcagcaatcagcaatcagctagaagcagacaacactcaacagagcgagcagcagctacccaccctcttcattcttcaccgtactgtagttgccatagacagacatcagttcaagcacaagtgatcaatctcttatacttctctgggatgaaggaaacagtccgattacgaccaattcgttctaggtgtgtgtgtgttaagagacgacatactcccccagtcaagtcagtttaccaacgacccatttggaggctggagctgtgctggatcggtggcagcagagcactagctgtaaccctaaaagctgggcgccgcatgacccagcacacacttcaattctctgcacccggtcacctgtcacatctgcaaagagagggtactgaaccacgaagctagcaagctttacgaccaagctgatggtacaaag

SEQ ID NO: 67548 - DNA, 2280 bp, Zea Mays
gccacctacggctcgtctgcgtccgcgtcctggccgccgccgccgtcgtgcgaggggatgatgggcgacctggactacggcggcggcgacgacctgttcgccatctcgcggcagatgggctacgccagcggcggtggctccggctccgcgtcctcggcggccatcgcacaccacgagcagcagcagcagcagctttactactcgccgtgccagccaggtgagcgcgccaaaagccacgccacgctatgcatgcatgcatgcttcgtgctctcgatccatggatgcatgggtccatcgtccatgcttggttttcgtccagtttaatctgtgctcttaatcaagaacttgggtttcgaattcagggaaattagaccctttcactgctagccctcctataaagatcatacccatactggcatgcaaaggcaaaagatccatgcataatttgctatgcatgctgtgcagcagaggtcgatcgagtctcgattggtgctacctagctgttatcttcgggtagttagcgacaagcatatcatgccaatgcgaagaactagatcctgctgggtattagatcaatcacatctaccacaggaacttaactggaggaacagttgagttcttatgatggacggtgggtgttcatttttcgtttgaccgggagctatcgtccaccgccgtatctgctaattcagacaagacagctcgctgcatcactactcaattgtgttgtgcttaattatgtagcatcatcagtagtagtagtataatacaaatactatctagtaccttaacacatgccggccgcatgagtgcttgcatgcgatatgcagctggacctgcaagcaaatactaacatgttttgctcatgcatgctgtgatattaagagtaatggggacccagttccagtattctaatttctagtacacatgctgcacgcatgatcagaagataacatagcaatataattgggcagacagacatcgtccaattaagttaacaagacgtacggtgtgttgtatgatatatgcatgcagcagcgagcatgacggtgttcatcaatggcgtggcgacggaggtgccgcgggggccgatcgacctgcggtccatgttcgggcaggacgtgatgctggtgcactccaccgccggcctcctccccgtcaacgagtacggcgtgctcacgcagagcctgcagatgggcgagagctacttcctggtcacgaggggctactaggtagctagctatagcacattgcattgccgacatggagaccccagagctagctgcagtacacgtactcctccttaccatgcatggaattggatgttatttggatcgtcggagacgcatgcatgctgcagtacctagtatctctgtgtacgtgttcttcagtgaatgtctgtcagctcttgccgtccgtccgtccggtgtagatcagaaaaaggaggcaaagaattcgataccagcagtgtgtgtgtgtttactatatagagagagacagacagacacacacaaacaaatagagtgtacctacgacgcatccacatcgaacatctatactaagtatgtatgtaatgatcaatcatatgatgagtcgcaccattgcacgcatttgctttaatgaacctgaatgcaatgcatgttgcaacttgctgctgctgcgtggtgtgctcgggtcaagtcacatcaggcattatccatccatccatcgggctggcatcggacggcgtgtcgagcgcactcggccgcaagtggcgacctcaccgcccgcgccggccaaatggaggccaccgcgtgtctccttccgagacctctatctctgccgaccgaccgaccgcccgcccgcccgccagcttcagcaatcagcaatcagctagaagcagacaacactcaacagagcgagcagcagctacccaccctcttcattcttcaccgtactgtagttgccatagacagacatcagttcaagcacaagtgatcaatctcttatacttctctgggatgaaggaaacagtccgattacgaccaattcgttctaggtgtgtgtgtgttaagagacgacatactcccccagtcaagtcagtttaccaacgacccatttggaggctggagctgtgctggatcggtggcagcagagcactagctgtaaccctaaaagctgggcgccgcatgacccagcacacacttcaattctctgcacccggtcacctgtcacatctgcaaagagagggtactgaaccacgaagctagcaagctttacgaccaagctgatggtacaaag

SEQ ID NO: 67549 - DNA, 1754 bp, Zea Mays
ggcaggttgcctttggctcccggtcccggcgtttgcttgcggcttccgtcgtccgcgcacaccgacgacgtggagcaacggccagcgcacgtaagtgcccgctcttccagccccacatttgcatccgcttgccttctggcaccacgccaccacctaccatgccgacgttcccgcgcgccggccggtggtccacctccagcacatggccacggaaaaccgccggcgcggcgtccacggcgctggccgccgtcgtcttcgcggtcctggacgtcgccgacgtgatcctctgcttcgcgtacgccctcctcgacggcgtgctcgaggacagccccgtgcgctgctactgccacaggagctacgacgacggcatccgcgaggcggccgcgggggcatcagtggatggcggcggccacgaggaggtctccgacacgctgtacgcgtgcggccggaggagcaccgtcagggacgcgctgctggggctcgtgcgacgcgtcgtgccgaggactaggaggacacgggcgccgccagatgagacggtggcgccgtgcaagtggcgcagccccaggtggtctgactgcgcgtgtaagtcgtgcgtcgcgtggcggtgcggcgaagaaggcggcggccggctgcacgtcgtcgtcaaagagccgggcccgaaagatgcagcggcagcaggaacaacaacacgcgcccctgatcccgagaacgccatcttcgtgcacggtttcgcgtcgtcgtcgtccttctggtcggagacggtgttccgggagtcctcgtgcatcctcgacggttgcaggttgttcgcggtggatctcctcggcttcggccggagccccaagcctgccaactgcatgtacagggtgagagaccacgtggaggcgatcgagagaaccctcatcctcgccggcgacggtgaatcgcagagtctgatgagctccttccacctggtcagccactccatgggctgcaccatcgccctcgccttggctgccaagcacccgacgcgagtcaaatccatcacgctggttgcaccgccgtacttcctgccgtgcgagcagagagcgagccaggtggcgctcaacaggctggccgagaagaagctgtggccaccgctgctgttcggttccgcggtgatgtcgtggtacgagcacgtcgggaggaccgtctgcttcctcgtctgcaagaaccacctgctctgggagtggctcttcagcctcctcaacctcaacaggggcgtggatttcagggtgagggatctgacgaagcacactcaccactcggcgtggcacaccatgcacaacgtcatctgcggcggggcggcgctgcaggacgcgaacctggaggccgtcgcggcggccggcatcccggtgcaggtgctccacggcgccgacgaccaggtggttccggtcgagtgcggccgccatgtcaaggcgaagatcccgcgcgccaagctccgtgtcatggagaggcgcgaccactctacggtggttctcggcagggagagaggcttcgccgaggagctcaaggcgttctggtgcgcttcaaggtccccggttcacgtccaggatgcggagcaacaggaaacactagacatcagcagcccctcaaaagattcaaagatcatccaacatgacaacacctcagtgcccaccatcctcgctcggcgtctgcggattgatctttgcattagcagccttcaacaggagcttcgcgccatcatgcagcaagtcctggagttcccttttgcttaa

SEQ ID NO: 67550 - DNA, 1730 bp, Zea Mays
ggcaggttgcctttggctcccggtcccggcgtttgcttgcggcttccgtcgtccgcgcacaccgacgacgtggagcaacggccagcgcacgtaagtgcccgctcttccagccccacatttgcatccgcttgccttctggcaccacgccaccacctaccatgccgacgttcccgcgcgccggccggtggtccacctccagcacatggccacggaaaaccgccggcgcggcgtccacggcgctggccgccgtcgtcttcgcggtcctggacgtcgccgacgtgatcctctgcttcgcgtacgccctcctcgacggcgtgctcgaggacagccccgtgcgctgctactgccacaggagctacgacgacggcatccgcgaggcggccgcgggggcatcagtggatggcggcggccacgaggaggtctccgacacgctgtacgcgtgcggccggaggagcaccgtcagggacgcgctgctggggctcgtgcgacgcgtcgtgccgaggactaggaggacacgggcgccgccagatgagacggtggcgccgtgcaagtggcgcagccccaggtggtctgactgcgcgtgtaagtcgtgcgtcgcgtggcggtgcggcgaagaaggcggcggccggctgcacgtcgtcgtcaaagagccgggcccgaaagatgcagcggcagcaggaacaacaacacgcgcccctgatcccgagaacgccatcttcgtgcacggtttcgcgtcgtcgtcgtccttctggtcggagacggtgttccgggagtcctcgtgcatcctcgacggttgcaggttgttcgcggtggatctcctcggcttcggccggagccccaagcctgccaactgcatgtacagggtgagagaccacgtggaggcgatcgagagaaccctcatcctcgccggcgacggtgaatcgcagagtctgatgagctccttccacctggtcagccactccatgggctgcaccatcgccctcgccttggctgccaagcacccgacgcgagtcaaatccatcacgctggttgcaccgagagcgagccaggtggcgctcaacaggctggccgagaagaagctgtggccaccgctgctgttcggttccgcggtgatgtcgtggtacgagcacgtcgggaggaccgtctgcttcctcgtctgcaagaaccacctgctctgggagtggctcttcagcctcctcaacctcaacaggggcgtggatttcagggtgagggatctgacgaagcacactcaccactcggcgtggcacaccatgcacaacgtcatctgcggcggggcggcgctgcaggacgcgaacctggaggccgtcgcggcggccggcatcccggtgcaggtgctccacggcgccgacgaccaggtggttccggtcgagtgcggccgccatgtcaaggcgaagatcccgcgcgccaagctccgtgtcatggagaggcgcgaccactctacggtggttctcggcagggagagaggcttcgccgaggagctcaaggcgttctggtgcgcttcaaggtccccggttcacgtccaggatgcggagcaacaggaaacactagacatcagcagcccctcaaaagattcaaagatcatccaacatgacaacacctcagtgcccaccatcctcgctcggcgtctgcggattgatctttgcattagcagccttcaacaggagcttcgcgccatcatgcagcaagtcctggagttcccttttgcttaa

SEQ ID NO: 67551 - DNA, 2662 bp, Zea Mays
cttccctttccttcacctgccacccgcccccctcttccacatccccacccccgccttcccccaaaagagaaaccagatcacctgctcggggccttggggcgcttcttgggccgagccctaggtagcccggaactccgatctcggccaccaccaccctcgcctatcccagaagttcagctgctagtctatcaggatggccgtggaaactgccagtgacgctcaggtggcacaagataacgagatttcccccagcaatgaggcaatccaaggtgatgagttggctcatggcgaagagctgttccaaggtgatgatcttgttcaaggaaatgagttggttgtttctgaggtaacaacacctcctactactggaatcagacgtaggaggaagaagaagtccttggtatgggagcacttcactattgaagccgtcgcgggcggggccacaagggcctgctgcaatctctgcaagcaaacctttgcttacagctctggctcaaagattgctgggactagtcatctcaagaggcacatcaccttgggctcttgtcccaagataaaggaccaagatcagaggctggcactgccttcaactggtgggactgacaactatggcgaggcaacttcggagcggccaaccaagagacgctacagatataccggttatgcaaatgctgtttttgatcaggaccgcagttgctcatacttggcaaggatgatcattcagcatgactacccacttcacattgtccaacagcaggcattttccgtctttatcgaaagtctgcagccacgtttcaagattgtggatgttgatacgatggaaggagaggtgtatgctgtttatcagaaagaaaaggagaacctgcttcgatcattcaacactatgcctggaaggatcagtctcactataggactgtggacaactagtcagactctcgggtacgtttcacttgcagggcagtttatcgactctgagtggaaagtacgccgaagaatgcttaacttcatgatggtgtcatctcctcactcagagaatgcacttagtgaggcaattagcctgagcctctctgactggagtatgaaggacaagctattcaccatcacattggataatgaatgctcctcacacgatatctacagtgcaaatttgagggatcatctctccaacaagaacagtctcatgcttaagggacagctctttgttgtgaggtgctatgcccatatccttaatgctgttgcacaagatgtcattgcttcggttcatggtgttgtatacaatatccgtgaaagcataaagttcataaaagcttcttctgcccgtgaagagaagtttgccgagattgctctgcagctggagattcccagtaccaggaccctctgtctggatgttacaacccagtggaacaccacttatctgatgttgctagctgccttggattataagcaggctttcactgcactagaaacatgtgatgatagctacaatgaagctccatcatcagaggactggaggaaagttgaggccgcctgtaattacctgaaactgctctacgactccgcacatagcatcatggcagcagcaaacccaactgcaaacatctttttccacgaagcatggaaacttcagctagagctagcaaatggcacaggacatgaagaccccactttcagaagcatcgccaaggatatgcatgagaggtttgacaagtactggaaagattgcagcctcgtgttggccgttgccgttgtcatggatccacgtttcaagatgaagcttgttgagttcagttacacaaaaatttatggggctgaagcagcaaagcatgttaaggtggttaatgatgctgtacatgagctgtacgaggagtatgtggctcatccactcccactgaccccagcctatgtggagcaaggtgaaggggggaataatggagcagcaaatgcgaatagcagtcaagggcctcctgcttccgctggcgatgggcttctagacttcgatatgtacctttctgagatccagagtagccagccctcgaaacctgagctggaacagtacctggatgagtccctcaccccacgtacccaggagtttgatatcctgaactggtggaagctaaacagagtgaagtttccaaccctctctagaatggcctgtgatatcttggccattccgatgtccatggtaagcagtggcagctccatattcactgctggaacaggaagccgcatgctcgatgactacagaagctctctccgacctgagacggtggaagcacttgtctgtgcaaaagactggctgcagtactctacgaaggctgaaggatcgtaggtttatcgtcgtcgctggtcactgctcctgccttgtggaagcaagaatctgtgtatccatctgttgtacctataagtgtagtttaactgtaggctgagattgtgatctgttctggtgtttgtctcgtaaaggtgtgtagactctgatgtactcgttgttgtcatgtaatagcttatgtatcatgttctagtatcgtctgatgttggagtttgcatgcttgggctatgtgcatgtactggccgtgggatgcatcagctgcttgctgtaatgctgtttgaactccggttttgtatttaatttgttttgtaccgtggattggtgtccatgttcgtg

SEQ ID NO: 67552 - DNA, 2589 bp, Zea Mays
gagaaaccagatcacctgctcggggccttggggcgcttcttgggccgagccctaggtagcccggaactccgatctcggccaccaccaccctcgcctaagttcagctgctagtctatcaggatggccgtggaaactgccagtgacgctcaggtggcacaagataacgagatttcccccagcaatgaggcaatccaaggtgatgagttggctcatggcgaagagctgttccaaggtgatgatcttgttcaaggaaatgagttggttgtttctgaggtaacaacacctcctactactggaatcagacgtaggaggaagaagaagtccttggtatgggagcacttcactattgaagccgtcgcgggcggggccacaagggcctgctgcaatctctgcaagcaaacctttgcttacagctctggctcaaagattgctgggactagtcatctcaagaggcacatcaccttgggctcttgtcccaagataaaggaccaagatcagaggctggcactgccttcaactggtgggactgacaactatggcgaggcaacttcggagcggccaaccaagagacgctacagatataccggttatgcaaatgctgtttttgatcaggaccgcagttgctcatacttggcaaggatgatcattcagcatgactacccacttcacattgtccaacagcaggcattttccgtctttatcgaaagtctgcagccacgtttcaagattgtggatgttgatacgatggaaggagaggtgtatgctgtttatcagaaagaaaaggagaacctgcttcgatcattcaacactatgcctggaaggatcagtctcactataggactgtggacaactagtcagactctcgggtacgtttcacttgcagggcagtttatcgactctgagtggaaagtacgccgaagaatgcttaacttcatgatggtgtcatctcctcactcagagaatgcacttagtgaggcaattagcctgagcctctctgactggagtatgaaggacaagctattcaccatcacattggataatgaatgctcctcacacgatatctacagtgcaaatttgagggatcatctctccaacaagaacagtctcatgcttaagggacagctctttgttgtgaggtgctatgcccatatccttaatgctgttgcacaagatgtcattgcttcggttcatggtgttgtatacaatatccgtgaaagcataaagttcataaaagcttcttctgcccgtgaagagaagtttgccgagattgctctgcagctggagattcccagtaccaggaccctctgtctggatgttacaacccagtggaacaccacttatctgatgttgctagctgccttggattataagcaggctttcactgcactagaaacatgtgatgatagctacaatgaagctccatcatcagaggactggaggaaagttgaggccgcctgtaattacctgaaactgctctacgactccgcacatagcatcatggcagcagcaaacccaactgcaaacatctttttccacgaagcatggaaacttcagctagagctagcaaatggcacaggacatgaagaccccactttcagaagcatcgccaaggatatgcatgagaggtttgacaagtactggaaagattgcagcctcgtgttggccgttgccgttgtcatggatccacgtttcaagatgaagcttgttgagttcagttacacaaaaatttatggggctgaagcagcaaagcatgttaaggtggttaatgatgctgtacatgagctgtacgaggagtatgtggctcatccactcccactgaccccagcctatgtggagcaaggtgaaggggggaataatggagcagcaaatgcgaatagcagtcaagggcctcctgcttccgctggcgatgggcttctagacttcgatatgtacctttctgagatccagagtagccagccctcgaaacctgagctggaacagtacctggatgagtccctcaccccacgtacccaggagtttgatatcctgaactggtggaagctaaacagagtgaagtttccaaccctctctagaatggcctgtgatatcttggccattccgatgtccatggtaagcagtggcagctccatattcactgctggaacaggaagccgcatgctcgatgactacagaagctctctccgacctgagacggtggaagcacttgtctgtgcaaaagactggctgcagtactctacgaaggctgaaggatcgtaggtttatcgtcgtcgctggtcactgctcctgccttgtggaagcaagaatctgtgtatccatctgttgtacctataagtgtagtttaactgtaggctgagattgtgatctgttctggtgtttgtctcgtaaaggtgtgtagactctgatgtactcgttgttgtcatgtaatagcttatgtatcatgttctagtatcgtctgatgttggagtttgcatgcttgggctatgtgcatgtactggccgtgggatgcatcagctgcttgctgtaatgctgtttgaactccggttttgtatttaatttgttttgtaccgtggattggtgtccatgttcgtg

SEQ ID NO: 67553 - DNA, 2259 bp, Zea Mays
gaattgaagtgctaaagtttagtttcaattatcaccattagctctcatgtttagattataaatggctaaaagtagctaaaaaatagctgctaaagtttatctcgcgagattggaacagggcctaactattagttttagtgtattcaaacaccccctgagagtcgtaatctggcaaggatgaaaataacgtgaacaaattctaccaactacgctgtgcttatcgcctctggcggcggcgagttcgctcacgtcccggcgacccctcgccggtggccacgggccgtgacactccggcatgccgcgcgccccacgccggcagtccgacgaggcgcgccgtggcgcctacaagccgcgcgtcgacttcagccgctcgcgccgccgccgcgaggacggcctcctcgccctccgccgcctcaaccgcgacacgggactcttcaagcgccgccgcgacgagcccgctcccgccgtccctgcctccgatctgactcctacacgcgccgaagcagccccattcgcaggaatcacccgtccggcattcactccctcctcaccgcccgacgtagcggctccccgggatgctgctgagtcagagcttgaaggcctgtcagagctggtcgacaaactatgttcagatgacaccaccagtcagctcgaagccacaatccagttcaggaaacttctttcagatgaactcaactgtgataaaaatcatccgagcggatgtcctgcccagatttgccgagtttctttcaagacatgggcttccccagctccaaatggaggcagcctgggttcttaccaacatagctgcatctgattatacactgctggttgcagaatgcggtgctgttccaaggttggtggaactattaggatcactaaatgcaaacatcaggcatcaggctatctggtgtcttgggaatatagctgcagacttacctagctgcagaggcattctcttcgatcatggtgctcttacacctttactttctcaatttagagaaggcatgaagattccagttctgagaactgctatgtgggcactgtcaaatctttgttttggaaaattgccagccgaagtgcaagtgaaaccaatactagaaattatcagccagcttattcactctgctgacgagaagatactggcagatgcatgctggactgtttactacatatgtggcgataaaggtgatgctgtccaagatgtattagatgctggggtctgccctcaacttgtaaatcttttgatgcatgcatcagctaatgttcttctccctgtcattatggcactcgcaagaatttctgcgggagatgataagcaagttgaggtcttaatagagaatgacattctcaattgcttaggacagttggtagcacgaaattacccaaagaacatcaagaaacaagcgtgtctaattgtttctaatatcgctgctggtagcaaggatcagattcaggctgtaatcgatgcagacattataacctctctcattgtcttgctaagaacgtcagagccggatgttaaaaaggaggctgcttgggctatatcaactgctgcgtccggtggttcaagtgatcaaattcagtatttggtcagccggggatgtttagagcccctctgcagcgtcctcacccacaacgatcctgaccttgtatacacgtgtcttgaaggtcttgagaacatactccacgcaggtgaggcggggaagaagggcgaggaatcagggacgaacccatacgccgagtttattctagagtgcggaggtctggagaaactggaggatctgcaggacgtggacagcgacaggatctacgagctagccatgaagctgctacagagctactgggaggaggaagtaagcgagagtgatgatccgaacatcccaggttcgaatgactcgtcagatactgtggaagcaacgtccgaagatgctgctgctgctgtgcagccaccaccagtaccgccgccgccgtccgccgcagatgaagccgagtgatggtagatgttgtattgtagattgtatttcaggagaggaaagcctggttccttttcttagtggcactggcatattgtatgatacttactatgatcaggtcgatgtagagaggaacgtgtgaaggtgtggtagccgttatgtgcagaattttcgcatcacgtttctgtaggcgacattggagcattttgaatggaggatttgggccaagagaaaaagaggtatgggggttatttggcgcgtgctgctgaaaggttaaagattg

SEQ ID NO: 67554 - DNA, 2399 bp, Zea Mays
gaattgaagtgctaaagtttagtttcaattatcaccattagctctcatgtttagattataaatggctaaaagtagctaaaaaatagctgctaaagtttatctcgcgagattggaacagggcctaactattagttttagtgtattcaaacaccccctgagagtcgtaatctggcaaggatgaaaataacgtgaacaaattctaccaactacgctgtgcttatcgcctctggcggcggcgagttcgctcacgtcccggcgacccctcgccggtggccacgggccgtgacactccggcatgccgcgcgccccacgccggcagtccgacgaggcgcgccgtggcgcctacaagccgcgcgtcgacttcagccgctcgcgccgccgccgcgaggacggcctcctcgccctccgccgcctcaaccgcgacacgggactcttcaagcgccgccgcgacgagcccgctcccgccgtccctgcctccgatctgactcctacacgcgccgaagcagccccattcgcaggaatcacccgtccggcattcactccctcctcaccgcccgacgtagcggctccccgggatgctgctgagtcagagttagcttgaaggcctgtcagagctggtcgacaaactatgttcagatgacaccaccagtcagctcgaagccacaatccagttcaggaaacttctttcagatgaactcaactgtgataaaaatcatccgagcggatgtcctgcccagatttgccgagtttctttcaagacatgggcttccccagctccaaatggaggcagcctgggttcttaccaacatagctgcatctgattatacactgctggttgcagaatgcggtgctgttccaaggttggtggaactattaggatcactaaatgcaaacatcaggcatcaggctatctggtgtcttgggaatatagctgcagacttacctagctgcagaggcattctcttcgatcatggtgctcttacacctttactttctcaatttagagaaggcatgaagattccagttctgagaactgctatgtgggcactgtcaaatctttgttttggaaaattgccagccgaagtgcaagtgaaaccaatactagaaattatcagccagcttattcactctgctgacgagaagatactggcagatgcatgctggactgtttactacatatgtggcgataaaggtgatgctgtccaagatgtattagatgctggggtctgccctcaacttgtaaatcttttgatgcatgcatcagctaatgttcttctccctgtcattatggcactcgcaagaatttctgcgggagatgataagcaagttgaggtagctttatagctgtgtattctttgtgtcctcaccctttattttactggtgcagattcccagtgatctgcagtcactagaacgtagaatgtaatggccgaagaaccgagtatggactatggagatgctgcttgttgtcttaatagagaatgacattctcaattgcttaggacagttggtagcacgaaattacccaaagaacatcaagaaacaagcgtgtctaattgtttctaatatcgctgctggtagcaaggatcagattcaggctgtaatcgatgcagacattataacctctctcattgtcttgctaagaacgtcagagccggatgttaaaaaggaggctgcttgggctatatcaactgctgcgtccggtggttcaagtgatcaaattcagtatttggtcagccggggatgtttagagcccctctgcagcgtcctcacccacaacgatcctgaccttgtatacacgtgtcttgaaggtcttgagaacatactccacgcaggtgaggcggggaagaagggcgaggaatcagggacgaacccatacgccgagtttattctagagtgcggaggtctggagaaactggaggatctgcaggacgtggacagcgacaggatctacgagctagccatgaagctgctacagagctactgggaggaggaagtaagcgagagtgatgatccgaacatcccaggttcgaatgactcgtcagatactgtggaagcaacgtccgaagatgctgctgctgctgtgcagccaccaccagtaccgccgccgccgtccgccgcagatgaagccgagtgatggtagatgttgtattgtagattgtatttcaggagaggaaagcctggttccttttcttagtggcactggcatattgtatgatacttactatgatcaggtcgatgtagagaggaacgtgtgaaggtgtggtagccgttatgtgcagaattttcgcatcacgtttctgtaggcgacattggagcattttgaatggaggatttgggccaagagaaaaagaggtatgggggttatttggcgcgtgctgctgaaaggttaaagattg

SEQ ID NO: 67555 - DNA, 2404 bp, Zea Mays
gaattgaagtgctaaagtttagtttcaattatcaccattagctctcatgtttagattataaatggctaaaagtagctaaaaaatagctgctaaagtttatctcgcgagattggaacagggcctaactattagttttagtgtattcaaacaccccctgagagtcgtaatctggcaaggatgaaaataacgtgaacaaattctaccaactacgctgtgcttatcgcctctggcggcggcgagttcgctcacgtcccggcgacccctcgccggtggccacgggccgtgacactccggcatgccgcgcgccccacgccggcagtccgacgaggcgcgccgtggcgcctacaagccgcgcgtcgacttcagccgctcgcgccgccgccgcgaggacggcctcctcgccctccgccgcctcaaccgcgacacgggactcttcaagcgccgccgcgacgagcccgctcccgccgtccctgcctccgatctgactcctacacgcgccgaagcagccccattcgcaggaatcacccgtccggcattcactccctcctcaccgcccgacgtagcggctccccgggatgctgctgagtcagagttagcttgaaggcctgtcagagctggtcgacaaactatgttcagatgacaccaccagtcagctcgaagccacaatccagttcaggaaacttctttcagatgagaagaactcaactgtgataaaaatcatccgagcggatgtcctgcccagatttgccgagtttctttcaagacatgggcttccccagctccaaatggaggcagcctgggttcttaccaacatagctgcatctgattatacactgctggttgcagaatgcggtgctgttccaaggttggtggaactattaggatcactaaatgcaaacatcaggcatcaggctatctggtgtcttgggaatatagctgcagacttacctagctgcagaggcattctcttcgatcatggtgctcttacacctttactttctcaatttagagaaggcatgaagattccagttctgagaactgctatgtgggcactgtcaaatctttgttttggaaaattgccagccgaagtgcaagtgaaaccaatactagaaattatcagccagcttattcactctgctgacgagaagatactggcagatgcatgctggactgtttactacatatgtggcgataaaggtgatgctgtccaagatgtattagatgctggggtctgccctcaacttgtaaatcttttgatgcatgcatcagctaatgttcttctccctgtcattatggcactcgcaagaatttctgcgggagatgataagcaagttgaggtagctttatagctgtgtattctttgtgtcctcaccctttattttactggtgcagattcccagtgatctgcagtcactagaacgtagaatgtaatggccgaagaaccgagtatggactatggagatgctgcttgttgtcttaatagagaatgacattctcaattgcttaggacagttggtagcacgaaattacccaaagaacatcaagaaacaagcgtgtctaattgtttctaatatcgctgctggtagcaaggatcagattcaggctgtaatcgatgcagacattataacctctctcattgtcttgctaagaacgtcagagccggatgttaaaaaggaggctgcttgggctatatcaactgctgcgtccggtggttcaagtgatcaaattcagtatttggtcagccggggatgtttagagcccctctgcagcgtcctcacccacaacgatcctgaccttgtatacacgtgtcttgaaggtcttgagaacatactccacgcaggtgaggcggggaagaagggcgaggaatcagggacgaacccatacgccgagtttattctagagtgcggaggtctggagaaactggaggatctgcaggacgtggacagcgacaggatctacgagctagccatgaagctgctacagagctactgggaggaggaagtaagcgagagtgatgatccgaacatcccaggttcgaatgactcgtcagatactgtggaagcaacgtccgaagatgctgctgctgctgtgcagccaccaccagtaccgccgccgccgtccgccgcagatgaagccgagtgatggtagatgttgtattgtagattgtatttcaggagaggaaagcctggttccttttcttagtggcactggcatattgtatgatacttactatgatcaggtcgatgtagagaggaacgtgtgaaggtgtggtagccgttatgtgcagaattttcgcatcacgtttctgtaggcgacattggagcattttgaatggaggatttgggccaagagaaaaagaggtatgggggttatttggcgcgtgctgctgaaaggttaaagattg

SEQ ID NO: 67556 - DNA, 2697 bp, Zea Mays
gaattgaagtgctaaagtttagtttcaattatcaccattagctctcatgtttagattataaatggctaaaagtagctaaaaaatagctgctaaagtttatctcgcgagattggaacagggcctaactattagttttagtgtattcaaacaccccctgagagtcgtaatctggcaaggatgaaaataacgtgaacaaattctaccaactacgctgtgcttatcgcctctggcggcggcgagttcgctcacgtcccggcgacccctcgccggtggccacgggccgtgacactccggcatgccgcgcgccccacgccggcagtccgacgaggcgcgccgtggcgcctacaagccgcgcgtcgacttcagccgctcgcgccgccgccgcgaggacggcctcctcgccctccgccgcctcaaccgcgacacgggactcttcaagcgccgccgcgacgagcccgctcccgccgtccctgcctccgatctgactcctacacgcgccgaagcagccccattcgcaggaatcacccgtccggcattcactccctcctcaccgcccgacgtagcggctccccgggatgctgctgagtcagagttagcttgaaggcctgtcagagctggtcgacaaactatgttcagatgacaccaccagtcagctcgaagccacaatccagttcaggaaacttctttcagatgagaagaactcaactgtgataaaaatcatccgagcggatgtcctgcccagatttgccgagtttctttcaagacatgggcttccccagctccaaatggaggcagcctgggttcttaccaacatagctgcatctgattatacactgctggttgcagaatgcggtgctgttccaaggttggtggaactattaggatcactaaatgcaaacatcaggcatcaggctatctggtgtcttgggaatatagctgcagacttacctagctgcagaggcattctcttcgatcatggtgctcttacacctttactttctcaatttagagaaggcatgaagattccagttctgagaactgctatgtgggcactgtcaaatctttgttttggaaaattgccagccgaagtgcaagtgaaaccaatactagaaattatcagccagcttattcactctgctgacgagaagatactggcagatgcatgctggactgtttactacatatgtggcgataaaggtgatgctgtccaagatgtattagatgctggggtctgccctcaacttgtaaatcttttgatgcatgcatcagctaatgttcttctccctgtcattatggcactcgcaagaatttctgcgggagatgataagcaagttgaggtagctttatagctgtgtattctttgtgtcctcaccctttattttactggtgcagattcccagtgatctgcagtcactagaacgtagaatgtaatggccgaagaaccgagtatggactatggagatgctgcttgttgtcagtaataatgctctgatctttttaagacccaaaaccatatatctcggcctgcagtaacattttatcgccacaattgcagctattattacactgctgaagttctatatacatgagtgttttacagtgaaagttctcacttttcagttgctgttatagggaaacttaatataaaagttttcatgtagctcaataagtttttataccaagtcaacacatagcgaattagttgtacattctgctttgtcccccccaccccaacctttgaattacaacacaacaatattttgcaggtcttaatagagaatgacattctcaattgcttaggacagttggtagcacgaaattacccaaagaacatcaagaaacaagcgtgtctaattgtttctaatatcgctgctggtagcaaggatcagattcaggctgtaatcgatgcagacattataacctctctcattgtcttgctaagaacgtcagagccggatgttaaaaaggaggctgcttgggctatatcaactgctgcgtccggtggttcaagtgatcaaattcagtatttggtcagccggggatgtttagagcccctctgcagcgtcctcacccacaacgatcctgaccttgtatacacgtgtcttgaaggtcttgagaacatactccacgcaggtgaggcggggaagaagggcgaggaatcagggacgaacccatacgccgagtttattctagagtgcggaggtctggagaaactggaggatctgcaggacgtggacagcgacaggatctacgagctagccatgaagctgctacagagctactgggaggaggaagtaagcgagagtgatgatccgaacatcccaggttcgaatgactcgtcagatactgtggaagcaacgtccgaagatgctgctgctgctgtgcagccaccaccagtaccgccgccgccgtccgccgcagatgaagccgagtgatggtagatgttgtattgtagattgtatttcaggagaggaaagcctggttccttttcttagtggcactggcatattgtatgatacttactatgatcaggtcgatgtagagaggaacgtgtgaaggtgtggtagccgttatgtgcagaattttcgcatcacgtttctgtaggcgacattggagcattttgaatggaggatttgggccaagagaaaaagaggtatgggggttatttggcgcgtgctgctgaaaggttaaagattg

SEQ ID NO: 67557 - DNA, 2923 bp, Zea Mays
gaattgaagtgctaaagtttagtttcaattatcaccattagctctcatgtttagattataaatggctaaaagtagctaaaaaatagctgctaaagtttatctcgcgagattggaacagggcctaactattagttttagtgtattcaaacaccccctgagagtcgtaatctggcaaggatgaaaataacgtgaacaaattctaccaactacgctgtgcttatcgcctctggcggcggcgagttcgctcacgtcccggcgacccctcgccggtggccacgggccgtgacactccggcatgccgcgcgccccacgccggcagtccgacgaggcgcgccgtggcgcctacaagccgcgcgtcgacttcagccgctcgcgccgccgccgcgaggacggcctcctcgccctccgccgcctcaaccgcgacacgggactcttcaagcgccgccgcgacgagcccgctcccgccgtccctgcctccgatctgactcctacacgcgccgaagcagccccattcgcaggaatcacccgtccggcattcactccctcctcaccgcccgacgtagcggctccccgggatgctgctgagtcagagcttgaaggcctgtcagagctggtcgacaaactatgttcagatgacaccaccagtcagctcgaagccacaatccagttcaggaaacttctttcagatgagaagaactcaactgtgataaaaatcatccgagcggatgtcctgcccagatttgccgagtttctttcaagacatgggcttccccagctccaaatggaggcagcctgggttcttaccaacatagctgcatctgattatacactgctggttgcagaatgcggtgctgttccaaggttggtggaactattaggatcactaaatgcaaacatcaggcatcaggctatctggtgtcttgggaatatagctgcagacttacctagctgcagaggcattctcttcgatcatggtgctcttacacctttactttctcaatttagagaaggcatgaagattccagttctgagaactgctatgtgggcactgtcaaatctttgttttggaaaattgccagccgaagtgcaagtgaaaccaatactagaaattatcagccagcttattcactctgctgacgagaagatactggcagatgcatgctggactgtttactacatatgtggcgataaaggtgatgctgtccaagatgtattagatgctggggtctgccctcaacttgtaaatcttttgatgcatgcatcagctaatgttcttctccctgtcattatggcactcgcaagaatttctgcgggagatgataagcaagttgaggtagctttatagctgtgtattctttgtgtcctcaccctttattttactggtgcagattcccagtgatctgcagtcactagaacgtagaatgtaatggccgaagaaccgagtatggactatggagatgctgcttgttgtcagtaataatgctctgatctttttaagacccaaaaccatatatctcggcctgcagtaacattttatcgccacaattgcagctattattacactgctgaagttctatatacattttttttgcattgtcagcctttttcataccttccaagttcatatcatgggccttgtgtattgtccttgatccagtgaattcttggaggggctcagcaagctttcgctgcaaaacactcgtgtgtctacaattgctgttaaaggcagacctagtgctgggggctccccacatgagtgggatctcagagcctctggcactgtgtctgcgtttaataacaattatagatacatgagtgttttacagtgaaagttctcacttttcagttgctgttatagggaaacttaatataaaagttttcatgtagctcaataagtttttataccaagtcaacacatagcgaattagttgtacattctgctttgtcccccccaccccaacctttgaattacaacacaacaatattttgcaggtcttaatagagaatgacattctcaattgcttaggacagttggtagcacgaaattacccaaagaacatcaagaaacaagcgtgtctaattgtttctaatatcgctgctggtagcaaggatcagattcaggctgtaatcgatgcagacattataacctctctcattgtcttgctaagaacgtcagagccggatgttaaaaaggaggctgcttgggctatatcaactgctgcgtccggtggttcaagtgatcaaattcagtatttggtcagccggggatgtttagagcccctctgcagcgtcctcacccacaacgatcctgaccttgtatacacgtgtcttgaaggtcttgagaacatactccacgcaggtgaggcggggaagaagggcgaggaatcagggacgaacccatacgccgagtttattctagagtgcggaggtctggagaaactggaggatctgcaggacgtggacagcgacaggatctacgagctagccatgaagctgctacagagctactgggaggaggaagtaagcgagagtgatgatccgaacatcccaggttcgaatgactcgtcagatactgtggaagcaacgtccgaagatgctgctgctgctgtgcagccaccaccagtaccgccgccgccgtccgccgcagatgaagccgagtgatggtagatgttgtattgtagattgtatttcaggagaggaaagcctggttccttttcttagtggcactggcatattgtatgatacttactatgatcaggtcgatgtagagaggaacgtgtgaaggtgtggtagccgttatgtgcagaattttcgcatcacgtttctgtaggcgacattggagcattttgaatggaggatttgggccaagagaaaaagaggtatgggggttatttggcgcgtgctgctgaaaggttaaagattg

SEQ ID NO: 67558 - DNA, 2395 bp, Zea Mays
gaattgaagtgctaaagtttagtttcaattatcaccattagctctcatgtttagattataaatggctaaaagtagctaaaaaatagctgctaaagtttatctcgcgagattggaacagggcctaactattagttttagtgtattcaaacaccccctgagagtcgtaatctggcaaggatgaaaataacgtgaacaaattctaccaactacgctgtgcttatcgcctctggcggcggcgagttcgctcacgtcccggcgacccctcgccggtggccacgggccgtgacactccggcatgccgcgcgccccacgccggcagtccgacgaggcgcgccgtggcgcctacaagccgcgcgtcgacttcagccgctcgcgccgccgccgcgaggacggcctcctcgccctccgccgcctcaaccgcgacacgggactcttcaagcgccgccgcgacgagcccgctcccgccgtccctgcctccgatctgactcctacacgcgccgaagcagccccattcgcaggaatcacccgtccggcattcactccctcctcaccgcccgacgtagcggctccccgggatgctgctgagtcagagcttgaaggcctgtcagagctggtcgacaaactatgttcagatgacaccaccagtcagctcgaagccacaatccagttcaggaaacttctttcagatgaactcaactgtgataaaaatcatccgagcggatgtcctgcccagatttgccgagtttctttcaagacatgggcttccccagctccaaatggaggcagcctgggttcttaccaacatagctgcatctgattatacactgctggttgcagaatgcggtgctgttccaaggttggtggaactattaggatcactaaatgcaaacatcaggcatcaggctatctggtgtcttgggaatatagctgcagacttacctagctgcagaggcattctcttcgatcatggtgctcttacacctttactttctcaatttagagaaggcatgaagattccagttctgagaactgctatgtgggcactgtcaaatctttgttttggaaaattgccagccgaagtgcaagtgaaaccaatactagaaattatcagccagcttattcactctgctgacgagaagatactggcagatgcatgctggactgtttactacatatgtggcgataaaggtgatgctgtccaagatgtattagatgctggggtctgccctcaacttgtaaatcttttgatgcatgcatcagctaatgttcttctccctgtcattatggcactcgcaagaatttctgcgggagatgataagcaagttgaggtagctttatagctgtgtattctttgtgtcctcaccctttattttactggtgcagattcccagtgatctgcagtcactagaacgtagaatgtaatggccgaagaaccgagtatggactatggagatgctgcttgttgtcttaatagagaatgacattctcaattgcttaggacagttggtagcacgaaattacccaaagaacatcaagaaacaagcgtgtctaattgtttctaatatcgctgctggtagcaaggatcagattcaggctgtaatcgatgcagacattataacctctctcattgtcttgctaagaacgtcagagccggatgttaaaaaggaggctgcttgggctatatcaactgctgcgtccggtggttcaagtgatcaaattcagtatttggtcagccggggatgtttagagcccctctgcagcgtcctcacccacaacgatcctgaccttgtatacacgtgtcttgaaggtcttgagaacatactccacgcaggtgaggcggggaagaagggcgaggaatcagggacgaacccatacgccgagtttattctagagtgcggaggtctggagaaactggaggatctgcaggacgtggacagcgacaggatctacgagctagccatgaagctgctacagagctactgggaggaggaagtaagcgagagtgatgatccgaacatcccaggttcgaatgactcgtcagatactgtggaagcaacgtccgaagatgctgctgctgctgtgcagccaccaccagtaccgccgccgccgtccgccgcagatgaagccgagtgatggtagatgttgtattgtagattgtatttcaggagaggaaagcctggttccttttcttagtggcactggcatattgtatgatacttactatgatcaggtcgatgtagagaggaacgtgtgaaggtgtggtagccgttatgtgcagaattttcgcatcacgtttctgtaggcgacattggagcattttgaatggaggatttgggccaagagaaaaagaggtatgggggttatttggcgcgtgctgctgaaaggttaaagattg

SEQ ID NO: 67559 - DNA, 2900 bp, Zea Mays
gaattgaagtgctaaagtttagtttcaattatcaccattagctctcatgtttagattataaatggctaaaagtagctaaaaaatagctgctaaagtttatctcgcgagattggaacagggcctaactattagttttagtgtattcaaacaccccctgagagtcgtaatctggcaaggatgaaaataacgtgaacaaattctaccaactacgctgtgcttatcgcctctggcggcggcgagttcgctcacgtcccggcgacccctcgccggtggccacgggccgtgacactccggcatgccgcgcgccccacgccggcagtccgacgaggcgcgccgtggcgcctacaagccgcgcgtcgacttcagccgctcgcgccgccgccgcgaggacggcctcctcgccctccgccgcctcaaccgcgacacgggactcttcaagcgccgccgcgacgagcccgctcccgccgtccctgcctccgatctgactcctacacgcgccgaagcagccccattcgcaggaatcacccgtccggcattcactccctcctcaccgcccgacgtagcggctccccgggatgctgctgagtcagagcttgaaggcctgtcagagctggtcgacaaactatgttcagatgacaccaccagtcagctcgaagccacaatccaagaagaactcaactgtgataaaaatcatccgagcggatgtcctgcccagatttgccgagtttctttcaagacatgggcttccccagctccaaatggaggcagcctgggttcttaccaacatagctgcatctgattatacactgctggttgcagaatgcggtgctgttccaaggttggtggaactattaggatcactaaatgcaaacatcaggcatcaggctatctggtgtcttgggaatatagctgcagacttacctagctgcagaggcattctcttcgatcatggtgctcttacacctttactttctcaatttagagaaggcatgaagattccagttctgagaactgctatgtgggcactgtcaaatctttgttttggaaaattgccagccgaagtgcaagtgaaaccaatactagaaattatcagccagcttattcactctgctgacgagaagatactggcagatgcatgctggactgtttactacatatgtggcgataaaggtgatgctgtccaagatgtattagatgctggggtctgccctcaacttgtaaatcttttgatgcatgcatcagctaatgttcttctccctgtcattatggcactcgcaagaatttctgcgggagatgataagcaagttgaggtagctttatagctgtgtattctttgtgtcctcaccctttattttactggtgcagattcccagtgatctgcagtcactagaacgtagaatgtaatggccgaagaaccgagtatggactatggagatgctgcttgttgtcagtaataatgctctgatctttttaagacccaaaaccatatatctcggcctgcagtaacattttatcgccacaattgcagctattattacactgctgaagttctatatacattttttttgcattgtcagcctttttcataccttccaagttcatatcatgggccttgtgtattgtccttgatccagtgaattcttggaggggctcagcaagctttcgctgcaaaacactcgtgtgtctacaattgctgttaaaggcagacctagtgctgggggctccccacatgagtgggatctcagagcctctggcactgtgtctgcgtttaataacaattatagatacatgagtgttttacagtgaaagttctcacttttcagttgctgttatagggaaacttaatataaaagttttcatgtagctcaataagtttttataccaagtcaacacatagcgaattagttgtacattctgctttgtcccccccaccccaacctttgaattacaacacaacaatattttgcaggtcttaatagagaatgacattctcaattgcttaggacagttggtagcacgaaattacccaaagaacatcaagaaacaagcgtgtctaattgtttctaatatcgctgctggtagcaaggatcagattcaggctgtaatcgatgcagacattataacctctctcattgtcttgctaagaacgtcagagccggatgttaaaaaggaggctgcttgggctatatcaactgctgcgtccggtggttcaagtgatcaaattcagtatttggtcagccggggatgtttagagcccctctgcagcgtcctcacccacaacgatcctgaccttgtatacacgtgtcttgaaggtcttgagaacatactccacgcaggtgaggcggggaagaagggcgaggaatcagggacgaacccatacgccgagtttattctagagtgcggaggtctggagaaactggaggatctgcaggacgtggacagcgacaggatctacgagctagccatgaagctgctacagagctactgggaggaggaagtaagcgagagtgatgatccgaacatcccaggttcgaatgactcgtcagatactgtggaagcaacgtccgaagatgctgctgctgctgtgcagccaccaccagtaccgccgccgccgtccgccgcagatgaagccgagtgatggtagatgttgtattgtagattgtatttcaggagaggaaagcctggttccttttcttagtggcactggcatattgtatgatacttactatgatcaggtcgatgtagagaggaacgtgtgaaggtgtggtagccgttatgtgcagaattttcgcatcacgtttctgtaggcgacattggagcattttgaatggaggatttgggccaagagaaaaagaggtatgggggttatttggcgcgtgctgctgaaaggttaaagattg

SEQ ID NO: 67560 - DNA, 2400 bp, Zea Mays
gaattgaagtgctaaagtttagtttcaattatcaccattagctctcatgtttagattataaatggctaaaagtagctaaaaaatagctgctaaagtttatctcgcgagattggaacagggcctaactattagttttagtgtattcaaacaccccctgagagtcgtaatctggcaaggatgaaaataacgtgaacaaattctaccaactacgctgtgcttatcgcctctggcggcggcgagttcgctcacgtcccggcgacccctcgccggtggccacgggccgtgacactccggcatgccgcgcgccccacgccggcagtccgacgaggcgcgccgtggcgcctacaagccgcgcgtcgacttcagccgctcgcgccgccgccgcgaggacggcctcctcgccctccgccgcctcaaccgcgacacgggactcttcaagcgccgccgcgacgagcccgctcccgccgtccctgcctccgatctgactcctacacgcgccgaagcagccccattcgcaggaatcacccgtccggcattcactccctcctcaccgcccgacgtagcggctccccgggatgctgctgagtcagagttagcttgaaggcctgtcagagctggtcgacaaactatgttcagatgacaccaccagtcagctcgaagccacaatccagttcaggaaacttctttcagatgaactcaactgtgataaaaatcatccgagcggatgtcctgcccagatttgccgagtttctttcaagacatgggcttccccagctccaaatggaggcagcctgggttcttaccaacatagctgcatctgattatacactgctggttgcagaatgcggtgctgttccaaggttggtggaactattaggatcactaaatgcaaacatcaggcatcaggctatctggtgtcttgggaatatagctgcagacttacctagctgcagaggcattctcttcgatcatggtgctcttacacctttactttctcaatttagagaaggcatgaagattccagttctgagaactgctatgtgggcactgtcaaatctttgttttggaaaattgccagccgaagtgcaagtgaaaccaatactagaaattatcagccagcttattcactctgctgacgagaagatactggcagatgcatgctggactgtttactacatatgtggcgataaaggtgatgctgtccaagatgtattagatgctggggtctgccctcaacttgtaaatcttttgatgcatgcatcagctaatgttcttctccctgtcattatggcactcgcaagaatttctgcgggagatgataagcaagttgaggtagctttatagctgtgtattctttgtgtcctcaccctttattttactggtgcagattcccagtgatctgcagtcactagaacgtagaatgtaatggccgaagaaccgagtatggactatggagatgctgcttgttggtcttaatagagaatgacattctcaattgcttaggacagttggtagcacgaaattacccaaagaacatcaagaaacaagcgtgtctaattgtttctaatatcgctgctggtagcaaggatcagattcaggctgtaatcgatgcagacattataacctctctcattgtcttgctaagaacgtcagagccggatgttaaaaaggaggctgcttgggctatatcaactgctgcgtccggtggttcaagtgatcaaattcagtatttggtcagccggggatgtttagagcccctctgcagcgtcctcacccacaacgatcctgaccttgtatacacgtgtcttgaaggtcttgagaacatactccacgcaggtgaggcggggaagaagggcgaggaatcagggacgaacccatacgccgagtttattctagagtgcggaggtctggagaaactggaggatctgcaggacgtggacagcgacaggatctacgagctagccatgaagctgctacagagctactgggaggaggaagtaagcgagagtgatgatccgaacatcccaggttcgaatgactcgtcagatactgtggaagcaacgtccgaagatgctgctgctgctgtgcagccaccaccagtaccgccgccgccgtccgccgcagatgaagccgagtgatggtagatgttgtattgtagattgtatttcaggagaggaaagcctggttccttttcttagtggcactggcatattgtatgatacttactatgatcaggtcgatgtagagaggaacgtgtgaaggtgtggtagccgttatgtgcagaattttcgcatcacgtttctgtaggcgacattggagcattttgaatggaggatttgggccaagagaaaaagaggtatgggggttatttggcgcgtgctgctgaaaggttaaagattg

SEQ ID NO: 67561 - DNA, 2922 bp, Zea Mays
gaattgaagtgctaaagtttagtttcaattatcaccattagctctcatgtttagattataaatggctaaaagtagctaaaaaatagctgctaaagtttatctcgcgagattggaacagggcctaactattagttttagtgtattcaaacaccccctgagagtcgtaatctggcaaggatgaaaataacgtgaacaaattctaccaactacgctgtgcttatcgcctctggcggcggcgagttcgctcacgtcccggcgacccctcgccggtggccacgggccgtgacactccggcatgccgcgcgccccacgccggcagtccgacgaggcgcgccgtggcgcctacaagccgcgcgtcgacttcagccgctcgcgccgccgccgcgaggacggcctcctcgccctccgccgcctcaaccgcgacacgggactcttcaagcgccgccgcgacgagcccgctcccgccgtccctgcctccgatctgactcctacacgcgccgaagcagccccattcgcaggaatcacccgtccggcattcactccctcctcaccgcccgacgtagcggctccccgggatgctgctgagtcagagttagcttgaaggcctgtcagagctggtcgacaaactatgttcagatgacaccaccagtcagctcgaagccacaatccagttcaggaaacttctttcagatgaactcaactgtgataaaaatcatccgagcggatgtcctgcccagatttgccgagtttctttcaagacatgggcttccccagctccaaatggaggcagcctgggttcttaccaacatagctgcatctgattatacactgctggttgcagaatgcggtgctgttccaaggttggtggaactattaggatcactaaatgcaaacatcaggcatcaggctatctggtgtcttgggaatatagctgcagacttacctagctgcagaggcattctcttcgatcatggtgctcttacacctttactttctcaatttagagaaggcatgaagattccagttctgagaactgctatgtgggcactgtcaaatctttgttttggaaaattgccagccgaagtgcaagtgaaaccaatactagaaattatcagccagcttattcactctgctgacgagaagatactggcagatgcatgctggactgtttactacatatgtggcgataaaggtgatgctgtccaagatgtattagatgctggggtctgccctcaacttgtaaatcttttgatgcatgcatcagctaatgttcttctccctgtcattatggcactcgcaagaatttctgcgggagatgataagcaagttgaggtagctttatagctgtgtattctttgtgtcctcaccctttattttactggtgcagattcccagtgatctgcagtcactagaacgtagaatgtaatggccgaagaaccgagtatggactatggagatgctgcttgttgtcagtaataatgctctgatctttttaagacccaaaaccatatatctcggcctgcagtaacattttatcgccacaattgcagctattattacactgctgaagttctatatacattttttttgcattgtcagcctttttcataccttccaagttcatatcatgggccttgtgtattgtccttgatccagtgaattcttggaggggctcagcaagctttcgctgcaaaacactcgtgtgtctacaattgctgttaaaggcagacctagtgctgggggctccccacatgagtgggatctcagagcctctggcactgtgtctgcgtttaataacaattatagatacatgagtgttttacagtgaaagttctcacttttcagttgctgttatagggaaacttaatataaaagttttcatgtagctcaataagtttttataccaagtcaacacatagcgaattagttgtacattctgctttgtcccccccaccccaacctttgaattacaacacaacaatattttgcaggtcttaatagagaatgacattctcaattgcttaggacagttggtagcacgaaattacccaaagaacatcaagaaacaagcgtgtctaattgtttctaatatcgctgctggtagcaaggatcagattcaggctgtaatcgatgcagacattataacctctctcattgtcttgctaagaacgtcagagccggatgttaaaaaggaggctgcttgggctatatcaactgctgcgtccggtggttcaagtgatcaaattcagtatttggtcagccggggatgtttagagcccctctgcagcgtcctcacccacaacgatcctgaccttgtatacacgtgtcttgaaggtcttgagaacatactccacgcaggtgaggcggggaagaagggcgaggaatcagggacgaacccatacgccgagtttattctagagtgcggaggtctggagaaactggaggatctgcaggacgtggacagcgacaggatctacgagctagccatgaagctgctacagagctactgggaggaggaagtaagcgagagtgatgatccgaacatcccaggttcgaatgactcgtcagatactgtggaagcaacgtccgaagatgctgctgctgctgtgcagccaccaccagtaccgccgccgccgtccgccgcagatgaagccgagtgatggtagatgttgtattgtagattgtatttcaggagaggaaagcctggttccttttcttagtggcactggcatattgtatgatacttactatgatcaggtcgatgtagagaggaacgtgtgaaggtgtggtagccgttatgtgcagaattttcgcatcacgtttctgtaggcgacattggagcattttgaatggaggatttgggccaagagaaaaagaggtatgggggttatttggcgcgtgctgctgaaaggttaaagattg

SEQ ID NO: 67562 - DNA, 2927 bp, Zea Mays
gaattgaagtgctaaagtttagtttcaattatcaccattagctctcatgtttagattataaatggctaaaagtagctaaaaaatagctgctaaagtttatctcgcgagattggaacagggcctaactattagttttagtgtattcaaacaccccctgagagtcgtaatctggcaaggatgaaaataacgtgaacaaattctaccaactacgctgtgcttatcgcctctggcggcggcgagttcgctcacgtcccggcgacccctcgccggtggccacgggccgtgacactccggcatgccgcgcgccccacgccggcagtccgacgaggcgcgccgtggcgcctacaagccgcgcgtcgacttcagccgctcgcgccgccgccgcgaggacggcctcctcgccctccgccgcctcaaccgcgacacgggactcttcaagcgccgccgcgacgagcccgctcccgccgtccctgcctccgatctgactcctacacgcgccgaagcagccccattcgcaggaatcacccgtccggcattcactccctcctcaccgcccgacgtagcggctccccgggatgctgctgagtcagagttagcttgaaggcctgtcagagctggtcgacaaactatgttcagatgacaccaccagtcagctcgaagccacaatccagttcaggaaacttctttcagatgagaagaactcaactgtgataaaaatcatccgagcggatgtcctgcccagatttgccgagtttctttcaagacatgggcttccccagctccaaatggaggcagcctgggttcttaccaacatagctgcatctgattatacactgctggttgcagaatgcggtgctgttccaaggttggtggaactattaggatcactaaatgcaaacatcaggcatcaggctatctggtgtcttgggaatatagctgcagacttacctagctgcagaggcattctcttcgatcatggtgctcttacacctttactttctcaatttagagaaggcatgaagattccagttctgagaactgctatgtgggcactgtcaaatctttgttttggaaaattgccagccgaagtgcaagtgaaaccaatactagaaattatcagccagcttattcactctgctgacgagaagatactggcagatgcatgctggactgtttactacatatgtggcgataaaggtgatgctgtccaagatgtattagatgctggggtctgccctcaacttgtaaatcttttgatgcatgcatcagctaatgttcttctccctgtcattatggcactcgcaagaatttctgcgggagatgataagcaagttgaggtagctttatagctgtgtattctttgtgtcctcaccctttattttactggtgcagattcccagtgatctgcagtcactagaacgtagaatgtaatggccgaagaaccgagtatggactatggagatgctgcttgttgtcagtaataatgctctgatctttttaagacccaaaaccatatatctcggcctgcagtaacattttatcgccacaattgcagctattattacactgctgaagttctatatacattttttttgcattgtcagcctttttcataccttccaagttcatatcatgggccttgtgtattgtccttgatccagtgaattcttggaggggctcagcaagctttcgctgcaaaacactcgtgtgtctacaattgctgttaaaggcagacctagtgctgggggctccccacatgagtgggatctcagagcctctggcactgtgtctgcgtttaataacaattatagatacatgagtgttttacagtgaaagttctcacttttcagttgctgttatagggaaacttaatataaaagttttcatgtagctcaataagtttttataccaagtcaacacatagcgaattagttgtacattctgctttgtcccccccaccccaacctttgaattacaacacaacaatattttgcaggtcttaatagagaatgacattctcaattgcttaggacagttggtagcacgaaattacccaaagaacatcaagaaacaagcgtgtctaattgtttctaatatcgctgctggtagcaaggatcagattcaggctgtaatcgatgcagacattataacctctctcattgtcttgctaagaacgtcagagccggatgttaaaaaggaggctgcttgggctatatcaactgctgcgtccggtggttcaagtgatcaaattcagtatttggtcagccggggatgtttagagcccctctgcagcgtcctcacccacaacgatcctgaccttgtatacacgtgtcttgaaggtcttgagaacatactccacgcaggtgaggcggggaagaagggcgaggaatcagggacgaacccatacgccgagtttattctagagtgcggaggtctggagaaactggaggatctgcaggacgtggacagcgacaggatctacgagctagccatgaagctgctacagagctactgggaggaggaagtaagcgagagtgatgatccgaacatcccaggttcgaatgactcgtcagatactgtggaagcaacgtccgaagatgctgctgctgctgtgcagccaccaccagtaccgccgccgccgtccgccgcagatgaagccgagtgatggtagatgttgtattgtagattgtatttcaggagaggaaagcctggttccttttcttagtggcactggcatattgtatgatacttactatgatcaggtcgatgtagagaggaacgtgtgaaggtgtggtagccgttatgtgcagaattttcgcatcacgtttctgtaggcgacattggagcattttgaatggaggatttgggccaagagaaaaagaggtatgggggttatttggcgcgtgctgctgaaaggttaaagattg

SEQ ID NO: 67563 - DNA, 2918 bp, Zea Mays
gaattgaagtgctaaagtttagtttcaattatcaccattagctctcatgtttagattataaatggctaaaagtagctaaaaaatagctgctaaagtttatctcgcgagattggaacagggcctaactattagttttagtgtattcaaacaccccctgagagtcgtaatctggcaaggatgaaaataacgtgaacaaattctaccaactacgctgtgcttatcgcctctggcggcggcgagttcgctcacgtcccggcgacccctcgccggtggccacgggccgtgacactccggcatgccgcgcgccccacgccggcagtccgacgaggcgcgccgtggcgcctacaagccgcgcgtcgacttcagccgctcgcgccgccgccgcgaggacggcctcctcgccctccgccgcctcaaccgcgacacgggactcttcaagcgccgccgcgacgagcccgctcccgccgtccctgcctccgatctgactcctacacgcgccgaagcagccccattcgcaggaatcacccgtccggcattcactccctcctcaccgcccgacgtagcggctccccgggatgctgctgagtcagagcttgaaggcctgtcagagctggtcgacaaactatgttcagatgacaccaccagtcagctcgaagccacaatccagttcaggaaacttctttcagatgaactcaactgtgataaaaatcatccgagcggatgtcctgcccagatttgccgagtttctttcaagacatgggcttccccagctccaaatggaggcagcctgggttcttaccaacatagctgcatctgattatacactgctggttgcagaatgcggtgctgttccaaggttggtggaactattaggatcactaaatgcaaacatcaggcatcaggctatctggtgtcttgggaatatagctgcagacttacctagctgcagaggcattctcttcgatcatggtgctcttacacctttactttctcaatttagagaaggcatgaagattccagttctgagaactgctatgtgggcactgtcaaatctttgttttggaaaattgccagccgaagtgcaagtgaaaccaatactagaaattatcagccagcttattcactctgctgacgagaagatactggcagatgcatgctggactgtttactacatatgtggcgataaaggtgatgctgtccaagatgtattagatgctggggtctgccctcaacttgtaaatcttttgatgcatgcatcagctaatgttcttctccctgtcattatggcactcgcaagaatttctgcgggagatgataagcaagttgaggtagctttatagctgtgtattctttgtgtcctcaccctttattttactggtgcagattcccagtgatctgcagtcactagaacgtagaatgtaatggccgaagaaccgagtatggactatggagatgctgcttgttgtcagtaataatgctctgatctttttaagacccaaaaccatatatctcggcctgcagtaacattttatcgccacaattgcagctattattacactgctgaagttctatatacattttttttgcattgtcagcctttttcataccttccaagttcatatcatgggccttgtgtattgtccttgatccagtgaattcttggaggggctcagcaagctttcgctgcaaaacactcgtgtgtctacaattgctgttaaaggcagacctagtgctgggggctccccacatgagtgggatctcagagcctctggcactgtgtctgcgtttaataacaattatagatacatgagtgttttacagtgaaagttctcacttttcagttgctgttatagggaaacttaatataaaagttttcatgtagctcaataagtttttataccaagtcaacacatagcgaattagttgtacattctgctttgtcccccccaccccaacctttgaattacaacacaacaatattttgcaggtcttaatagagaatgacattctcaattgcttaggacagttggtagcacgaaattacccaaagaacatcaagaaacaagcgtgtctaattgtttctaatatcgctgctggtagcaaggatcagattcaggctgtaatcgatgcagacattataacctctctcattgtcttgctaagaacgtcagagccggatgttaaaaaggaggctgcttgggctatatcaactgctgcgtccggtggttcaagtgatcaaattcagtatttggtcagccggggatgtttagagcccctctgcagcgtcctcacccacaacgatcctgaccttgtatacacgtgtcttgaaggtcttgagaacatactccacgcaggtgaggcggggaagaagggcgaggaatcagggacgaacccatacgccgagtttattctagagtgcggaggtctggagaaactggaggatctgcaggacgtggacagcgacaggatctacgagctagccatgaagctgctacagagctactgggaggaggaagtaagcgagagtgatgatccgaacatcccaggttcgaatgactcgtcagatactgtggaagcaacgtccgaagatgctgctgctgctgtgcagccaccaccagtaccgccgccgccgtccgccgcagatgaagccgagtgatggtagatgttgtattgtagattgtatttcaggagaggaaagcctggttccttttcttagtggcactggcatattgtatgatacttactatgatcaggtcgatgtagagaggaacgtgtgaaggtgtggtagccgttatgtgcagaattttcgcatcacgtttctgtaggcgacattggagcattttgaatggaggatttgggccaagagaaaaagaggtatgggggttatttggcgcgtgctgctgaaaggttaaagattg

SEQ ID NO: 67564 - DNA, 2343 bp, Zea Mays
gaattgaagtgctaaagtttagtttcaattatcaccattagctctcatgtttagattataaatggctaaaagtagctaaaaaatagctgctaaagtttatctcgcgagattggaacagggcctaactattagttttagtgtattcaaacaccccctgagagtcgtaatctggcaaggatgaaaataacgtgaacaaattctaccaactacgctgtgcttatcgcctctggcggcggcgagttcgctcacgtcccggcgacccctcgccggtggccacgggccgtgacactccggcatgccgcgcgccccacgccggcagtccgacgaggcgcgccgtggcgcctacaagccgcgcgtcgacttcagccgctcgcgccgccgccgcgaggacggcctcctcgccctccgccgcctcaaccgcgacacgggactcttcaagcgccgccgcgacgagcccgctcccgccgtccctgcctccgatctgactcctacacgcgccgaagcagccccattcgcaggaatcacccgtccggcattcactccctcctcaccgcccgacgtagcggctccccgggatgctgctgagtcagagcttgaaggcctgtcagagctggtcgacaaactatgttcagatgacaccaccagtcagctcgaagccacaatccagttcaggaaacttctttcagatgagaagaactcaactgtgataaaaatcatccgagcggatgtcctgcccagatttgccgagtttctttcaagacatgggcttccccagctccaaaatgcggtgctgttccaaggttggtggaactattaggatcactaaatgcaaacatcaggcatcaggctatctggtgtcttgggaatatagctgcagacttacctagctgcagaggcattctcttcgatcatggtgctcttacacctttactttctcaatttagagaaggcatgaagattccagttctgagaactgctatgtgggcactgtcaaatctttgttttggaaaattgccagccgaagtgcaagtgaaaccaatactagaaattatcagccagcttattcactctgctgacgagaagatactggcagatgcatgctggactgtttactacatatgtggcgataaaggtgatgctgtccaagatgtattagatgctggggtctgccctcaacttgtaaatcttttgatgcatgcatcagctaatgttcttctccctgtcattatggcactcgcaagaatttctgcgggagatgataagcaagttgaggtagctttatagctgtgtattctttgtgtcctcaccctttattttactggtgcagattcccagtgatctgcagtcactagaacgtagaatgtaatggccgaagaaccgagtatggactatggagatgctgcttgttgtcagtcttaatagagaatgacattctcaattgcttaggacagttggtagcacgaaattacccaaagaacatcaagaaacaagcgtgtctaattgtttctaatatcgctgctggtagcaaggatcagattcaggctgtaatcgatgcagacattataacctctctcattgtcttgctaagaacgtcagagccggatgttaaaaaggaggctgcttgggctatatcaactgctgcgtccggtggttcaagtgatcaaattcagtatttggtcagccggggatgtttagagcccctctgcagcgtcctcacccacaacgatcctgaccttgtatacacgtgtcttgaaggtcttgagaacatactccacgcaggtgaggcggggaagaagggcgaggaatcagggacgaacccatacgccgagtttattctagagtgcggaggtctggagaaactggaggatctgcaggacgtggacagcgacaggatctacgagctagccatgaagctgctacagagctactgggaggaggaagtaagcgagagtgatgatccgaacatcccaggttcgaatgactcgtcagatactgtggaagcaacgtccgaagatgctgctgctgctgtgcagccaccaccagtaccgccgccgccgtccgccgcagatgaagccgagtgatggtagatgttgtattgtagattgtatttcaggagaggaaagcctggttccttttcttagtggcactggcatattgtatgatacttactatgatcaggtcgatgtagagaggaacgtgtgaaggtgtggtagccgttatgtgcagaattttcgcatcacgtttctgtaggcgacattggagcattttgaatggaggatttgggccaagagaaaaagaggtatgggggttatttggcgcgtgctgctgaaaggttaaagattg

SEQ ID NO: 67565 - DNA, 2408 bp, Zea Mays
gaattgaagtgctaaagtttagtttcaattatcaccattagctctcatgtttagattataaatggctaaaagtagctaaaaaatagctgctaaagtttatctcgcgagattggaacagggcctaactattagttttagtgtattcaaacaccccctgagagtcgtaatctggcaaggatgaaaataacgtgaacaaattctaccaactacgctgtgcttatcgcctctggcggcggcgagttcgctcacgtcccggcgacccctcgccggtggccacgggccgtgacactccggcatgccgcgcgccccacgccggcagtccgacgaggcgcgccgtggcgcctacaagccgcgcgtcgacttcagccgctcgcgccgccgccgcgaggacggcctcctcgccctccgccgcctcaaccgcgacacgggactcttcaagcgccgccgcgacgagcccgctcccgccgtccctgcctccgatctgactcctacacgcgccgaagcagccccattcgcaggaatcacccgtccggcattcactccctcctcaccgcccgacgtagcggctccccgggatgctgctgagtcagagttagcttgaaggcctgtcagagctggtcgacaaactatgttcagatgacaccaccagtcagctcgaagccacaatccagttcaggaaacttctttcagatgagaagaactcaactgtgataaaaatcatccgagcggatgtcctgcccagatttgccgagtttctttcaagacatgggcttccccagctccaaatggaggcagcctgggttcttaccaacatagctgcatctgattatacactgctggttgcagaatgcggtgctgttccaaggttggtggaactattaggatcactaaatgcaaacatcaggcatcaggctatctggtgtcttgggaatatagctgcagacttacctagctgcagaggcattctcttcgatcatggtgctcttacacctttactttctcaatttagagaaggcatgaagattccagttctgagaactgctatgtgggcactgtcaaatctttgttttggaaaattgccagccgaagtgcaagtgaaaccaatactagaaattatcagccagcttattcactctgctgacgagaagatactggcagatgcatgctggactgtttactacatatgtggcgataaaggtgatgctgtccaagatgtattagatgctggggtctgccctcaacttgtaaatcttttgatgcatgcatcagctaatgttcttctccctgtcattatggcactcgcaagaatttctgcgggagatgataagcaagttgaggtagctttatagctgtgtattctttgtgtcctcaccctttattttactggtgcagattcccagtgatctgcagtcactagaacgtagaatgtaatggccgaagaaccgagtatggactatggagatgctgcttgttgtcagtcttaatagagaatgacattctcaattgcttaggacagttggtagcacgaaattacccaaagaacatcaagaaacaagcgtgtctaattgtttctaatatcgctgctggtagcaaggatcagattcaggctgtaatcgatgcagacattataacctctctcattgtcttgctaagaacgtcagagccggatgttaaaaaggaggctgcttgggctatatcaactgctgcgtccggtggttcaagtgatcaaattcagtatttggtcagccggggatgtttagagcccctctgcagcgtcctcacccacaacgatcctgaccttgtatacacgtgtcttgaaggtcttgagaacatactccacgcaggtgaggcggggaagaagggcgaggaatcagggacgaacccatacgccgagtttattctagagtgcggaggtctggagaaactggaggatctgcaggacgtggacagcgacaggatctacgagctagccatgaagctgctacagagctactgggaggaggaagtaagcgagagtgatgatccgaacatcccaggttcgaatgactcgtcagatactgtggaagcaacgtccgaagatgctgctgctgctgtgcagccaccaccagtaccgccgccgccgtccgccgcagatgaagccgagtgatggtagatgttgtattgtagattgtatttcaggagaggaaagcctggttccttttcttagtggcactggcatattgtatgatacttactatgatcaggtcgatgtagagaggaacgtgtgaaggtgtggtagccgttatgtgcagaattttcgcatcacgtttctgtaggcgacattggagcattttgaatggaggatttgggccaagagaaaaagaggtatgggggttatttggcgcgtgctgctgaaaggttaaagattg

SEQ ID NO: 67566 - DNA, 3416 bp, Zea Mays
cctcgaagctcctcgtctgatcgtctcgcccggcgcccgccaccaccgccagtccaccagagcagagcggagcggcagcaccccagccggcgccgtctgaccgacccccgctccacccattccaacactgcccacatccttccccgtgtccgaccgtcggctttctcctccccctcccagccgccccagtctttgcccgtggccaagcgtcgacttcctcttcctttcgtcctccagttcgattctagtgaatctgctgttgcttctccgtcgcgcgagactaagacactggagttgaaatccgaggcacgtgggaagcctctctctcaatttttttggggattcaaaagagttcccgatgcccggagctaaggtggcccaagctcctggcggccaggccaggtgttcgacgaaactcccctgagagggatctgtcatgttcttggccaaacgaccgccttggtcgtctcagattagcaggttctgcatccttcccttccacgctgttccctggatcgttttgtggacaaggcgggtgcgatacagtggcggcagcggcgataatgccactccagtggcctctgggcggctgtccaagctgttttggccggctcggatgcacgtggctgacgttattgggcgagttctggaacgggggcagtcgttggattcggtggagctggagctggagaggctccatgtcgacctggacccctttgttgtcaaccgggtgctccggagcatctcggactcggagatggcagtgcggttctactggtgggcagagtccaggcctgggtttgatcacacccagttcgcgatagcgtatgttgtcagcctgctctttgtagacagcaactttttcctgctgtcggagttcctcgagagagtgaggagtcagggggttgcattgcatcgctctctctatcggatcctcttgtcgggctatgtaagggcaggcaagttcgattctgtcatccatacatttgatgagatggttacatctggatgccgtgagtttggtgtggactacaacaggttcattggtgttctagttaagaattgctgctttgatttggtcgagaagtattatagtgtggcacttgataaaggtttttgcttgacttcattcacttattcgaggtggatatctgcactgtgccaatcagaaaggattgagctcgtagagagactccttgccgatatggataagtttggctgttttccagatatttgggcatgtaacatatatgtggactgtttgtgtaaacataacaggttgcatgatgccttgaagacgcttgagaatatgtggatcagaggaaccaatccagatgttgtcacttacacaacagttgttggatgtttatgtgataacaagcagtttgcagaagcggtcgagctttgggaagaaatggtgaggaggggcctcaaacctgatatcgttgcctgtggcgtattgatatttgggctgtgcaagagtgacaaggttgatgaggcttttgagctggcattgaggatgctgagtcttaatttagaactcaatgtctgtatttacaatgccctgataagtggcttcttgagatccggaagcattaataaagcattcaaaatcatatccgtcatgcggacaaatggttgtgagccagacgttgtcacatataatatccgtttgaaccattactgcaacacaggtatgataaaggaagctgaaaagttgatcgaggagatggaaatgagtgggattgtaaatcctgatcggtacagctataatcaaatgttaaagggattgtgcaaagctcatcaattggacagggcatttggttttgtttcagatcatatggaggttggtgggttctgtgatattgtatcttgtaacatactgattgatgcattctgtaaggcaaagaaagtaagttctgctttgaagctgttcaaagaaatgggttataagggaatacaagcagatgctgtgacatatggaactctaattaatggtctttacggtgtaggatactactacctagctgaggaaatttttgagcagatgctgaaagctcgggttgttccaaatgttaatctgtacaatattatgctccataacctgtgcaaagctggtcagtttgaacaggctcagaaaattttcttgcagatgattcagaaggaagtgtcgccagatattattacttttaacacgctcatatattggcttggtaaatgctcaagggcaattgaagctattgatctgttcagggatatgacagctagagggatagaacctgatagcttgacatttaggtatctgatcagtggcctcctagaggaggggaaagctacacaggcttatgaggtatgggaatatatgttggagaatggcataattctcgacagagatgtttctgacaggctgataagtatgtttaaatcaaacaacaagtaacaactgactgggtttcttgagagtttcagcctctaggacattttaatcatgtcactagaactcaaaggtccgagcttgtttagttgcttctaagctcatcgctgtgccggtgccgcggaacacatctttgctgattaactcgatttgatggatgcattataactggaccagacccaaaagcagacacaccagagaaacagtggacaaggtacttctgttttgaccttctgctgtatcatgctagcttttggggcagtttggtatagctcccagagcaggttccaggctgaatccaagagaagctccgccgaatagttttttaccgagaagtgattctttgctgatttcatgaagcgattctctaaaatgaactagggtgccgggagctgaataaaggtacgcatccaagattcttggttgacaaatttgatgttgctaagaaagcatgtctcaattttctcgataagtttaaggcgtcagtcgttactggtgaacaactcttaggacaaagttgtataaaggattggctgatcagatgatggatattgttgtgaatgcaaagcaccaatgcgttgtggggtcctatggcgcagtagcaatgggaagagaggcaggagaaggccaaatttgatatggggagaggtagtaaaaggagacttgaaacttgaaaggatggaatatattcaaatatttagccttaaataggactataggagtgcatacaccataggaaacagttatacatgtgcctgaatcttgacttgtgatttatgttgggtttcaactctaacctacctgaactttcttgtgactaaaagacactgttgttgatggtggtggataatgcacatgtgccatttatggtgaaaataaataaaaaaagtttatgtatcaatgtgtcttttgttagtggagagtaagctctttgcatggaagcttattaatagcatgatctgtgttgttaaatcaattttac

SEQ ID NO: 67567 - DNA, 3353 bp, Zea Mays
cctcgaagctcctcgtctgatcgtctcgcccggcgcccgccaccaccgccagtccaccagagcagagcggagcggcagcaccccagccggcgccgtctgaccgacccccgctccacccattccaacactgcccacatccttccccgtgtccgaccgtcggctttctcctccccctcccagccgccccagtctttgcccgtggccaagcgtcgacttcctcttcctttcgtcctccagttcgattctagtgaatctgctgttgcttctccgtcgcgcgagactaagacactggagttgaaatccgaggcacgtgggaagcctctctctcaatttttttggggattcaaaagagttcccgatgcccggagctaaggtggcccaagctcctggcggccaggccaggtgttcgacgaaactcccctgagagggatctgtcatgttcttggccaaacgaccgccttggtcgtctcagattagcaggttctgcatccttcccttccacgctgttccctggatcgttttgtggacaaggcgggtgcgatacagtggcggcagcggcgataatgccactccagtggcctctgggcggctgtccaagctgttttggccggctcggatgcacgtggctgacgttattgggcgagttctggaacgggggcagtcgttggattcggtggagctggagctggagaggctccatgtcgacctggacccctttgttgtcaaccgggtgctccggagcatctcggactcggagatggcagtgcggttctactggtgggcagagtccaggcctgggtttgatcacacccagttcgcgatagcgtatgttgtcagcctgctctttgtagacagcaactttttcctgctgtcggagttcctcgagagagtgaggagtcagggggttgcattgcatcgctctctctatcggatcctcttgtcgggctatgtaagggcaggcaagttcgattctgtcatccatacatttgatgagatggttacatctggatgccgtgagtttggtgtggactacaacaggttcattggtgttctagttaagaattgctgctttgatttggtcgagaagtattatagtgtggcacttgataaaggtttttgcttgacttcattcacttattcgaggtggatatctgcactgtgccaatcagaaaggattgagctcgtagagagactccttgccgatatggataagtttggctgttttccagatatttgggcatgtaacatatatgtggactgtttgtgtaaacataacaggttgcatgatgccttgaagacgcttgagaatatgtggatcagaggaaccaatccagatgttgtcacttacacaacagttgttggatgtttatgtgataacaagcagtttgcagaagcggtcgagctttgggaagaaatggtgaggaggggcctcaaacctgatatcgttgcctgtggcgtattgatatttgggctgtgcaagagtgacaaggttgatgaggcttttgagctggcattgaggatgctgagtcttaatttagaactcaatgtctgtatttacaatgccctgataagtggcttcttgagatccggaagcattaataaagcattcaaaatcatatccgtcatgcggacaaatggttgtgagccagacgttgtcacatataatatccgtttgaaccattactgcaacacaggtatgataaaggaagctgaaaagttgatcgaggagatggaaatgagtgggattgtaaatcctgatcggtacagctataatcaaatgttaaagggattgtgcaaagctcatcaattggacagggcatttggttttgtttcagatcatatggaggttggtgggttctgtgatattgtatcttgtaacatactgattgatgcattctgtaaggcaaagaaagtaagttctgctttgaagctgttcaaagaaatgggttataagggaatacaagcagatgctgtgacatatggaactctaattaatggtctttacggtgtaggatactactacctagctgaggaaatttttgagcagatgctgaaagctcgggttgttccaaatgttaatctgtacaatattatgctccataacctgtgcaaagctggtcagtttgaacaggctcagaaaattttcttgcagatgattcagaaggaagtgtcgccagatattattacttttaacacgctcatatattggcttggtaaatgctcaagggcaattgaagctattgatctgttcagggatatgacagctagagggatagaacctgatagcttgacatttaggtatctgatcagtggcctcctagaggaggggaaagctacacaggcttatgaggtatgggaatatatgttggagaatggcataattctcgacagagatgtttctgacaggctgataagtatgtttaaatcaaacaacaagtaacaactgactgggtttcttgagagtttcagcctctaggacattttaatcatgtcactagaactcaaagacccaaaagcagacacaccagagaaacagtggacaaggtacttctgttttgaccttctgctgtatcatgctagcttttggggcagtttggtatagctcccagagcaggttccaggctgaatccaagagaagctccgccgaatagttttttaccgagaagtgattctttgctgatttcatgaagcgattctctaaaatgaactagggtgccgggagctgaataaaggtacgcatccaagattcttggttgacaaatttgatgttgctaagaaagcatgtctcaattttctcgataagtttaaggcgtcagtcgttactggtgaacaactcttaggacaaagttgtataaaggattggctgatcagatgatggatattgttgtgaatgcaatgactcagttgatctttttatgtccaacggagacctccagaagcaccaatgcgttgtggggtcctatggcgcagtagcaatgggaagagaggcaggagaaggccaaatttgatatggggagaggtagtaaaaggagacttgaaacttgaaaggatggaatatattcaaatatttagccttaaataggactataggagtgcatacaccataggaaacagttatacatgtgcctgaatcttgacttgtgatttatgttgggtttcaactctaacctacctgaactttcttgtgactaaaagacactgttgttgatggtggtggataatgcacatgtgccatttatggtgaaaataaataaaaaaagtttatgtatcaatgtgtcttttgttagtggagagtaagctctttgcatggaagcttattaatagcatgatctgtgttgttaaatcaattttac

SEQ ID NO: 67568 - DNA, 3487 bp, Zea Mays
cctcgaagctcctcgtctgatcgtctcgcccggcgcccgccaccaccgccagtccaccagagcagagcggagcggcagcaccccagccggcgccgtctgaccgacccccgctccacccattccaacactgcccacatccttccccgtgtccgaccgtcggctttctcctccccctcccagccgccccagtctttgcccgtggccaagcgtcgacttcctcttcctttcgtcctccagttcgattctagtgaatctgctgttgcttctccgtcgcgcgagactaagacactggagttgaaatccgaggcacgtgggaagcctctctctcaatttttttggggattcaaaagagttcccgatgcccggagctaaggtggcccaagctcctggcggccaggccaggtgttcgacgaaactcccctgagagggatctgtcatgttcttggccaaacgaccgccttggtcgtctcagattagcaggttctgcatccttcccttccacgctgttccctggatcgttttgtggacaaggcgggtgcgatacagtggcggcagcggcgataatgccactccagtggcctctgggcggctgtccaagctgttttggccggctcggatgcacgtggctgacgttattgggcgagttctggaacgggggcagtcgttggattcggtggagctggagctggagaggctccatgtcgacctggacccctttgttgtcaaccgggtgctccggagcatctcggactcggagatggcagtgcggttctactggtgggcagagtccaggcctgggtttgatcacacccagttcgcgatagcgtatgttgtcagcctgctctttgtagacagcaactttttcctgctgtcggagttcctcgagagagtgaggagtcagggggttgcattgcatcgctctctctatcggatcctcttgtcgggctatgtaagggcaggcaagttcgattctgtcatccatacatttgatgagatggttacatctggatgccgtgagtttggtgtggactacaacaggttcattggtgttctagttaagaattgctgctttgatttggtcgagaagtattatagtgtggcacttgataaaggtttttgcttgacttcattcacttattcgaggtggatatctgcactgtgccaatcagaaaggattgagctcgtagagagactccttgccgatatggataagtttggctgttttccagatatttgggcatgtaacatatatgtggactgtttgtgtaaacataacaggttgcatgatgccttgaagacgcttgagaatatgtggatcagaggaaccaatccagatgttgtcacttacacaacagttgttggatgtttatgtgataacaagcagtttgcagaagcggtcgagctttgggaagaaatggtgaggaggggcctcaaacctgatatcgttgcctgtggcgtattgatatttgggctgtgcaagagtgacaaggttgatgaggcttttgagctggcattgaggatgctgagtcttaatttagaactcaatgtctgtatttacaatgccctgataagtggcttcttgagatccggaagcattaataaagcattcaaaatcatatccgtcatgcggacaaatggttgtgagccagacgttgtcacatataatatccgtttgaaccattactgcaacacaggtatgataaaggaagctgaaaagttgatcgaggagatggaaatgagtgggattgtaaatcctgatcggtacagctataatcaaatgttaaagggattgtgcaaagctcatcaattggacagggcatttggttttgtttcagatcatatggaggttggtgggttctgtgatattgtatcttgtaacatactgattgatgcattctgtaaggcaaagaaagtaagttctgctttgaagctgttcaaagaaatgggttataagggaatacaagcagatgctgtgacatatggaactctaattaatggtctttacggtgtaggatactactacctagctgaggaaatttttgagcagatgctgaaagctcgggttgttccaaatgttaatctgtacaatattatgctccataacctgtgcaaagctggtcagtttgaacaggctcagaaaattttcttgcagatgattcagaaggaagtgtcgccagatattattacttttaacacgctcatatattggcttggtaaatgctcaagggcaattgaagctattgatctgttcagggatatgacagctagagggatagaacctgatagcttgacatttaggtatctgatcagtggcctcctagaggaggggaaagctacacaggcttatgaggtatgggaatatatgttggagaatggcataattctcgacagagatgtttctgacaggctgataagtatgtttaaatcaaacaacaagtaacaactgactgggtttcttgagagtttcagcctctaggacattttaatcatgtcactagaactcaaaggtccgagcttgtttagttgcttctaagctcatcgctgtgccggtgccgcggaacacatctttgctgattaactcgatttgatggatgcattataactggaccagacccaaaagcagacacaccagagaaacagtggacaaggtacttctgttttgaccttctgctgtatcatgctagcttttggggcagtttggtatagctcccagagcaggttccaggctgaatccaagagaagctccgccgaatagttttttaccgagaagtgattctttgctgatttcatgaagcgattctctaaaatgaactagggtgccgggagctgaataaaggtacgcatccaagattcttggttgacaaatttgatgttgctaagaaagcatgtctcaattttctcgataagtttaaggcgtcagtcgttactggtgaacaactcttaggacaaagttgtataaaggattggctgatcagatgatggatattgttgtgaatgcagcttataggttctgtgcatctgcaattcagatgactcagttgatctttttatgtccaacggagacctccagaagcaccaatgcgttgtggggtcctatggcgcagtagcaatgggaagagaggcaggagaaggccaaatttgatatggggagaggtagtaaaaggagacttgaaacttgaaaggatggaatatattcaaatatttagccttaaataggactataggagtgcatacaccataggaaacagttatacatgtgcctgaatcttgacttgtgatttatgttgggtttcaactctaacctacctgaactttcttgtgactaaaagacactgttgttgatggtggtggataatgcacatgtgccatttatggtgaaaataaataaaaaaagtttatgtatcaatgtgtcttttgttagtggagagtaagctctttgcatggaagcttattaatagcatgatctgtgttgttaaatcaattttac

SEQ ID NO: 67569 - DNA, 3138 bp, Zea Mays
cctcgaagctcctcgtctgatcgtctcgcccggcgcccgccaccaccgccagtccaccagagcagagcggagcggcagcaccccagccggcgccgtctgaccgacccccgctccacccattccaacactgcccacatccttccccgtgtccgaccgtcggctttctcctccccctcccagccgccccagtctttgcccgtggccaagcgtcgacttcctcttcctttcgtcctccagttcgattctagtgaatctgctgttgcttctccgtcgcgcgagactaagacactggagttgaaatccgaggcacgtgggaagcctctctctcaatttttttggggattcaaaagagttcccgatgcccggagctaaggtggcccaagctcctggcggccaggccaggtgttcgacgaaactcccctgagagggatctgtcatgttcttggccaaacgaccgccttggtcgtctcagattagcaggttctgcatccttcccttccacgctgttccctggatcgttttgtggacaaggcgggtgcgatacagtggcggcagcggcgataatgccactccagtggcctctgggcggctgtccaagctgttttggccggctcggatgcacgtggctgacgttattgggcgagttctggaacgggggcagtcgttggattcggtggagctggagctggagaggctccatgtcgacctggacccctttgttgtcaaccgggtgctccggagcatctcggactcggagatggcagtgcggttctactggtgggcagagtccaggcctgggtttgatcacacccagttcgcgatagcgtatgttgtcagcctgctctttgtagacagcaactttttcctgctgtcggagttcctcgagagagtgaggagtcagggggttgcattgcatcgctctctctatcggatcctcttgtcgggctatgtaagggcaggcaagttcgattctgtcatccatacatttgatgagatggttacatctggatgccgtgagtttggtgtggactacaacaggttcattggtgttctagttaagaattgctgctttgatttggtcgagaagtattatagtgtggcacttgataaaggtttttgcttgacttcattcacttattcgaggtggatatctgcactgtgccaatcagaaaggattgagctcgtagagagactccttgccgatatggataagtttggctgttttccagatatttgggcatgtaacatatatgtggactgtttgtgtaaacataacaggttgcatgatgccttgaagacgcttgagaatatgtggatcagaggaaccaatccagatgttgtcacttacacaacagttgttggatgtttatgtgataacaagcagtttgcagaagcggtcgagctttgggaagaaatggtgaggaggggcctcaaacctgatatcgttgcctgtggcgtattgatatttgggctgtgcaagagtgacaaggttgatgaggcttttgagctggcattgaggatgctgagtcttaatttagaactcaatgtctgtatttacaatgccctgataagtggcttcttgagatccggaagcattaataaagcattcaaaatcatatccgtcatgcggacaaatggttgtgagccagacgttgtcacatataatatccgtttgaaccattactgcaacacaggtatgataaaggaagctgaaaagttgatcgaggagatggaaatgagtgggattgtaaatcctgatcggtacagctataatcaaatgttaaagggattgtgcaaagctcatcaattggacagggcatttggttttgtttcagatcatatggaggttggtgggttctgtgatattgtatcttgtaacatactgattgatgcattctgtaaggcaaagaaagtaagttctgctttgaagctgttcaaagaaatgggttataagggaatacaagcagatgctgtgacatatggaactctaattaatggtctttacggtgtaggatactactacctagctgaggaaatttttgagcagatgctgaaagctcgggttgttccaaatgttaatctgtacaatattatgctccataacctgtgcaaagctggtcagtttgaacaggctcagaaaattttcttgcagatgattcagaaggaagtgtcgccagatattattacttttaacacgctcatatattggcttggtaaatgctcaagggcaattgaagctattgatctgttcagggatatgacagctagagggatagaacctgatagcttgacatttaggtatctgatcagtggcctcctagaggaggggaaagctacacaggcttatgaggtatgggaatatatgttggagaatggcataattctcgacagagatgtttctgacaggctgataagtatgtttaaatcaaacaacaagtaacaactgactgggtttcttgagagtttcagcctctaggacattttaatcatgtcactagaactcaaaggtccgagcttgtttagttgcttctaagctcatcgctgtgccggtgccgcggaacacatctttgctgattaactcgatttgatggatgcattataactggaccagacccaaaagcagacacaccagagaaacagtggacaaggtacttctgttttgaccttctgctgtatcatgctagcttttggggcagtttggtatagctcccagagcaggttccaggctgaatccaagagaagctccgccgaatagttttttaccgagaagtgattctttgctgatttcatgaagcgattctctaaaatgaactagggtgccgggagctgaataaaggtacgcatccaagattcttggttgacaaatttgatgttgctaagaaagcatgtctcaattttctcgataagtttaaggcgtcagtcgttactggtgaacaactcttaggacaaagttgtataaaggattggctgatcagatgatggatattgttgtgaatgcaacctccagaagcaccaatgcgttgtggggtcctatggcgcagtagcaatgggaagagaggcaggagaaggccaaatttgatatggggagagattattgctcttcaaagggcaaagaggagaaacatggagaggtttgtg

SEQ ID NO: 67570 - DNA, 3047 bp, Zea Mays
cctcgaagctcctcgtctgatcgtctcgcccggcgcccgccaccaccgccagtccaccagagcagagcggagcggcagcaccccagccggcgccgtctgaccgacccccgctccacccattccaacactgcccacatccttccccgtgtccgaccgtcggctttctcctccccctcccagccgccccagtctttgcccgtggccaagcgtcgacttcctcttcctttcgtcctccagttcgattctagtgaatctgctgttgcttctccgtcgcgcgagactaagacactggagttgaaatccgaggcacgtgggaagcctctctctcaatttttttggggattcaaaagagttcccgatgcccggagctaaggtggcccaagctcctggcggccaggccaggtgttcgacgaaactcccctgagagggatctgtcatgttcttggccaaacgaccgccttggtcgtctcagattagcaggttctgcatccttcccttccacgctgttccctggatcgttttgtggacaaggcgggtgcgatacagtggcggcagcggcgataatgccactccagtggcctctgggcggctgtccaagctgttttggccggctcggatgcacgtggctgacgttattgggcgagttctggaacgggggcagtcgttggattcggtggagctggagctggagaggctccatgtcgacctggacccctttgttgtcaaccgggtgctccggagcatctcggactcggagatggcagtgcggttctactggtgggcagagtccaggcctgggtttgatcacacccagttcgcgatagcgtatgttgtcagcctgctctttgtagacagcaactttttcctgctgtcggagttcctcgagagagtgaggagtcagggggttgcattgcatcgctctctctatcggatcctcttgtcgggctatgtaagggcaggcaagttcgattctgtcatccatacatttgatgagatggttacatctggatgccgtgagtttggtgtggactacaacaggttcattggtgttctagttaagaattgctgctttgatttggtcgagaagtattatagtgtggcacttgataaaggtttttgcttgacttcattcacttattcgaggtggatatctgcactgtgccaatcagaaaggattgagctcgtagagagactccttgccgatatggataagtttggctgttttccagatatttgggcatgtaacatatatgtggactgtttgtgtaaacataacaggttgcatgatgccttgaagacgcttgagaatatgtggatcagaggaaccaatccagatgttgtcacttacacaacagttgttggatgtttatgtgataacaagcagtttgcagaagcggtcgagctttgggaagaaatggtgaggaggggcctcaaacctgatatcgttgcctgtggcgtattgatatttgggctgtgcaagagtgacaaggttgatgaggcttttgagctggcattgaggatgctgagtcttaatttagaactcaatgtctgtatttacaatgccctgataagtggcttcttgagatccggaagcattaataaagcattcaaaatcatatccgtcatgcggacaaatggttgtgagccagacgttgtcacatataatatccgtttgaaccattactgcaacacaggtatgataaaggaagctgaaaagttgatcgaggagatggaaatgagtgggattgtaaatcctgatcggtacagctataatcaaatgttaaagggattgtgcaaagctcatcaattggacagggcatttggttttgtttcagatcatatggaggttggtgggttctgtgatattgtatcttgtaacatactgattgatgcattctgtaaggcaaagaaagtaagttctgctttgaagctgttcaaagaaatgggttataagggaatacaagcagatgctgtgacatatggaactctaattaatggtctttacggtgtaggatactactacctagctgaggaaatttttgagcagatgctgaaagctcgggttgttccaaatgttaatctgtacaatattatgctccataacctgtgcaaagctggtcagtttgaacaggctcagaaaattttcttgcagatgattcagaaggaagtgtcgccagatattattacttttaacacgctcatatattggcttggtaaatgctcaagggcaattgaagctattgatctgttcagggatatgacagctagagggatagaacctgatagcttgacatttaggtatctgatcagtggcctcctagaggaggggaaagctacacaggcttatgaggtatgggaatatatgttggagaatggcataattctcgacagagatgtttctgacaggctgataagtatgtttaaatcaaacaacaagtaacaactgactgggtttcttgagagtttcagcctctaggacattttaatcatgtcactagaactcaaaggtccgagcttgtttagttgcttctaagctcatcgctgtgccggtgccgcggaacacatctttgctgattaactcgatttgatggatgcattataactggaccagacccaaaagcagacacaccagagaaacagtggacaaggtacttctgttttgaccttctgctgtatcatgctagcttttggggcagtttggtatagctcccagagcaggttccaggctgaatccaagagaagctccgccgaatagttttttaccgagaagtgattctttgctgatttcatgaagcgattctctaaaatgaactagggtgccgggagctgaataaaggtacgcatccaagattcttggttgacaaatttgatgttgctaagaaagcatgtctcaattttctcgataagtttaaggcgtcagtcgttactggtgaacaactcttaggacaaagttgtataaaggattggctgatcagatgatggatattgttgtgaatgcaattattgctcttcaaagggcaaagaggagaaacatggagaggtttgtg

SEQ ID NO: 67571 - DNA, 3030 bp, Zea Mays
cctcgaagctcctcgtctgatcgtctcgcccggcgcccgccaccaccgccagtccaccagagcagagcggagcggcagcaccccagccggcgccgtctgaccgacccccgctccacccattccaacactgcccacatccttccccgtgtccgaccgtcggctttctcctccccctcccagccgccccagtctttgcccgtggccaagcgtcgacttcctcttcctttcgtcctccagttcgattctagtgaatctgctgttgcttctccgtcgcgcgagactaagacactggagttgaaatccgaggcacgtgggaagcctctctctcaatttttttggggattcaaaagagttcccgatgcccggagctaaggtggcccaagctcctggcggccaggccaggtgttcgacgaaactcccctgagagggatctgtcatgttcttggccaaacgaccgccttggtcgtctcagattagcaggttctgcatccttcccttccacgctgttccctggatcgttttgtggacaaggcgggtgcgatacagtggcggcagcggcgataatgccactccagtggcctctgggcggctgtccaagctgttttggccggctcggatgcacgtggctgacgttattgggcgagttctggaacgggggcagtcgttggattcggtggagctggagctggagaggctccatgtcgacctggacccctttgttgtcaaccgggtgctccggagcatctcggactcggagatggcagtgcggttctactggtgggcagagtccaggcctgggtttgatcacacccagttcgcgatagcgtatgttgtcagcctgctctttgtagacagcaactttttcctgctgtcggagttcctcgagagagtgaggagtcagggggttgcattgcatcgctctctctatcggatcctcttgtcgggctatgtaagggcaggcaagttcgattctgtcatccatacatttgatgagatggttacatctggatgccgtgagtttggtgtggactacaacaggttcattggtgttctagttaagaattgctgctttgatttggtcgagaagtattatagtgtggcacttgataaaggtttttgcttgacttcattcacttattcgaggtggatatctgcactgtgccaatcagaaaggattgagctcgtagagagactccttgccgatatggataagtttggctgttttccagatatttgggcatgtaacatatatgtggactgtttgtgtaaacataacaggttgcatgatgccttgaagacgcttgagaatatgtggatcagaggaaccaatccagatgttgtcacttacacaacagttgttggatgtttatgtgataacaagcagtttgcagaagcggtcgagctttgggaagaaatggtgaggaggggcctcaaacctgatatcgttgcctgtggcgtattgatatttgggctgtgcaagagtgacaaggttgatgaggcttttgagctggcattgaggatgctgagtcttaatttagaactcaatgtctgtatttacaatgccctgataagtggcttcttgagatccggaagcattaataaagcattcaaaatcatatccgtcatgcggacaaatggttgtgagccagacgttgtcacatataatatccgtttgaaccattactgcaacacaggtatgataaaggaagctgaaaagttgatcgaggagatggaaatgagtgggattgtaaatcctgatcggtacagctataatcaaatgttaaagggattgtgcaaagctcatcaattggacagggcatttggttttgtttcagatcatatggaggttggtgggttctgtgatattgtatcttgtaacatactgattgatgcattctgtaaggcaaagaaagtaagttctgctttgaagctgttcaaagaaatgggttataagggaatacaagcagatgctgtgacatatggaactctaattaatggtctttacggtgtaggatactactacctagctgaggaaatttttgagcagatgctgaaagctcgggttgttccaaatgttaatctgtacaatattatgctccataacctgtgcaaagctggtcagtttgaacaggctcagaaaattttcttgcagatgattcagaaggaagtgtcgccagatattattacttttaacacgctcatatattggcttggtaaatgctcaagggcaattgaagctattgatctgttcagggatatgacagctagagggatagaacctgatagcttgacatttaggtatctgatcagtggcctcctagaggaggggaaagctacacaggcttatgaggtatgggaatatatgttggagaatggcataattctcgacagagatgtttctgacaggctgataagtatgtttaaatcaaacaacaagtaacaactgactgggtttcttgagagtttcagcctctaggacattttaatcatgtcactagaactcaaaggtccgagcttgtttagttgcttctaagctcatcgctgtgccggtgccgcggaacacatctttgctgattaactcgatttgatggatgcattataactggaccagacccaaaagcagacacaccagagaaacagtggacaaggtacttctgttttgaccttctgctgtatcatgctagcttttggggcagtttggtatagctcccagagcaggttccaggctgaatccaagagaagctccgccgaatagttttttaccgagaagtgattctttgctgatttcatgaagcgattctctaaaatgaactagggtgccgggagctgaataaaggtacgcatccaagattcttggttgacaaatttgatgttgctaagaaagcatgtctcaattttctcgataagtttaaggcgtcagtcgttactggtgaacaactcttaggacaaagttgtataaaggattggctgatcagatgatggatattgttgtgaatgcaggcaaagaggagaaacatggagaggtttgtg

SEQ ID NO: 67572 - DNA, 1245 bp, Zea Mays
ataaaatccgtatatacggcttggtgagtgttactgtgtagcccaagattcaaactctcccgtgcacaattttactgagaaactcctcgggggtaaagacttccccttcgctctgctgtcccgtctctttgattcctgaaccccacccaggcattccgcagtggctggccgtcgctggctcgccgctacttcggccctttcgccggtgacgataacccaccagttatccgagggaaaattttctatgtgctgattggaatggcgagtacagcatgctttgtaataattgtcagtaagaatgatatcccaatctacgaggcagaagttggatctgcacccaaaaaagaggatttgtcttatcaccatcagtttatcctgcatgctgcgttagatgttgttcaggacctagcatggaccacaaatgcaatgtccctgaagtcagttgatagattcaatgaccttgtggtgtctgtttatgtaactgctggtcataccagattcatgttgcttcatgactcacgcagtgaagatggaataaaaagcttttttcaagaggtccatgagctttacatcaagatattcctgaacccgctttacctgcccggctctcgcatcacatcatcccattttgataccaaggtcagggccctcgcaaggaagtacctgtaatacacgggcatgcatgaagggtttcctaagctttgcatctctgatggatttttcaaggttaaagggcgcgactatctctatggagggagatgatatcttaagcagattattggtgaagcagaatgtcgcagcctcaactccactaatttgatacttgagaaatatcaactcaaatatctagcaatggtaaggatcagctttaatcccttacctttttgccttggtgatagataaggtcacaactcacaagagacatacaagggaatatcccttggtgtatgctttttgcagatgatgtagtgctaattaataaaagttggtttggtcaggagtaaataggaaaatatagttgtggcagaagactctagaattccaaggtttttagactcggtagaactaaaacgaagtatattagatgtgatttcggcactacacatgagaaaagggatgttagtttgaaaggtcaaatagtacctaggaaggacacatttaggtatttagaatcattactatagagatgaggatattgatgaagatgttagccagtagtcatagaatcaaagcaggatggatgaa

SEQ ID NO: 67573 - DNA, 673 bp, Zea Mays
tcccagattcatgttgcttcatgactcacgcagtgaagatggaataaaaagcttttttcaagaggtccatgagctttacatcaagatattcctgaacccgctttacctgcccggctctcgcatcacatcatcccattttgataccaaggtcagggccctcgcaaggaagtacctgtaatacacgggcatgcatgaagggtttcctaagctttgcatctcgtaagcacaaggctgagctagtttcgcttcgatctttttaggctttctttttgtttgatatattccgcgcataaaatgcccctttgctccagattatccttgcataaatgcctgtccctgttatgcataataaacaaagcgtgttccgtcaaagaacagcatgctgacacacacgacacgacgagccaccacccatgagccggtaccggtacgatagctagcctccaagctagggcgtcggcttgctgtggtcgtgcttgcgtggagactgaccattggcacgccggtctctcggatgtatacctgcgtgtcacggcatccacgtcttgtattgtttggtgcagactgtaggttaggtcctctattgcatgacaccgtctttacgtgtcaatgtagttacgtatctatctatgaccctgtttggcacagcagctgcttgttaaaaaagcagctt

SEQ ID NO: 67574 - DNA, 3212 bp, Zea Mays
ctggcttaattcatactccctgtaccgagtactgtgagcgacagcatcagcccagccatcaggtgtgccagtgcagtggtctgggccggaggagagcagcagcccactggattgcaggaagccgaatgcattgggccgggcctccatcacaacgtctcatctctaagcgcgcttgtctgtgctccaaatacacacacaaaaaagggaagtatcagtttctctgttcaaaaaagaagaaaaagaaaataaaaggaagaaaactcgagttgccgccgtcaaccaaacaagtcggagaagcagccctcgcaaaaccctcccctcgatggccggtgtgccaccgccgccgcggcagctcgatgtgcggcgcttcgcggccgcccgcgccagcgaactccgctccctctacgcagccgtatcgtcccgactcgacgacgccggcggccggcatcagccccgttcggcgcgccgccgcaccacagggcacctacccagcaagcgccgccgccggggagccggagaggtgggccccggggatgacgatggcctcccggcgcggaaacagtccaggagggtgaggcggcggcgggagctcgctgccaaccccgcggaggggttctcggtcgccggcgacggtgcgcggcggctgcgcacgcacctgtggtatgcgaaaaggttctccatggagaggcggtggacattcatcttgcccgtcggcgcccaggggaggggtaagggctcaaggagtgttctcaagcgtctgaaaaatgggacaactatccatgatgctggctacttcattccaatagagctggatggtccagagtccaggacgccctgttatccgttctcagaatggttctgcgcccatcgcctgcagaaaaaacacccgatttgaagcatctacaggatcaagttatgcgaggtgtttgctatgagaatgctatgctttgggatgttaggagtatgcattctcaaattgttggaccagtaacatatatgtggcgtccattctcaagagcagatgacaaatctgggattgaaggagatcagtgtacttctcactgcattcacgatgaaagcggcaattcctcacgacgccagttgtggatatggattcatcctgctgcacttgatgatggaattagtgcaatacaatttgcatgtgagagacagagaacttatacttctagtttgagtgtgcggatattcaagggagatgaattaagatgctatttggtgagtataatttatcttgtgcaatgtaatccttactgctgcgtaacagttacaagtaagggaaaaattggaagattggaagtcaatggatgcaaggctatgcaatctcttaagaagattttgcatccaaccagttcaagtaagatcaacacgatatcaacaagtgatatctccgcatcaactgatactctcctggattcctgtattgcccctcatcttttgaaagcttctgtcattagtaatgctgagattcttcaacctggtgctatactatccatggtagttcatgaccccagggaagtttcagtcaagggaaatagattcttctaaaatagtctcccatgacaaacagagcgaagtttgggagaaagatgtagccccaaatgctaatgaggcgtcatcagaagttgcaaatatattgccattgatgtggatgcaccctgggaaacatgatatactcctttctgactgtagggaactgtgggactccaggcaaaccataaatcctcctgtgtcagatgaggttctctgtaaggagaagcactctgaacgtataaagtttttctgcttggattcaggaaatgatcaagagcaaacaacacaagagaaggacaacttcattcgatcctgcccggttattcttttgaaacatgccagagaaggaataccttctctagggtggtccatcattctacctttgagttgggtgaaacctttctggctctttctagtatctcatggtgcccatgcaattggcttaagagagagacggtggattgcagcaaagttgagaatgccatgctttccttatgattatccagatagcaaagcgtatgcatcatacatgtccaaagaagctgctggttttgataaagtagttgagcgccgccctgttgccaagagaccaccaagagttcctgtgcctcctttatggcactgtatcatgacttgttttcgtaaagattatgatggcatattgggtgttcttgaagtagacgacttggtgcgggctaacatggtattacctaaaaactcttctgcacattgcgaatctggagacgcagaaccatcgcaagcaaatgttgcatccttgcaacttcatgtgccaagaaccacccaaatgttgagacagtatgtggaagaatttgataggaagtatctgagctcatcatctgacatgaaagtggattctgatgaacccaacctagcttctgataacactgtcggcatgacacggttcgcgagtgaattatgccttacaagggttctgatccgagctttcaaggaaggttcttttgaagagggtgcagttgtttgtgccccattacctgcagaactttcagcttggaaaatcagatcaaaggaagaagaggaagaatgcgtagaaaaatgggagctccagcttcctcagtcccatgttagttcctatttctcgtggtttgatcccagcacgagcagcctccagttgcctacggatggcgtcgcacgggaggcgttcaggtggccgataggctttgtcaccagtggtttcatccatggaagtaacgggcaagacgcagtggcggtcgcattctgcgaggcaaagcttctggcagcgttgaggcgacagcaatggacgcatggaaacttgcagagccgggaggtgtgcgtccttgtcaggaacgcgagatcggctgcctaccgacgagcgctggccaccaccgtcctggagcatcaggaatcagacctagcgtttctgtagtctagtcgggaacctgttgacgttgattttttctctctctctcccttttggagttccatccatcctccactcatccgttgatgaacctaagtaatttactggtgattacagtttatttgtgcgatgcaaaatcattaaacagaagaagtaaatgcatctatctcatttgacggatttcaatgatttactgttacatagtatgaataataataaagcagctcgtccggaaaaatga

SEQ ID NO: 67575 - DNA, 3030 bp, Zea Mays
ctggcttaattcatactccctgtaccgagtactgtgagcgacagcatcagcccagccatcaggtgtgccagtgcagtggtctgggccggaggagagcagcagcccactggattgcaggaagccgaatgcattgggccgggcctccatcacaacgtctcatctctaagcgcgcttgtctgtgctccaaatacacacacaaaaaagggaagtatcagtttctctgttcaaaaaagaagaaaaagaaaataaaaggaagaaaactcgagttgccgccgtcaaccaaacaagtcggagaagcagccctcgcaaaaccctcccctcgatggccggtgtgccaccgccgccgcggcagctcgatgtgcggcgcttcgcggccgcccgcgccagcgaactccgctccctctacgcagccgtatcgtcccgactcgacgacgccggcggccggcatcagccccgttcggcgcgccgccgcaccacagggcacctacccagcaagcgccgccgccggggagccggagaggtgggccccggggatgacgatggcctcccggcgcggaaacagtccaggagggtgaggcggcggcgggagctcgctgccaaccccgcggaggggttctcggtcgccggcgacggtgcgcggcggctgcgcacgcacctgtggtatgcgaaaaggttctccatggagaggcggtggacattcatcttgcccgtcggcgcccaggggaggggtaagggctcaaggagtgttctcaagcgtctgaaaaatgggacaactatccatgatgctggctacttcattccaatagagctggatggtccagaggacgccctgttatccgttctcagaatggttctgcgcccatcgcctgcagaaaaaacacccgatttgaagcatctacaggatcaagttatgcgagctttgggatgttaggagtatgcattctcaaattgttggaccagtaacatatatgtggcgtccattctcaagagcagatgacaaatctgggattgaaggagatcagtgtacttctcactgcattcacgatgaaagcggcaattcctcacgacgccagttgtggatatggattcatcctgctgcacttgatgatggaattagtgcaatacaatttgcatgtgagagacagattcaagattctggtggtgtggtcaaatgttgttcattagagggaaaaattggaagattggaagtcaatggatgcaaggctatgcaatctcttaagaagattttgcatccaaccagttcaagtaagatcaacacgatatcaacaagtgatatctccgcatcaactgatactctcctggattcctgtattgcccctcatcttttgaaagcttctgtcattagtaatgctgagattcttcaacctggtgctatactatccatgagcgaagtttgggagaaagatgtagccccaaatgctaatgaggcgtcatcagaagttgcaaatatattgccattgatgtggatgcaccctgggaaacatgatatactcctttctgactgtagggaactgtgggactccaggcaaaccataaatcctcctgtgtcagatgaggttctctgtaaggagaagcactctgaacgtataaagtttttctgcttggattcaggaaatgatcaagagcaaacaacacaagagaaggacaacttcattcgatcctgcccggttattcttttgaaacatgccagagaaggaataccttctctagggtggtccatcattctacctttgagttgggtgaaacctttctggctctttctagtatctcatggtgcccatgcaattggcttaagagagagacggtggattgcagcaaagttgagaatgccatgctttccttatgattatccagatagcaaagcgtatgcatcatacatgtccaaagaagctgctggttttgataaagtagttgagcgccgccctgttgccaagagaccaccaagagttcctgtgcctcctttatggcactgtatcatgacttgttttcgtaaagattatgatggcatattgggtgttcttgaagtagacgacttggtgcgggctaacatggtattacctaaaaactcttctgcacattgcgaatctggagacgcagaaccatcgcaagcaaatgttgcatccttgcaacttcatgtgccaagaaccacccaaatgttgagacagtatgtggaagaatttgataggaagtatctgagctcatcatctgacatgaaagtggattctgatgaacccaacctagcttctgataacactgtcggcatgacacggttcgcgagtgaattatgccttacaagggttctgatccgagctttcaaggaaggttcttttgaagagggtgcagttgtttgtgccccattacctgcagaactttcagcttggaaaatcagatcaaaggaagaagaggaagaatgcgtagaaaaatgggagctccagcttcctcagtcccatgttagttcctatttctcgtggtttgatcccagcacgagcagcctccagttgcctacggatggcgtcgcacgggaggcgttcaggtggccgataggctttgtcaccagtggtttcatccatggaagtaacgggcaagacgcagtggcggtcgcattctgcgaggcaaagcttctggcagcgttgaggcgacagcaatggacgcatggaaacttgcagagccgggaggtgtgcgtccttgtcaggaacgcgagatcggctgcctaccgacgagcgctggccaccaccgtcctggagcatcaggaatcagacctagcgtttctgtagtctagtcgggaacctgttgacgttgattttttctctctctctcccttttggagttccatccatcctccactcatccgttgatgaacctaagtaatttactggtgattacagtttatttgtgcgatgcaaaatcattaaacagaagaagtaaatgcatctatctcatttgacggatttcaatgatttactgttacatagtatgaataataataaagcagctcgtccggaaaaatga

SEQ ID NO: 67576 - DNA, 3508 bp, Zea Mays
ctggcttaattcatactccctgtaccgagtactgtgagcgacagcatcagcccagccatcaggtgtgccagtgcagtggtctgggccggaggagagcagcagcccactggattgcaggaagccgaatgcattgggccgggcctccatcacaacgtctcatctctaagcgcgcttgtctgtgctccaaatacacacacaaaaaagggaagtatcagtttctctgttcaaaaaagaagaaaaagaaaataaaaggaagaaaactcgagttgccgccgtcaaccaaacaagtcggagaagcagccctcgcaaaaccctcccctcgatggccggtgtgccaccgccgccgcggcagctcgatgtgcggcgcttcgcggccgcccgcgccagcgaactccgctccctctacgcagccgtatcgtcccgactcgacgacgccggcggccggcatcagccccgttcggcgcgccgccgcaccacagggcacctacccagcaagcgccgccgccggggagccggagaggtgggccccggggatgacgatggcctcccggcgcggaaacagtccaggagggtgaggcggcggcgggagctcgctgccaaccccgcggaggggttctcggtcgccggcgacggtgcgcggcggctgcgcacgcacctgtggtatgcgaaaaggttctccatggagaggcggtggacattcatcttgcccgtcggcgcccaggggaggggtaagggctcaaggagtgttctcaagcgtctgaaaaatgggacaactatccatgatgctggctacttcattccaatagagctggatggtccagaggacgccctgttatccgttctcagaatggttctgcgcccatcgcctgcagaaaaaacacccgatttgaagcatctacaggatcaagttatgcgagctttgggatgttaggagtatgcattctcaaattgttggaccagtaacatatatgtggcgtccattctcaagagcagatgacaaatctgggattgaaggagatcagtgtacttctcactgcattcacgatgaaagcggcaattcctcacgacgccagttgtggatatggattcatcctgctgcacttgatgatggaattagtgcaatacaatttgcatgtgagagacaggatgcaccatgatctgggttttataggaggaagagaacgacaagaaaggaaacctcgtgcccccttttttgtcggtagcttctgtaaacaaacagatgagttcaagtactatgttttgaactgttgaccagaaaaatactagtcattttgttcttttcatggttgaaggtatcatttaccagtttttatatcctaatgagaaacatccacctgttcagtacctaagcactttagaaattgctgttttcatgatctgaatgtaggaattaagatgctatttggtgagtataatttatcttgtgcaatgtaatccttactgctgcgtaacagttacaagtagtaagtttccttgtaatactattcctgctttcatctcaccctataaagtcctgcccttcactacagattcaagattctggtggtgtggtcaaatgttgttcattagagggaaaaattggaagattggaagtcaatggatgcaaggctatgcaatctcttaagaagattttgcatccaaccagttcaagtaagatcaacacgatatcaacaagtgatatctccgcatcaactgatactctcctggattcctgtattgcccctcatcttttgaaagcttctgtcattagtaatgctgagattcttcaacctggtgctatactatccatggtagttcatgaccccagggaagtttcagtcaagggaaatagattcttctaaaatagtctcccatgacaaacagagcgaagtttgggagaaagatgtagccccaaatgctaatgaggcgtcatcagaagttgcaaatatattgccattgatgtggatgcaccctgggaaacatgatatactcctttctgactgtagggaactgtgggactccaggcaaaccataaatcctcctgtgtcagatgaggttctctgtaaggagaagcactctgaacgtataaagtttttctgcttggattcaggaaatgatcaagagcaaacaacacaagagaaggacaacttcattcgatcctgcccggttattcttttgaaacatgccagagaaggaataccttctctagggtggtccatcattctacctttgagttgggtgaaacctttctggctctttctagtatctcatggtgcccatgcaattggcttaagagagagacggtggattgcagcaaagttgagaatgccatgctttccttatgattatccagatagcaaagcgtatgcatcatacatgtccaaagaagctgctggttttgataaagtagttgagcgccgccctgttgccaagagaccaccaagagttcctgtgcctcctttatggcactgtatcatgacttgttttcgtaaagattatgatggcatattgggtgttcttgaagtagacgacttggtgcgggctaacatggtattacctaaaaactcttctgcacattgcgaatctggagacgcagaaccatcgcaagcaaatgttgcatccttgcaacttcatgtgccaagaaccacccaaatgttgagacagtatgtggaagaatttgataggaagtatctgagctcatcatctgacatgaaagtggattctgatgaacccaacctagcttctgataacactgtcggcatgacacggttcgcgagtgaattatgccttacaagggttctgatccgagctttcaaggaaggttcttttgaagagggtgcagttgtttgtgccccattacctgcagaactttcagcttggaaaatcagatcaaaggaagaagaggaagaatgcgtagaaaaatgggagctccagcttcctcagtcccatgttagttcctatttctcgtggtttgatcccagcacgagcagcctccagttgcctacggatggcgtcgcacgggaggcgttcaggtggccgataggctttgtcaccagtggtttcatccatggaagtaacgggcaagacgcagtggcggtcgcattctgcgaggcaaagcttctggcagcgttgaggcgacagcaatggacgcatggaaacttgcagagccgggaggtgtgcgtccttgtcaggaacgcgagatcggctgcctaccgacgagcgctggccaccaccgtcctggagcatcaggaatcagacctagcgtttctgtagtctagtcgggaacctgttgacgttgattttttctctctctctcccttttggagttccatccatcctccactcatccgttgatgaacctaagtaatttactggtgattacagtttatttgtgcgatgcaaaatcattaaacagaagaagtaaatgcatctatctcatttgacggatttcaatgatttactgttacatagtatgaataataataaagcagctcgtccggaaaaatga

SEQ ID NO: 67577 - DNA, 2854 bp, Zea Mays
ctggcttaattcatactccctgtaccgagtactgtgagcgacagcatcagcccagccatcaggtgtgccagtgcagtggtctgggccggaggagagcagcagcccactggattgcaggaagccgaatgcattgggccgggcctccatcacaacgtctcatctctaagcgcgcttgtctgtgctccaaatacacacacaaaaaagggaagtatcagtttctctgttcaaaaaagaagaaaaagaaaataaaaggaagaaaactcgagttgccgccgtcaaccaaacaagtcggagaagcagccctcgcaaaaccctcccctcgatggccggtgtgccaccgccgccgcggcagctcgatgtgcggcgcttcgcggccgcccgcgccagcgaactccgctccctctacgcagccgtatcgtcccgactcgacgacgccggcggccggcatcagccccgttcggcgcgccgccgcaccacagggcacctacccagcaagcgccgccgccggggagccggagaggtgggccccggggatgacgatggcctcccggcgcggaaacagtccaggagggtgaggcggcggcgggagctcgctgccaaccccgcggaggggttctcggtcgccggcgacggtgcgcggcggctgcgcacgcacctgtggtatgcgaaaaggttctccatggagaggcggtggacattcatcttgcccgtcggcgcccaggggaggggtaagggctcaaggagtgttctcaagcgtctgaaaaatgggacaactatccatgatgctggctacttcattccaatagagctggatggtccagaggacgccctgttatccgttctcagaatggttctgcgcccatcgcctgcagaaaaaacacccgatttgaagcatctacaggatcaagttatgcgaggtgtttgctatgagaatgctatgctttgggatgttaggagtatgcattctcaaattgttggaccagtaacatatatgtggcgtccattctcaagagcagatgacaaatctgggattgaaggagatcagtgtacttctcactgcattcacgatgaaagcggcaattcctcacgacgccagttgtggatatggattcatcctgctgcacttgatgatggaattagtgcaatacaatttgcatgtgagagacagattcaagattctggtggtgtggtcaaatgttgttcattagagggaaaaattggaagattggaagtcaatggatgcaaggctatgcaatctcttaagaagattttgcatccaaccagttcaagtaagatcaacacgatatcaacaagtgatatctccgcatcaactgatactctcctggattcctggaactgtgggactccaggcaaaccataaatcctcctgtgtcagatgaggttctctgtaaggagaagcactctgaacgtataaagtttttctgcttggattcaggaaatgatcaagagcaaacaacacaagagaaggacaacttcattcgatcctgcccggttattcttttgaaacatgccagagaaggaataccttctctagggtggtccatcattctacctttgagttgggtgaaacctttctggctctttctagtatctcatggtgcccatgcaattggcttaagagagagacggtggattgcagcaaagttgagaatgccatgctttccttatgattatccagatagcaaagcgtatgcatcatacatgtccaaagaagctgctggttttgataaagtagttgagcgccgccctgttgccaagagaccaccaagagttcctgtgcctcctttatggcactgtatcatgacttgttttcgtaaagattatgatggcatattgggtgttcttgaagtagacgacttggtgcgggctaacatggtattacctaaaaactcttctgcacattgcgaatctggagacgcagaaccatcgcaagcaaatgttgcatccttgcaacttcatgtgccaagaaccacccaaatgttgagacagtatgtggaagaatttgataggaagtatctgagctcatcatctgacatgaaagtggattctgatgaacccaacctagcttctgataacactgtcggcatgacacggttcgcgagtgaattatgccttacaagggttctgatccgagctttcaaggaaggttcttttgaagagggtgcagttgtttgtgccccattacctgcagaactttcagcttggaaaatcagatcaaaggaagaagaggaagaatgcgtagaaaaatgggagctccagcttcctcagtcccatgttagttcctatttctcgtggtttgatcccagcacgagcagcctccagttgcctacggatggcgtcgcacgggaggcgttcaggtggccgataggctttgtcaccagtggtttcatccatggaagtaacgggcaagacgcagtggcggtcgcattctgcgaggcaaagcttctggcagcgttgaggcgacagcaatggacgcatggaaacttgcagagccgggaggtgtgcgtccttgtcaggaacgcgagatcggctgcctaccgacgagcgctggccaccaccgtcctggagcatcaggaatcagacctagcgtttctgtagtctagtcgggaacctgttgacgttgattttttctctctctctcccttttggagttccatccatcctccactcatccgttgatgaacctaagtaatttactggtgattacagtttatttgtgcgatgcaaaatcattaaacagaagaagtaaatgcatctatctcatttgacggatttcaatgatttactgttacatagtatgaataataataaagcagctcgtccggaaaaatga

SEQ ID NO: 67578 - DNA, 2984 bp, Zea Mays
ctggcttaattcatactccctgtaccgagtactgtgagcgacagcatcagcccagccatcaggtgtgccagtgcagtggtctgggccggaggagagcagcagcccactggattgcaggaagccgaatgcattgggccgggcctccatcacaacgtctcatctctaagcgcgcttgtctgtgctccaaatacacacacaaaaaagggaagtatcagtttctctgttcaaaaaagaagaaaaagaaaataaaaggaagaaaactcgagttgccgccgtcaaccaaacaagtcggagaagcagccctcgcaaaaccctcccctcgatggccggtgtgccaccgccgccgcggcagctcgatgtgcggcgcttcgcggccgcccgcgccagcgaactccgctccctctacgcagccgtatcgtcccgactcgacgacgccggcggccggcatcagccccgttcggcgcgccgccgcaccacagggcacctacccagcaagcgccgccgccggggagccggagaggtgggccccggggatgacgatggcctcccggcgcggaaacagtccaggagggtgaggcggcggcgggagctcgctgccaaccccgcggaggggttctcggtcgccggcgacggtgcgcggcggctgcgcacgcacctgtggtatgcgaaaaggttctccatggagaggcggtggacattcatcttgcccgtcggcgcccaggggaggggtaagggctcaaggagtgttctcaagcgtctgaaaaatgggacaactatccatgatgctggctacttcattccaatagagctggatggtccagaggacgccctgttatccgttctcagaatggttctgcgcccatcgcctgcagaaaaaacacccgatttgaagcatctacaggatcaagttatgcgaggtgtttgctatgagaatgctatgctttgggatgttaggagtatgcattctcaaattgttggaccagtaacatatatgtggcgtccattctcaagagcagatgacaaatctgggattgaaggagatcagtgtacttctcactgcattcacgatgaaagcggcaattcctcacgacgccagttgtggatatggattcatcctgctgcacttgatgatggaattagtgcaatacaatttgcatgtgagagacagattcaagattctggtggtgtggtcaaatgttgttcattagagggaaaaattggaagattggaagtcaatggatgcaaggctatgcaatctcttaagaagattttgcatccaaccagttcaagtaagatcaacacgatatcaacaagtgatatctccgcatcaactgatactctcctggattcctgtattgcccctcatcttttgaaagcttctgtcattagtaatgctgagattcttcaacctggtgctatactatccatggtagttcatgaccccagggaagtttcagtcaagggaaatagattcttctaaaatagtctcccatgacaaacagagcgaagtttgggagaaagatgtagccccaaatgctaatgaggcgtcatcagaagttgcaaatatattgccattgatgtggatgcaccctgggaaacatgatatactcctttctgactgaaatgatcaagagcaaacaacacaagagaaggacaacttcattcgatcctgcccggttattcttttgaaacatgccagagaaggaataccttctctagggtggtccatcattctacctttgagttgggtgaaacctttctggctctttctagtatctcatggtgcccatgcaattggcttaagagagagacggtggattgcagcaaagatagcaaagcgtatgcatcatacatgtccaaagaagctgctggttttgataaagtagttgagcgccgccctgttgccaagagaccaccaagagttcctgtgcctcctttatggcactgtatcatgacttgttttcgtaaagattatgatggcatattgggtgttcttgaagtagacgacttggtgcgggctaacatggtattacctaaaaactcttctgcacattgcgaatctggagacgcagaaccatcgcaagcaaatgttgcatccttgcaacttcatgtgccaagaaccacccaaatgttgagacagtatgtggaagaatttgataggaagtatctgagctcatcatctgacatgaaagtggattctgatgaacccaacctagcttctgataacactgtcggcatgacacggttcgcgagtgaattatgccttacaagggttctgatccgagctttcaaggaaggttcttttgaagagggtgcagttgtttgtgccccattacctgcagaactttcagcttggaaaatcagatcaaaggaagaagaggaagaatgcgtagaaaaatgggagctccagcttcctcagtcccatgttagttcctatttctcgtggtttgatcccagcacgagcagcctccagttgcctacggatggcgtcgcacgggaggcgttcaggtggccgataggctttgtcaccagtggtttcatccatggaagtaacgggcaagacgcagtggcggtcgcattctgcgaggcaaagcttctggcagcgttgaggcgacagcaatggacgcatggaaacttgcagagccgggaggtgtgcgtccttgtcaggaacgcgagatcggctgcctaccgacgagcgctggccaccaccgtcctggagcatcaggaatcagacctagcgtttctgtagtctagtcgggaacctgttgacgttgattttttctctctctctcccttttggagttccatccatcctccactcatccgttgatgaacctaagtaatttactggtgattacagtttatttgtgcgatgcaaaatcattaaacagaagaagtaaatgcatctatctcatttgacggatttcaatgatttactgttacatagtatgaataataataaagcagctcgtccggaaaaatga

SEQ ID NO: 67579 - DNA, 2936 bp, Zea Mays
ctggcttaattcatactccctgtaccgagtactgtgagcgacagcatcagcccagccatcaggtgtgccagtgcagtggtctgggccggaggagagcagcagcccactggattgcaggaagccgaatgcattgggccgggcctccatcacaacgtctcatctctaagcgcgcttgtctgtgctccaaatacacacacaaaaaagggaagtatcagtttctctgttcaaaaaagaagaaaaagaaaataaaaggaagaaaactcgagttgccgccgtcaaccaaacaagtcggagaagcagccctcgcaaaaccctcccctcgatggccggtgtgccaccgccgccgcggcagctcgatgtgcggcgcttcgcggccgcccgcgccagcgaactccgctccctctacgcagccgtatcgtcccgactcgacgacgccggcggccggcatcagccccgttcggcgcgccgccgcaccacagggcacctacccagcaagcgccgccgccggggagccggagaggtgggccccggggatgacgatggcctcccggcgcggaaacagtccaggagggtgaggcggcggcgggagctcgctgccaaccccgcggaggggttctcggtcgccggcgacggtgcgcggcggctgcgcacgcacctgtggtatgcgaaaaggttctccatggagaggcggtggacattcatcttgcccgtcggcgcccaggggaggggtaagggctcaaggagtgttctcaagcgtctgaaaaatgggacaactatccatgatgctggctacttcattccaatagagctggatggtccagagctttgggatgttaggagtatgcattctcaaattgttggaccagtaacatatatgtggcgtccattctcaagagcagatgacaaatctgggattgaaggagatcagtgtacttctcactgcattcacgatgaaagcggcaattcctcacgacgccagttgtggatatggattcatcctgctgcacttgatgatggaattagtgcaatacaatttgcatgtgagagacagattcaagattctggtggtgtggtcaaatgttgttcattagagggaaaaattggaagattggaagtcaatggatgcaaggctatgcaatctcttaagaagattttgcatccaaccagttcaagtaagatcaacacgatatcaacaagtgatatctccgcatcaactgatactctcctggattcctgtattgcccctcatcttttgaaagcttctgtcattagtaatgctgagattcttcaacctggtgctatactatccatgagcgaagtttgggagaaagatgtagccccaaatgctaatgaggcgtcatcagaagttgcaaatatattgccattgatgtggatgcaccctgggaaacatgatatactcctttctgactgtagggaactgtgggactccaggcaaaccataaatcctcctgtgtcagatgaggttctctgtaaggagaagcactctgaacgtataaagtttttctgcttggattcaggaaatgatcaagagcaaacaacacaagagaaggacaacttcattcgatcctgcccggttattcttttgaaacatgccagagaaggaataccttctctagggtggtccatcattctacctttgagttgggtgaaacctttctggctctttctagtatctcatggtgcccatgcaattggcttaagagagagacggtggattgcagcaaagttgagaatgccatgctttccttatgattatccagatagcaaagcgtatgcatcatacatgtccaaagaagctgctggttttgataaagtagttgagcgccgccctgttgccaagagaccaccaagagttcctgtgcctcctttatggcactgtatcatgacttgttttcgtaaagattatgatggcatattgggtgttcttgaagtagacgacttggtgcgggctaacatggtattacctaaaaactcttctgcacattgcgaatctggagacgcagaaccatcgcaagcaaatgttgcatccttgcaacttcatgtgccaagaaccacccaaatgttgagacagtatgtggaagaatttgataggaagtatctgagctcatcatctgacatgaaagtggattctgatgaacccaacctagcttctgataacactgtcggcatgacacggttcgcgagtgaattatgccttacaagggttctgatccgagctttcaaggaaggttcttttgaagagggtgcagttgtttgtgccccattacctgcagaactttcagcttggaaaatcagatcaaaggaagaagaggaagaatgcgtagaaaaatgggagctccagcttcctcagtcccatgttagttcctatttctcgtggtttgatcccagcacgagcagcctccagttgcctacggatggcgtcgcacgggaggcgttcaggtggccgataggctttgtcaccagtggtttcatccatggaagtaacgggcaagacgcagtggcggtcgcattctgcgaggcaaagcttctggcagcgttgaggcgacagcaatggacgcatggaaacttgcagagccgggaggtgtgcgtccttgtcaggaacgcgagatcggctgcctaccgacgagcgctggccaccaccgtcctggagcatcaggaatcagacctagcgtttctgtagtctagtcgggaacctgttgacgttgattttttctctctctctcccttttggagttccatccatcctccactcatccgttgatgaacctaagtaatttactggtgattacagtttatttgtgcgatgcaaaatcattaaacagaagaagtaaatgcatctatctcatttgacggatttcaatgatttactgttacatagtatgaataataataaagcagctcgtccggaaaaatga

SEQ ID NO: 67580 - DNA, 2737 bp, Zea Mays
ctggcttaattcatactccctgtaccgagtactgtgagcgacagcatcagcccagccatcaggtgtgccagtgcagtggtctgggccggaggagagcagcagcccactggattgcaggaagccgaatgcattgggccgggcctccatcacaacgtctcatctctaagcgcgcttgtctgtgctccaaatacacacacaaaaaagggaagtatcagtttctctgttcaaaaaagaagaaaaagaaaataaaaggaagaaaactcgagttgccgccgtcaaccaaacaagtcggagaagcagccctcgcaaaaccctcccctcgatggccggtgtgccaccgccgccgcggcagctcgatgtgcggcgcttcgcggccgcccgcgccagcgaactccgctccctctacgcagccgtatcgtcccgactcgacgacgccggcggccggcatcagccccgttcggcgcgccgccgcaccacagggcacctacccagcaagcgccgccgccggggagccggagaggtgggccccggggatgacgatggcctcccggcgcggaaacagtccaggagggtgaggcggcggcgggagctcgctgccaaccccgcggaggggttctcggtcgccggcgacggtgcgcggcggctgcgcacgcacctgtggtatgcgaaaaggttctccatggagaggcggtggacattcatcttgcccgtcggcgcccaggggaggggtaagggctcaaggagtgttctcaagcgtctgaaaaatgggacaactatccatgatgctggctacttcattccaatagagctggatggtccagagctttgggatgttaggagtatgcattctcaaattgttggaccagtaacatatatgtggcgtccattctcaagagcagatgacaaatctgggattgaaggagatcagtgtacttctcactgcattcacgatgaaagcggcaattcctcacgacgccagttgtggatatggattcatcctgctgcacttgatgatggaattagtgcaatacaatttgcatgtgagagacagattcaagattctggtggtgtggtcaaatgttgttcattagagggaaaaattggaagattggaagtcaatggatgcaaggctatgcaatctcttaagaagattttgcatccaaccagttcaagtaagatcaacacgatatcaacaagtgatatctccgcatcaactgatactctcctggattcctggaactgtgggactccaggcaaaccataaatcctcctgtgtcagatgaggttctctgtaaggagaagcactctgaacgtataaagtttttctgcttggattcaggaaatgatcaagagcaaacaacacaagagaaggacaacttcattcgatcctgcccggttattcttttgaaacatgccagagaaggaataccttctctagggtggtccatcattctacctttgagttgggtgaaacctttctggctctttctagtatctcatggtgcccatgcaattggcttaagagagagacggtggattgcagcaaagttgagaatgccatgctttccttatgattatccagatagcaaagcgtatgcatcatacatgtccaaagaagctgctggttttgataaagtagttgagcgccgccctgttgccaagagaccaccaagagttcctgtgcctcctttatggcactgtatcatgacttgttttcgtaaagattatgatggcatattgggtgttcttgaagtagacgacttggtgcgggctaacatggtattacctaaaaactcttctgcacattgcgaatctggagacgcagaaccatcgcaagcaaatgttgcatccttgcaacttcatgtgccaagaaccacccaaatgttgagacagtatgtggaagaatttgataggaagtatctgagctcatcatctgacatgaaagtggattctgatgaacccaacctagcttctgataacactgtcggcatgacacggttcgcgagtgaattatgccttacaagggttctgatccgagctttcaaggaaggttcttttgaagagggtgcagttgtttgtgccccattacctgcagaactttcagcttggaaaatcagatcaaaggaagaagaggaagaatgcgtagaaaaatgggagctccagcttcctcagtcccatgttagttcctatttctcgtggtttgatcccagcacgagcagcctccagttgcctacggatggcgtcgcacgggaggcgttcaggtggccgataggctttgtcaccagtggtttcatccatggaagtaacgggcaagacgcagtggcggtcgcattctgcgaggcaaagcttctggcagcgttgaggcgacagcaatggacgcatggaaacttgcagagccgggaggtgtgcgtccttgtcaggaacgcgagatcggctgcctaccgacgagcgctggccaccaccgtcctggagcatcaggaatcagacctagcgtttctgtagtctagtcgggaacctgttgacgttgattttttctctctctctcccttttggagttccatccatcctccactcatccgttgatgaacctaagtaatttactggtgattacagtttatttgtgcgatgcaaaatcattaaacagaagaagtaaatgcatctatctcatttgacggatttcaatgatttactgttacatagtatgaataataataaagcagctcgtccggaaaaatga

SEQ ID NO: 67581 - DNA, 3053 bp, Zea Mays
ctggcttaattcatactccctgtaccgagtactgtgagcgacagcatcagcccagccatcaggtgtgccagtgcagtggtctgggccggaggagagcagcagcccactggattgcaggaagccgaatgcattgggccgggcctccatcacaacgtctcatctctaagcgcgcttgtctgtgctccaaatacacacacaaaaaagggaagtatcagtttctctgttcaaaaaagaagaaaaagaaaataaaaggaagaaaactcgagttgccgccgtcaaccaaacaagtcggagaagcagccctcgcaaaaccctcccctcgatggccggtgtgccaccgccgccgcggcagctcgatgtgcggcgcttcgcggccgcccgcgccagcgaactccgctccctctacgcagccgtatcgtcccgactcgacgacgccggcggccggcatcagccccgttcggcgcgccgccgcaccacagggcacctacccagcaagcgccgccgccggggagccggagaggtgggccccggggatgacgatggcctcccggcgcggaaacagtccaggagggtgaggcggcggcgggagctcgctgccaaccccgcggaggggttctcggtcgccggcgacggtgcgcggcggctgcgcacgcacctgtggtatgcgaaaaggttctccatggagaggcggtggacattcatcttgcccgtcggcgcccaggggaggggtaagggctcaaggagtgttctcaagcgtctgaaaaatgggacaactatccatgatgctggctacttcattccaatagagctggatggtccagaggacgccctgttatccgttctcagaatggttctgcgcccatcgcctgcagaaaaaacacccgatttgaagcatctacaggatcaagttatgcgaggtgtttgctatgagaatgctatgctttgggatgttaggagtatgcattctcaaattgttggaccagtaacatatatgtggcgtccattctcaagagcagatgacaaatctgggattgaaggagatcagtgtacttctcactgcattcacgatgaaagcggcaattcctcacgacgccagttgtggatatggattcatcctgctgcacttgatgatggaattagtgcaatacaatttgcatgtgagagacagattcaagattctggtggtgtggtcaaatgttgttcattagagggaaaaattggaagattggaagtcaatggatgcaaggctatgcaatctcttaagaagattttgcatccaaccagttcaagtaagatcaacacgatatcaacaagtgatatctccgcatcaactgatactctcctggattcctgtattgcccctcatcttttgaaagcttctgtcattagtaatgctgagattcttcaacctggtgctatactatccatgagcgaagtttgggagaaagatgtagccccaaatgctaatgaggcgtcatcagaagttgcaaatatattgccattgatgtggatgcaccctgggaaacatgatatactcctttctgactgtagggaactgtgggactccaggcaaaccataaatcctcctgtgtcagatgaggttctctgtaaggagaagcactctgaacgtataaagtttttctgcttggattcaggaaatgatcaagagcaaacaacacaagagaaggacaacttcattcgatcctgcccggttattcttttgaaacatgccagagaaggaataccttctctagggtggtccatcattctacctttgagttgggtgaaacctttctggctctttctagtatctcatggtgcccatgcaattggcttaagagagagacggtggattgcagcaaagttgagaatgccatgctttccttatgattatccagatagcaaagcgtatgcatcatacatgtccaaagaagctgctggttttgataaagtagttgagcgccgccctgttgccaagagaccaccaagagttcctgtgcctcctttatggcactgtatcatgacttgttttcgtaaagattatgatggcatattgggtgttcttgaagtagacgacttggtgcgggctaacatggtattacctaaaaactcttctgcacattgcgaatctggagacgcagaaccatcgcaagcaaatgttgcatccttgcaacttcatgtgccaagaaccacccaaatgttgagacagtatgtggaagaatttgataggaagtatctgagctcatcatctgacatgaaagtggattctgatgaacccaacctagcttctgataacactgtcggcatgacacggttcgcgagtgaattatgccttacaagggttctgatccgagctttcaaggaaggttcttttgaagagggtgcagttgtttgtgccccattacctgcagaactttcagcttggaaaatcagatcaaaggaagaagaggaagaatgcgtagaaaaatgggagctccagcttcctcagtcccatgttagttcctatttctcgtggtttgatcccagcacgagcagcctccagttgcctacggatggcgtcgcacgggaggcgttcaggtggccgataggctttgtcaccagtggtttcatccatggaagtaacgggcaagacgcagtggcggtcgcattctgcgaggcaaagcttctggcagcgttgaggcgacagcaatggacgcatggaaacttgcagagccgggaggtgtgcgtccttgtcaggaacgcgagatcggctgcctaccgacgagcgctggccaccaccgtcctggagcatcaggaatcagacctagcgtttctgtagtctagtcgggaacctgttgacgttgattttttctctctctctcccttttggagttccatccatcctccactcatccgttgatgaacctaagtaatttactggtgattacagtttatttgtgcgatgcaaaatcattaaacagaagaagtaaatgcatctatctcatttgacggatttcaatgatttactgttacatagtatgaataataataaagcagctcgtccggaaaaatga

SEQ ID NO: 67582 - DNA, 3251 bp, Zea Mays
ctggcttaattcatactccctgtaccgagtactgtgagcgacagcatcagcccagccatcaggtgtgccagtgcagtggtctgggccggaggagagcagcagcccactggattgcaggaagccgaatgcattgggccgggcctccatcacaacgtctcatctctaagcgcgcttgtctgtgctccaaatacacacacaaaaaagggaagtatcagtttctctgttcaaaaaagaagaaaaagaaaataaaaggaagaaaactcgagttgccgccgtcaaccaaacaagtcggagaagcagccctcgcaaaaccctcccctcgatggccggtgtgccaccgccgccgcggcagctcgatgtgcggcgcttcgcggccgcccgcgccagcgaactccgctccctctacgcagccgtatcgtcccgactcgacgacgccggcggccggcatcagccccgttcggcgcgccgccgcaccacagggcacctacccagcaagcgccgccgccggggagccggagaggtgggccccggggatgacgatggcctcccggcgcggaaacagtccaggagggtgaggcggcggcgggagctcgctgccaaccccgcggaggggttctcggtcgccggcgacggtgcgcggcggctgcgcacgcacctgtggtatgcgaaaaggttctccatggagaggcggtggacattcatcttgcccgtcggcgcccaggggaggggtaagggctcaaggagtgttctcaagcgtctgaaaaatgggacaactatccatgatgctggctacttcattccaatagagctggatggtccagaggacgccctgttatccgttctcagaatggttctgcgcccatcgcctgcagaaaaaacacccgatttgaagcatctacaggatcaagttatgcgaggtgtttgctatgagaatgctatggtatttacatgttcaccacaagacagtatggggtacaaatgtttgaagtgacaactgtgacttaattgttctttccagctttgggatgttaggagtatgcattctcaaattgttggaccagtaacatatatgtggcgtccattctcaagagcagatgacaaatctgggattgaaggagatcagtgtacttctcactgcattcacgatgaaagcggcaattcctcacgacgccagttgtggatatggattcatcctgctgcacttgatgatggaattagtgcaatacaatttgcatgtgagagacagagaacttatacttctagtttgagtgtgcggatattcaagggagatgaattaagatgctatttggtgagtataatttatcttgtgcaatgtaatccttactgctgcgtaacagttacaagtaagggaaaaattggaagattggaagtcaatggatgcaaggctatgcaatctcttaagaagattttgcatccaaccagttcaagtaagatcaacacgatatcaacaagtgatatctccgcatcaactgatactctcctggattcctgtattgcccctcatcttttgaaagcttctgtcattagtaatgctgagattcttcaacctggtgctatactatccatggtagttcatgaccccagggaagtttcagtcaagggaaatagattcttctaaaatagtctcccatgacaaacagagcgaagtttgggagaaagatgtagccccaaatgctaatgaggcgtcatcagaagttgcaaatatattgccattgatgtggatgcaccctgggaaacatgatatactcctttctgactgtagggaactgtgggactccaggcaaaccataaatcctcctgtgtcagatgaggttctctgtaaggagaagcactctgaacgtataaagtttttctgcttggattcaggaaatgatcaagagcaaacaacacaagagaaggacaacttcattcgatcctgcccggttattcttttgaaacatgccagagaaggaataccttctctagggtggtccatcattctacctttgagttgggtgaaacctttctggctctttctagtatctcatggtgcccatgcaattggcttaagagagagacggtggattgcagcaaagatagcaaagcgtatgcatcatacatgtccaaagaagctgctggttttgataaagtagttgagcgccgccctgttgccaagagaccaccaagagttcctgtgcctcctttatggcactgtatcatgacttgttttcgtaaagattatgatggcatattgggtgttcttgaagtagacgacttggtgcgggctaacatggtattacctaaaaactcttctgcacattgcgaatctggagacgcagaaccatcgcaagcaaatgttgcatccttgcaacttcatgtgccaagaaccacccaaatgttgagacagtatgtggaagaatttgataggaagtatctgagctcatcatctgacatgaaagtggattctgatgaacccaacctagcttctgataacactgtcggcatgacacggttcgcgagtgaattatgccttacaagggttctgatccgagctttcaaggaaggttcttttgaagagggtgcagttgtttgtgccccattacctgcagaactttcagcttggaaaatcagatcaaaggaagaagaggaagaatgcgtagaaaaatgggagctccagcttcctcagtcccatgttagttcctatttctcgtggtttgatcccagcacgagcagcctccagttgcctacggatggcgtcgcacgggaggcgttcaggtggccgataggctttgtcaccagtggtttcatccatggaagtaacgggcaagacgcagtggcggtcgcattctgcgaggcaaagcttctggcagcgttgaggcgacagcaatggacgcatggaaacttgcagagccgggaggtgtgcgtccttgtcaggaacgcgagatcggctgcctaccgacgagcgctggccaccaccgtcctggagcatcaggaatcagacctagcgtttctgtagtctagtcgggaacctgttgacgttgattttttctctctctctcccttttggagttccatccatcctccactcatccgttgatgaacctaagtaatttactggtgattacagtttatttgtgcgatgcaaaatcattaaacagaagaagtaaatgcatctatctcatttgacggatttcaatgatttactgttacatagtatgaataataataaagcagctcgtccggaaaaatga

SEQ ID NO: 67583 - DNA, 3235 bp, Zea Mays
ctggcttaattcatactccctgtaccgagtactgtgagcgacagcatcagcccagccatcaggtgtgccagtgcagtggtctgggccggaggagagcagcagcccactggattgcaggaagccgaatgcattgggccgggcctccatcacaacgtctcatctctaagcgcgcttgtctgtgctccaaatacacacacaaaaaagggaagtatcagtttctctgttcaaaaaagaagaaaaagaaaataaaaggaagaaaactcgagttgccgccgtcaaccaaacaagtcggagaagcagccctcgcaaaaccctcccctcgatggccggtgtgccaccgccgccgcggcagctcgatgtgcggcgcttcgcggccgcccgcgccagcgaactccgctccctctacgcagccgtatcgtcccgactcgacgacgccggcggccggcatcagccccgttcggcgcgccgccgcaccacagggcacctacccagcaagcgccgccgccggggagccggagaggtgggccccggggatgacgatggcctcccggcgcggaaacagtccaggagggtgaggcggcggcgggagctcgctgccaaccccgcggaggggttctcggtcgccggcgacggtgcgcggcggctgcgcacgcacctgtggtatgcgaaaaggttctccatggagaggcggtggacattcatcttgcccgtcggcgcccaggggaggggtaagggctcaaggagtgttctcaagcgtctgaaaaatgggacaactatccatgatgctggctacttcattccaatagagctggatggtccagagctttgggatgttaggagtatgcattctcaaattgttggaccagtaacatatatgtggcgtccattctcaagagcagatgacaaatctgggattgaaggagatcagtgtacttctcactgcattcacgatgaaagcggcaattcctcacgacgccagttgtggatatggattcatcctgctgcacttgatgatggaattagtgcaatacaatttgcatgtgagagacaggatgcaccatgatctgggttttataggaggaagagaacgacaagaaaggaaacctcgtgcccccttttttgtcggtagcttctgtaaacaaacagatgagttcaagtactatgttttgaactgttgaccagaaaaatactagtcattttgttcttttcatggttgaaggtatcatttaccagtttttatatcctaatgagaaacatccacctgttcagtacctaagcactttagaaattgctgttttcatgatctgaatgtaggaattaagatgctatttggtgagtataatttatcttgtgcaatgtaatccttactgctgcgtaacagttacaagtaagggaaaaattggaagattggaagtcaatggatgcaaggctatgcaatctcttaagaagattttgcatccaaccagttcaagtaagatcaacacgatatcaacaagtgatatctccgcatcaactgatactctcctggattcctgtattgcccctcatcttttgaaagcttctgtcattagtaatgctgagattcttcaacctggtgctatactatccatgagcgaagtttgggagaaagatgtagccccaaatgctaatgaggcgtcatcagaagttgcaaatatattgccattgatgtggatgcaccctgggaaacatgatatactcctttctgactgtagggaactgtgggactccaggcaaaccataaatcctcctgtgtcagatgaggttctctgtaaggagaagcactctgaacgtataaagtttttctgcttggattcaggaaatgatcaagagcaaacaacacaagagaaggacaacttcattcgatcctgcccggttattcttttgaaacatgccagagaaggaataccttctctagggtggtccatcattctacctttgagttgggtgaaacctttctggctctttctagtatctcatggtgcccatgcaattggcttaagagagagacggtggattgcagcaaagttgagaatgccatgctttccttatgattatccagatagcaaagcgtatgcatcatacatgtccaaagaagctgctggttttgataaagtagttgagcgccgccctgttgccaagagaccaccaagagttcctgtgcctcctttatggcactgtatcatgacttgttttcgtaaagattatgatggcatattgggtgttcttgaagtagacgacttggtgcgggctaacatggtattacctaaaaactcttctgcacattgcgaatctggagacgcagaaccatcgcaagcaaatgttgcatccttgcaacttcatgtgccaagaaccacccaaatgttgagacagtatgtggaagaatttgataggaagtatctgagctcatcatctgacatgaaagtggattctgatgaacccaacctagcttctgataacactgtcggcatgacacggttcgcgagtgaattatgccttacaagggttctgatccgagctttcaaggaaggttcttttgaagagggtgcagttgtttgtgccccattacctgcagaactttcagcttggaaaatcagatcaaaggaagaagaggaagaatgcgtagaaaaatgggagctccagcttcctcagtcccatgttagttcctatttctcgtggtttgatcccagcacgagcagcctccagttgcctacggatggcgtcgcacgggaggcgttcaggtggccgataggctttgtcaccagtggtttcatccatggaagtaacgggcaagacgcagtggcggtcgcattctgcgaggcaaagcttctggcagcgttgaggcgacagcaatggacgcatggaaacttgcagagccgggaggtgtgcgtccttgtcaggaacgcgagatcggctgcctaccgacgagcgctggccaccaccgtcctggagcatcaggaatcagacctagcgtttctgtagtctagtcgggaacctgttgacgttgattttttctctctctctcccttttggagttccatccatcctccactcatccgttgatgaacctaagtaatttactggtgattacagtttatttgtgcgatgcaaaatcattaaacagaagaagtaaatgcatctatctcatttgacggatttcaatgatttactgttacatagtatgaataataataaagcagctcgtccggaaaaatga

SEQ ID NO: 67584 - DNA, 3600 bp, Zea Mays
ctggcttaattcatactccctgtaccgagtactgtgagcgacagcatcagcccagccatcaggtgtgccagtgcagtggtctgggccggaggagagcagcagcccactggattgcaggaagccgaatgcattgggccgggcctccatcacaacgtctcatctctaagcgcgcttgtctgtgctccaaatacacacacaaaaaagggaagtatcagtttctctgttcaaaaaagaagaaaaagaaaataaaaggaagaaaactcgagttgccgccgtcaaccaaacaagtcggagaagcagccctcgcaaaaccctcccctcgatggccggtgtgccaccgccgccgcggcagctcgatgtgcggcgcttcgcggccgcccgcgccagcgaactccgctccctctacgcagccgtatcgtcccgactcgacgacgccggcggccggcatcagccccgttcggcgcgccgccgcaccacagggcacctacccagcaagcgccgccgccggggagccggagaggtgggccccggggatgacgatggcctcccggcgcggaaacagtccaggagggtgaggcggcggcgggagctcgctgccaaccccgcggaggggttctcggtcgccggcgacggtgcgcggcggctgcgcacgcacctgtggtatgcgaaaaggttctccatggagaggcggtggacattcatcttgcccgtcggcgcccaggggaggggtaagggctcaaggagtgttctcaagcgtctgaaaaatgggacaactatccatgatgctggctacttcattccaatagagctggatggtccagagctttgggatgttaggagtatgcattctcaaattgttggaccagtaacatatatgtggcgtccattctcaagagcagatgacaaatctgggattgaaggagatcagtgtacttctcactgcattcacgatgaaagcggcaattcctcacgacgccagttgtggatatggattcatcctgctgcacttgatgatggaattagtgcaatacaatttgcatgtgagagacagagaacttatacttctagtttgagtgtgcggatattcaagggagatgtaagttatgtagaatactttcttttgtcactctctcttttttttttaaatttttgaccaccacaaatatatgactccatgtaaaactttatttgcatttcctattcagattaaaatgcaaactgctcacaaaaaatacaggatgcaccatgatctgggttttataggaggaagagaacgacaagaaaggaaacctcgtgcccccttttttgtcggtagcttctgtaaacaaacagatgagttcaagtactatgttttgaactgttgaccagaaaaatactagtcattttgttcttttcatggttgaaggtatcatttaccagtttttatatcctaatgagaaacatccacctgttcagtacctaagcactttagaaattgctgttttcatgatctgaatgtaggaattaagatgctatttggtgagtataatttatcttgtgcaatgtaatccttactgctgcgtaacagttacaagtagtaagtttccttgtaatactattcctgctttcatctcaccctataaagtcctgcccttcactacagattcaagattctggtggtgtggtcaaatgttgttcattagagggaaaaattggaagattggaagtcaatggatgcaaggctatgcaatctcttaagaagattttgcatccaaccagttcaagtaagatcaacacgatatcaacaagtgatatctccgcatcaactgatactctcctggattcctgtattgcccctcatcttttgaaagcttctgtcattagtaatgctgagattcttcaacctggtgctatactatccatggtagttcatgaccccagggaagtttcagtcaagggaaatagattcttctaaaatagtctcccatgacaaacagagcgaagtttgggagaaagatgtagccccaaatgctaatgaggcgtcatcagaagttgcaaatatattgccattgatgtggatgcaccctgggaaacatgatatactcctttctgactgtagggaactgtgggactccaggcaaaccataaatcctcctgtgtcagatgaggttctctgtaaggagaagcactctgaacgtataaagtttttctgcttggattcaggaaatgatcaagagcaaacaacacaagagaaggacaacttcattcgatcctgcccggttattcttttgaaacatgccagagaaggaataccttctctagggtggtccatcattctacctttgagttgggtgaaacctttctggctctttctagtatctcatggtgcccatgcaattggcttaagagagagacggtggattgcagcaaagttgagaatgccatgctttccttatgattatccagatagcaaagcgtatgcatcatacatgtccaaagaagctgctggttttgataaagtagttgagcgccgccctgttgccaagagaccaccaagagttcctgtgcctcctttatggcactgtatcatgacttgttttcgtaaagattatgatggcatattgggtgttcttgaagtagacgacttggtgcgggctaacatggtattacctaaaaactcttctgcacattgcgaatctggagacgcagaaccatcgcaagcaaatgttgcatccttgcaacttcatgtgccaagaaccacccaaatgttgagacagtatgtggaagaatttgataggaagtatctgagctcatcatctgacatgaaagtggattctgatgaacccaacctagcttctgataacactgtcggcatgacacggttcgcgagtgaattatgccttacaagggttctgatccgagctttcaaggaaggttcttttgaagagggtgcagttgtttgtgccccattacctgcagaactttcagcttggaaaatcagatcaaaggaagaagaggaagaatgcgtagaaaaatgggagctccagcttcctcagtcccatgttagttcctatttctcgtggtttgatcccagcacgagcagcctccagttgcctacggatggcgtcgcacgggaggcgttcaggtggccgataggctttgtcaccagtggtttcatccatggaagtaacgggcaagacgcagtggcggtcgcattctgcgaggcaaagcttctggcagcgttgaggcgacagcaatggacgcatggaaacttgcagagccgggaggtgtgcgtccttgtcaggaacgcgagatcggctgcctaccgacgagcgctggccaccaccgtcctggagcatcaggaatcagacctagcgtttctgtagtctagtcgggaacctgttgacgttgattttttctctctctctcccttttggagttccatccatcctccactcatccgttgatgaacctaagtaatttactggtgattacagtttatttgtgcgatgcaaaatcattaaacagaagaagtaaatgcatctatctcatttgacggatttcaatgatttactgttacatagtatgaataataataaagcagctcgtccggaaaaatga

SEQ ID NO: 67585 - DNA, 3088 bp, Zea Mays
ctggcttaattcatactccctgtaccgagtactgtgagcgacagcatcagcccagccatcaggtgtgccagtgcagtggtctgggccggaggagagcagcagcccactggattgcaggaagccgaatgcattgggccgggcctccatcacaacgtctcatctctaagcgcgcttgtctgtgctccaaatacacacacaaaaaagggaagtatcagtttctctgttcaaaaaagaagaaaaagaaaataaaaggaagaaaactcgagttgccgccgtcaaccaaacaagtcggagaagcagccctcgcaaaaccctcccctcgatggccggtgtgccaccgccgccgcggcagctcgatgtgcggcgcttcgcggccgcccgcgccagcgaactccgctccctctacgcagccgtatcgtcccgactcgacgacgccggcggccggcatcagccccgttcggcgcgccgccgcaccacagggcacctacccagcaagcgccgccgccggggagccggagaggtgggccccggggatgacgatggcctcccggcgcggaaacagtccaggagggtgaggcggcggcgggagctcgctgccaaccccgcggaggggttctcggtcgccggcgacggtgcgcggcggctgcgcacgcacctgtggtatgcgaaaaggttctccatggagaggcggtggacattcatcttgcccgtcggcgcccaggggaggggtaagggctcaaggagtgttctcaagcgtctgaaaaatgggacaactatccatgatgctggctacttcattccaatagagctggatggtccagagctttgggatgttaggagtatgcattctcaaattgttggaccagtaacatatatgtggcgtccattctcaagagcagatgacaaatctgggattgaaggagatcagtgtacttctcactgcattcacgatgaaagcggcaattcctcacgacgccagttgtggatatggattcatcctgctgcacttgatgatggaattagtgcaatacaatttgcatgtgagagacaggaggaagagaacgacaagaaaggaaacctcgtgcccccttttttgtcggtagcttctgtaaacaaacagatgagttcaaattcaagattctggtggtgtggtcaaatgttgttcattagagggaaaaattggaagattggaagtcaatggatgcaaggctatgcaatctcttaagaagattttgcatccaaccagttcaagtaagatcaacacgatatcaacaagtgatatctccgcatcaactgatactctcctggattcctgtattgcccctcatcttttgaaagcttctgtcattagtaatgctgagattcttcaacctggtgctatactatccatggtagttcatgaccccagggaagtttcagtcaagggaaatagattcttctaaaatagtctcccatgacaaacagagcgaagtttgggagaaagatgtagccccaaatgctaatgaggcgtcatcagaagttgcaaatatattgccattgatgtggatgcaccctgggaaacatgatatactcctttctgactgtagggaactgtgggactccaggcaaaccataaatcctcctgtgtcagatgaggttctctgtaaggagaagcactctgaacgtataaagtttttctgcttggattcaggaaatgatcaagagcaaacaacacaagagaaggacaacttcattcgatcctgcccggttattcttttgaaacatgccagagaaggaataccttctctagggtggtccatcattctacctttgagttgggtgaaacctttctggctctttctagtatctcatggtgcccatgcaattggcttaagagagagacggtggattgcagcaaagttgagaatgccatgctttccttatgattatccagatagcaaagcgtatgcatcatacatgtccaaagaagctgctggttttgataaagtagttgagcgccgccctgttgccaagagaccaccaagagttcctgtgcctcctttatggcactgtatcatgacttgttttcgtaaagattatgatggcatattgggtgttcttgaagtagacgacttggtgcgggctaacatggtattacctaaaaactcttctgcacattgcgaatctggagacgcagaaccatcgcaagcaaatgttgcatccttgcaacttcatgtgccaagaaccacccaaatgttgagacagtatgtggaagaatttgataggaagtatctgagctcatcatctgacatgaaagtggattctgatgaacccaacctagcttctgataacactgtcggcatgacacggttcgcgagtgaattatgccttacaagggttctgatccgagctttcaaggaaggttcttttgaagagggtgcagttgtttgtgccccattacctgcagaactttcagcttggaaaatcagatcaaaggaagaagaggaagaatgcgtagaaaaatgggagctccagcttcctcagtcccatgttagttcctatttctcgtggtttgatcccagcacgagcagcctccagttgcctacggatggcgtcgcacgggaggcgttcaggtggccgataggctttgtcaccagtggtttcatccatggaagtaacgggcaagacgcagtggcggtcgcattctgcgaggcaaagcttctggcagcgttgaggcgacagcaatggacgcatggaaacttgcagagccgggaggtgtgcgtccttgtcaggaacgcgagatcggctgcctaccgacgagcgctggccaccaccgtcctggagcatcaggaatcagacctagcgtttctgtagtctagtcgggaacctgttgacgttgattttttctctctctctcccttttggagttccatccatcctccactcatccgttgatgaacctaagtaatttactggtgattacagtttatttgtgcgatgcaaaatcattaaacagaagaagtaaatgcatctatctcatttgacggatttcaatgatttactgttacatagtatgaataataataaagcagctcgtccggaaaaatga

SEQ ID NO: 67586 - DNA, 2715 bp, Zea Mays
gtttgttggttttctcatagtccatgtcacatggtggccagccttgctccatctactcggtatatgctatggcccacaagggcaagacgacgtcgtacgttagctacaacccgaaagacggacccaaggcataaatcaacaccatcgctcacaactgcatgagtgagtacaccacgatggcaaaggaggtctatgagccaaaatatgattcgaggaccgagggcatcaacggagaagtcctcatgagggttggaggaggcaagaggcatgtgtggtactgattggccgaccgcgcaatcgacacgtcctccactcaaactctatctcacgttcgagtaaggagcacaagtgcaagctcaaccatacgacctcgacaggacacatcatagtatcggatacaagaattctagctagaagaagagaggaggcaacgtgtggagttggagaatcaatcggcgtccttaaatgactctcatgcttcgtccaacccttcgtcgaaccaaagtaattggtcacctcgctaatgttgttcaaatatatgtttgtgacatacacttgatgtttctgaacttatgtgtgtgacgatttgtgagttttgtgaactattttggcagacatgtgacttttgagatgtttgtgaagaacttgtgttgtttgtgagatatgtggtatctttgatttatgtgatgttgatgatatatatcttttatttatttcaatgtaatattaaaagtaaataaaaatgggggcctatggtcaccttgccgagtgttgaactcgccaaagggtgtctttgccgagtgccgtggtcggcaaagaaagcatcatgggcactagggaacatactttgatgaatgctacaaccatggcactcggtaaagacactacgtatggaaggcccacataagctttatttgtcgagtgcctctgagccaacactcgacaaaatctctgtcatcgtcacttgccactgtcatagcagctttacaaaagcactcgtcaaagaaacagttgccgatggttggttcaccaaaccctctttgtcgagtgtggcactcgacaaaaggcatgtcgaatgcatttgatccattggcgatagcctgtggcactcgacaaagaaaccatctctagtagttagttgtgtggtggcagtttggtgtacatgttctgtgactcaaaaacaagagattgatatgtatgacatgttaattaagtagaagaaattgtcataagaatgagtaaaaagaagagtagtgtatgaggcggctatgaacataacaaagccatttttgtcgtcgttgggcaaagaatgctgggagagaggtccaccgtaccttatgtgttcatggtgtcgtcattcattgaggaccctatatatataccgttgctagatatatagggttagtggcagcatgcatagatcctacatatgcacacatttttttgttctatatagtgcactgtactgttgagtcatcctctccttcccctctcctttgatttcccgtgctagctagctcgatctatgaaaatatataaatctaaaaccgttttttttgtgtgtgtgtgtgtgaaaactggcgagactatatatacccgatgatggaaaatgttaatagtggtcgattatgttgcttaaattaaaagaggttctctcagatcttttttttattattccacaagtgggtagaacagcaccctagctagcaatcatgcattgtagtatgcatggcacattatactattctgtttagtacgtgtggaaatatcaccactgtaggattatgacgacatacatatatatatcactacaggattatgatgacatagcaggaataatgtcatctcttccttgttaccgacaggattagtaaagtggtcgaggttcctcaaggcgtatccaatcttcagccctaaaaaaaaggagttgggactgctacatcgtccacagtgatatataagaggctgggtcttttttatatttctgaaagacagcaaattaacctatatatatatattgtcgtaaacgatgagagatatccatgcactgaaaaaaaaatgcgacgactcgacgcaagatcaatggtcctgtttggtgtaccttttggtttggatctttgtgaaatagcagcatctatcatacacagtctgctgctccctctccggtcgctttctcagctcgctttgctttgctgcttcctcctctccttttgcctgtccatggatcgtcactgtaaggcgaggagagccatccaaagtgcaagtggatcattacatgcgtgttcatgctggctggccggccgacccttggaagccattggaagacaggcaccaaaagagctgaagcaaatacgaaaaggttcttgacctcctgtccagtacagtgtacaggaattgggcaaccatctatgcgttgtgatgagagtcagagtcagacttgttgcagccgttggctggctcatgctcctccgcccgttccagaataaaatcgcagctagcaacgtgagaagccaactaacttcaagattagctagattgtcctgtttgggagtgcttcatttgaagaattacatatttgattttccagcttcactataaaacaacttcaataaattggtaaagcagtattcaagagtgtttagtttgtatatagactccagcttctgtaatacaaatattttatgcgagtttccttaattaaccttgatgattagc

SEQ ID NO: 67587 - DNA, 3811 bp, Zea Mays
gcaagaacacaaaattaaaaaatccagggttttagaagggttcggtaggttcgttccctcgccttctccctttcttcctctccaaacaagacattgcagaagaaaaaggcaaaaacaatccgccgacttggagaaaccctagaatcaagcgcggaaccgccctcatccaccatgctgcgtgcggctgtggcggcggcggaggagctcaggtctccgctgctcagggtcattgggacgctgagggacggccgcggctcggtgctgctgggtaggagggtgcgtttctgctccaactcttccgcgagcgacaccgaggcggcggtggcagaggcggaggcgaaggccgaggatgcgtccgctgcggagggtgaggcggacagcaaggcgtcttccgccatcgtgccgaccagcaccaatatcgatgattgcctctcggttatagcgttacctcttccacatcggccactctttcctggattctacatgccgatcaatgtgaaggaccaaaagctgctgcaagccctaatagaaaatcgcaaaagatcagctccgtatgctggtgcctttcttgtgaaagatgaagaaggtactgaccctaacatcgtgactggttcagattcagcgaaaagcattgatgatctcaaagggaaagacttgctgaagcgtcttcatgaagttgggacgcttgctcagattacaagcattcaaggggatcatgtagttctacttggtcaccgacgtttacggataactgagatgatgccaaaagttgcaggtcgaagaggatccacttacagttaaagttgaccatctaaaggaaaagccctacaacaaggacgatgatgttatgaaagctacatcattcgaagttatatcaactttaagggaagttctaaggacaagttccctttggaaggatcatgtgcaaacctacacacagcacattggtgactttaactaccaacggttagcagactttggtgctgctatctctggtgccaacaagttgctttgccaggaagttcttgaggaattggatgtatacaagcgtttgaagttgacccttgagttagtaaaaaaggagatggagattagtaagctacagcaatccatagcaaaagcaattgaagaaaagattagtggagatcagcgacgttatttattgaacgagcaacttaaggcaatcaagaaggagttgggtttggagactgatgacaaaacagcattgtctgcaaaatttagagaacgtatagaatcaaagaaggacaaatgtcctcctcatgttttacaagtcattgaagaagagcttaccaagcttcagcttttagaagccagctctagtgagttcagtgtaactcgtaattatttggactggctgacagtgttgccatggggaaattatagtgatgaaaacttcgatgtccaccatgctcagaaaattctcgatgaagaccattatggtttgagtgatgtgaaagagaggatactggaattcatagcagttgggaagttaagagggacttcacaaggcaagatcatatgtctttctgggccaccgggagttggaaaaaccagtattggtcgttcaattgcacgtgcactgaaccgtcagttctacaggttttctgttggaggtttggctgatgtggctgaaatcaagggccatcgacgcacatatgttggtgcaatgccagggaagatggtgcagtgtcttaaatcagttggtacagcaaatcctctagtgttgatagatgagattgacaagcttgggaagggtcattctggcgatccagctagtgcattgttggaactccttgaccctgagcagaatgttaatttcttagatcactaccttgatgttcctattgacctatccaaggttctatttgtttgcacagcaaacgtaatagagatgataccaaatccattactggataggatggagatcattgctatagctgggtatataactgatgagaagatgcatattgctcgggactatctagagaagaatacaagacaggcttgtggcattaagcctgagcaggttgaagttacagatactgctcttcttgctctcattgaaaactactgtcgagaagctggagtgaggaaccttcaaaagcagattgagaaaatttaccgtaagatagctctgcagcttgttcgccaaggagtatcgaatgagccagaccatgagtctgtcagtgcctctgtaactgaggaatctggtaatggtgataacaccacaacaaaagatgagattttgaaggatcctgctgtagaagatgcttcagtcaccaacaatgttacaaatcctgcctccgaggaagctaatgaagaaaatttgacaagtgaagcagcaaaagaagacagcacatctaagggcaacaagggcactgatggagcagcggacaaggcaattgagaaggttgtggtcgattcatcaaaccttggtgattttgttgggaaacctgtgttccaggctgagcgtatatatgagcatactccagttggagtggtcatgggtttagcttggactgctatgggtggttctactttgtacatcgaaacaaaaaaagtggaggaaagggaagggaaaggtgcacttgtgcttacaggacagcttggagatgtcatgaaagagagtgctcagattgcgcacacagttggcagagctgtattactggagaaagagccagataaccatttttttgcaaactcgaaggtgcacttgcatgttcctgcagggtccacccctaaggatggccctagtgctggatgcaccatgataacatctatgctgtccttagctatgggaaagcctgtcaagaaggacctcgcaatgacgggtgaagtaacactaaccggaagaatcctcccaatcggcggggtaaaagagaaaacaattgcggcaaggagaagtgcgataaagacactcatatttccggcagcgaataaaagggatttcgatgagcttgcttctaatgtgaaggaaggcctcgaagttcattttgttgacacatacagtgaaatatatgatttagctttccagagtgacgccgggacagaaacaagctgagatgatttagctttatgggattgagattttttccccctagacccacgacagaaacaagtccgtcaagaggcaggcaaaccagaccattgtaaccaagatgggtggagttaattgatattcacgagaaaaatgaaatcctttttttttgcccccaatataacatcattgaatttaagagatttttggctaggttgtacgtactagtgtggttgcccatctaggtggtatagcctatattattagtaggaataagaaaagcagcatggatgcaccatctgttatttatatttattgatttaagagtgttctctaaaagcagcaggtatgccccagttgttattcattaaatttgtttcagtgagtgttagttacctttggatactgtactgtgcgtcatcaatttataggatgttttgattttttttggatacacaaacttctatcattatgcatctaatttgtggccgattttgattttgtagtccttcctctgtttcaatttattggatgttttgagtttttttttatacataaatttttattgttatgtatccaatttatggatggttttagacatataacgtttattatgtatctagtaaaaatggcgatctgtaatttagaagagggtggtaaaaacagttgggcgtttaaactcgttctgtacatttacgtgagtgtggtgctgttcgggattgaacttagggtgccaggagaagtaaaagtgac

SEQ ID NO: 67588 - DNA, 3802 bp, Zea Mays
gcaagaacacaaaattaaaaaatccagggttttagaagggttcggtaggttcgttccctcgccttctccctttcttcctctccaaacaagacattgcagaagaaaaaggcaaaaacaatccgccgacttggagaaaccctagaatcaagcgcggaaccgccctcatccaccatgctgcgtgcggctgtggcggcggcggaggagctcaggtctccgctgctcagggtcattgggacgctgagggacggccgcggctcggtgctgctgggtaggagggtgcgtttctgctccaactcttccgcgagcgacaccgaggcggcggtggcagaggcggaggcgaaggccgaggatgcgtccgctgcggagggtgaggcggacagcaaggcgtcttccgccatcgtgccgaccagcaccaatatcgatgattgcctctcggttatagcgttacctcttccacatcggccactctttcctggattctacatgccgatcaatgtgaaggaccaaaagctgctgcaagccctaatagaaaatcgcaaaagatcagctccgtatgctggtgcctttcttgtgaaagatgaagaaggtactgaccctaacatcgtgactggttcagattcagcgaaaagcattgatgatctcaaagggaaagacttgctgaagcgtcttcatgaagttgggacgcttgctcagattacaagcattcaaggggatcatgtagttctacttggtcaccgacgtttacggataactgagatggttgcaggtcgaagaggatccacttacagttaaagttgaccatctaaaggaaaagccctacaacaaggacgatgatgttatgaaagctacatcattcgaagttatatcaactttaagggaagttctaaggacaagttccctttggaaggatcatgtgcaaacctacacacagcacattggtgactttaactaccaacggttagcagactttggtgctgctatctctggtgccaacaagttgctttgccaggaagttcttgaggaattggatgtatacaagcgtttgaagttgacccttgagttagtaaaaaaggagatggagattagtaagctacagcaatccatagcaaaagcaattgaagaaaagattagtggagatcagcgacgttatttattgaacgagcaacttaaggcaatcaagaaggagttgggtttggagactgatgacaaaacagcattgtctgcaaaatttagagaacgtatagaatcaaagaaggacaaatgtcctcctcatgttttacaagtcattgaagaagagcttaccaagcttcagcttttagaagccagctctagtgagttcagtgtaactcgtaattatttggactggctgacagtgttgccatggggaaattatagtgatgaaaacttcgatgtccaccatgctcagaaaattctcgatgaagaccattatggtttgagtgatgtgaaagagaggatactggaattcatagcagttgggaagttaagagggacttcacaaggcaagatcatatgtctttctgggccaccgggagttggaaaaaccagtattggtcgttcaattgcacgtgcactgaaccgtcagttctacaggttttctgttggaggtttggctgatgtggctgaaatcaagggccatcgacgcacatatgttggtgcaatgccagggaagatggtgcagtgtcttaaatcagttggtacagcaaatcctctagtgttgatagatgagattgacaagcttgggaagggtcattctggcgatccagctagtgcattgttggaactccttgaccctgagcagaatgttaatttcttagatcactaccttgatgttcctattgacctatccaaggttctatttgtttgcacagcaaacgtaatagagatgataccaaatccattactggataggatggagatcattgctatagctgggtatataactgatgagaagatgcatattgctcgggactatctagagaagaatacaagacaggcttgtggcattaagcctgagcaggttgaagttacagatactgctcttcttgctctcattgaaaactactgtcgagaagctggagtgaggaaccttcaaaagcagattgagaaaatttaccgtaagatagctctgcagcttgttcgccaaggagtatcgaatgagccagaccatgagtctgtcagtgcctctgtaactgaggaatctggtaatggtgataacaccacaacaaaagatgagattttgaaggatcctgctgtagaagatgcttcagtcaccaacaatgttacaaatcctgcctccgaggaagctaatgaagaaaatttgacaagtgaagcagcaaaagaagacagcacatctaagggcaacaagggcactgatggagcagcggacaaggcaattgagaaggttgtggtcgattcatcaaaccttggtgattttgttgggaaacctgtgttccaggctgagcgtatatatgagcatactccagttggagtggtcatgggtttagcttggactgctatgggtggttctactttgtacatcgaaacaaaaaaagtggaggaaagggaagggaaaggtgcacttgtgcttacaggacagcttggagatgtcatgaaagagagtgctcagattgcgcacacagttggcagagctgtattactggagaaagagccagataaccatttttttgcaaactcgaaggtgcacttgcatgttcctgcagggtccacccctaaggatggccctagtgctggatgcaccatgataacatctatgctgtccttagctatgggaaagcctgtcaagaaggacctcgcaatgacgggtgaagtaacactaaccggaagaatcctcccaatcggcggggtaaaagagaaaacaattgcggcaaggagaagtgcgataaagacactcatatttccggcagcgaataaaagggatttcgatgagcttgcttctaatgtgaaggaaggcctcgaagttcattttgttgacacatacagtgaaatatatgatttagctttccagagtgacgccgggacagaaacaagctgagatgatttagctttatgggattgagattttttccccctagacccacgacagaaacaagtccgtcaagaggcaggcaaaccagaccattgtaaccaagatgggtggagttaattgatattcacgagaaaaatgaaatcctttttttttgcccccaatataacatcattgaatttaagagatttttggctaggttgtacgtactagtgtggttgcccatctaggtggtatagcctatattattagtaggaataagaaaagcagcatggatgcaccatctgttatttatatttattgatttaagagtgttctctaaaagcagcaggtatgccccagttgttattcattaaatttgtttcagtgagtgttagttacctttggatactgtactgtgcgtcatcaatttataggatgttttgattttttttggatacacaaacttctatcattatgcatctaatttgtggccgattttgattttgtagtccttcctctgtttcaatttattggatgttttgagtttttttttatacataaatttttattgttatgtatccaatttatggatggttttagacatataacgtttattatgtatctagtaaaaatggcgatctgtaatttagaagagggtggtaaaaacagttgggcgtttaaactcgttctgtacatttacgtgagtgtggtgctgttcgggattgaacttagggtgccaggagaagtaaaagtgac

SEQ ID NO: 67589 - DNA, 3934 bp, Zea Mays
caaaattaaaaaatccagggttttagaagggttcggtaggttcgttccctcgccttctccctttcttcctctccaaacaagacattgcagaagaaaaaggcaaaaacaatccgccgacttggagaaaccctagaatcaagcgcggaaccgccctcatccaccatgctgcgtgcggcggcggctgcagccgccatcttcccggcgcggttcgccgccgcgccggctgtggcggcggcggaggagctcaggtctccgctgctcagggtcattgggacgctgagggacggccgcggctcggtgctgctgggtaggagggtgcgtttctgctccaactcttccgcgagcgacaccgaggcggcggtggcagaggcggaggcgaaggccgaggatgcgtccgctgcggagggtgaggcggacagcaaggcgtcttccgccatcgtgccgaccagcaccaatatcgatgattgcctctcggttatagcgttacctcttccacatcggccactctttcctggattctacatgccgatcaatgtgaaggaccaaaagctgctgcaagccctaatagaaaatcgcaaaagatcagctccgtatgctggtgcctttcttgtgaaagatgaagaaggtactgaccctaacatcgtgactggttcagattcagcgaaaagcattgatgatctcaaagggaaagacttgctgaagcgtcttcatgaagttgggacgcttgctcagattacaagcattcaaggggatcatgtagttctacttggtcaccgacgtttacggataactgagatggtcgaagaggatccacttacagttaaagttgaccatctaaaggaaaagccctacaacaaggacgatgatgttatgaaagctacatcattcgaagttatatcaactttaagggaagttctaaggacaagttccctttggaaggatcatgtgcaaacctacacacagcacattggtgactttaactaccaacggttagcagactttggtgctgctatctctggtgccaacaagttgctttgccaggaagttcttgaggaattggatgtatacaagcgtttgaagttgacccttgagttagtaaaaaaggagatggagattagtaagctacagcaatccatagcaaaagcaattgaagaaaagattagtggagatcagcgacgttatttattgaacgagcaacttaaggcaatcaagaaggagttgggtttggagactgatgacaaaacagcattgtctgcaaaatttagagaacgtatagaatcaaagaaggacaaatgtcctcctcatgttttacaagtcattgaagaagagcttaccaagcttcagcttttagaagccagctctagtgagttcagtgtaactcgtaattatttggactggctgacagtgttgccatggggaaattatagtgatgaaaacttcgatgtccaccatgctcagaaaattctcgatgaagaccattatggtttgagtgatgtgaaagagaggatactggaattcatagcagttgggaagttaagagggacttcacaaggcaagatcatatgtctttctgggccaccgggagttggaaaaaccagtattggtcgttcaattgcacgtgcactgaaccgtcagttctacaggttttctgttggaggtttggctgatgtggctgaaatcaagggccatcgacgcacatatgttggtgcaatgccagggaagatggtgcagtgtcttaaatcagttggtacagcaaatcctctagtgttgatagatgagattgacaagcttgggaagggtcattctggcgatccagctagtgcattgttggaactccttgaccctgagcagaatgttaatttcttagatcactaccttgatgttcctattgacctatccaaggttctatttgtttgcacagcaaacgtaatagagatgataccaaatccattactggataggatggagatcattgctatagctgggtatataactgatgagaagatgcatattgctcgggactatctagagaagaatacaagacaggcttgtggcattaagcctgagcaggttgaagttacagatactgctcttcttgctctcattgaaaactactgtcgagaagctggagtgaggaaccttcaaaagcagattgagaaaatttaccgtaaggtgtgtaaaataacttctgcatactgatctgccccctctatcagggaaggggaaaatgttggctgattgttgataatggttaagcaacctcaaggcattgatagctctgcagcttgttcgccaaggagtatcgaatgagccagaccatgagtctgtcagtgcctctgtaactgaggaatctggtaatggtgataacaccacaacaaaagatgagattttgaaggatcctgctgtagaagatgcttcagtcaccaacaatgttacaaatcctgcctccgaggaagctaatgaagaaaatttgacaagtgaagcagcaaaagaagacagcacatctaagggcaacaagggcactgatggagcagcggacaaggcaattgagaaggttgtggtcgattcatcaaaccttggtgattttgttgggaaacctgtgttccaggctgagcgtatatatgagcatactccagttggagtggtcatgggtttagcttggactgctatgggtggttctactttgtacatcgaaacaaaaaaagtggaggaaagggaagggaaaggtgcacttgtgcttacaggacagcttggagatgtcatgaaagagagtgctcagattgcgcacacagttggcagagctgtattactggagaaagagccagataaccatttttttgcaaactcgaaggtgcacttgcatgttcctgcagggtccacccctaaggatggccctagtgctggatgcaccatgataacatctatgctgtccttagctatgggaaagcctgtcaagaaggacctcgcaatgacgggtgaagtaacactaaccggaagaatcctcccaatcggcggggtaaaagagaaaacaattgcggcaaggagaagtgcgataaagacactcatatttccggcagcgaataaaagggatttcgatgagcttgcttctaatgtgaaggaaggcctcgaagttcattttgttgacacatacagtgaaatatatgatttagctttccagagtgacgccgggacagaaacaagctgagatgatttagctttatgggattgagattttttccccctagacccacgacagaaacaagtccgtcaagaggcaggcaaaccagaccattgtaaccaagatgggtggagttaattgatattcacgagaaaaatgaaatcctttttttttgcccccaatataacatcattgaatttaagagatttttggctaggttgtacgtactagtgtggttgcccatctaggtggtatagcctatattattagtaggaataagaaaagcagcatggatgcaccatctgttatttatatttattgatttaagagtgttctctaaaagcagcaggtatgccccagttgttattcattaaatttgtttcagtgagtgttagttacctttggatactgtactgtgcgtcatcaatttataggatgttttgattttttttggatacacaaacttctatcattatgcatctaatttgtggccgattttgattttgtagtccttcctctgtttcaatttattggatgttttgagtttttttttatacataaatttttattgttatgtatccaatttatggatggttttagacatataacgtttattatgtatctagtaaaaatggcgatctgtaatttagaagagggtggtaaaaacagttgggcgtttaaactcgttctgtacatttacgtgagtgtggtgctgttcgggattgaacttagggtgccaggagaagtaaaagtgac

SEQ ID NO: 67590 - DNA, 3773 bp, Zea Mays
gttttagaagggttcggtaggttcgttccctcgccttctccctttcttcctctccaaacaagacattgcagaagaaaaaggcaaaaacaatccgccgacttggagaaaccctagaatcaagcgcggaaccgccctcatccaccatgctgcgtgcggctgtggcggcggcggaggagctcaggtctccgctgctcagggtcattgggacgctgagggacggccgcggctcggtgctgctgggtaggagggtgcgtttctgctccaactcttccgcgagcgacaccgaggcggcggtggcagaggcggaggcgaaggccgaggatgcgtccgctgcggagggtgaggcggacagcaaggcgtcttccgccatcgtgccgaccagcaccaatatcgatgattgcctctcggttatagcgttacctcttccacatcggccactctttcctggattctacatgccgatcaatgtgaaggaccaaaagctgctgcaagccctaatagaaaatcgcaaaagatcagctccgtatgctggtgcctttcttgtgaaagatgaagaaggtactgaccctaacatcgtgactggttcagattcagcgaaaagcattgatgatctcaaagggaaagacttgctgaagcgtcttcatgaagttgggacgcttgctcagattacaagcattcaaggggatcatgtagttctacttggtcaccgacgtttacggataactgagatgttgcaggtcgaagaggatccacttacagttaaagttgaccatctaaaggaaaagccctacaacaaggacgatgatgttatgaaagctacatcattcgaagttatatcaactttaagggaagttctaaggacaagttccctttggaaggatcatgtgcaaacctacacacagcacattggtgactttaactaccaacggttagcagactttggtgctgctatctctggtgccaacaagttgctttgccaggaagttcttgaggaattggatgtatacaagcgtttgaagttgacccttgagttagtaaaaaaggagatggagattagtaagctacagcaatccatagcaaaagcaattgaagaaaagattagtggagatcagcgacgttatttattgaacgagcaacttaaggcaatcaagaaggagttgggtttggagactgatgacaaaacagcattgtctgcaaaatttagagaacgtatagaatcaaagaaggacaaatgtcctcctcatgttttacaagtcattgaagaagagcttaccaagcttcagcttttagaagccagctctagtgagttcagtgtaactcgtaattatttggactggctgacagtgttgccatggggaaattatagtgatgaaaacttcgatgtccaccatgctcagaaaattctcgatgaagaccattatggtttgagtgatgtgaaagagaggatactggaattcatagcagttgggaagttaagagggacttcacaaggcaagatcatatgtctttctgggccaccgggagttggaaaaaccagtattggtcgttcaattgcacgtgcactgaaccgtcagttctacaggttttctgttggaggtttggctgatgtggctgaaatcaagggccatcgacgcacatatgttggtgcaatgccagggaagatggtgcagtgtcttaaatcagttggtacagcaaatcctctagtgttgatagatgagattgacaagcttgggaagggtcattctggcgatccagctagtgcattgttggaactccttgaccctgagcagaatgttaatttcttagatcactaccttgatgttcctattgacctatccaaggttctatttgtttgcacagcaaacgtaatagagatgataccaaatccattactggataggatggagatcattgctatagctgggtatataactgatgagaagatgcatattgctcgggactatctagagaagaatacaagacaggcttgtggcattaagcctgagcaggttgaagttacagatactgctcttcttgctctcattgaaaactactgtcgagaagctggagtgaggaaccttcaaaagcagattgagaaaatttaccgtaagatagctctgcagcttgttcgccaaggagtatcgaatgagccagaccatgagtctgtcagtgcctctgtaactgaggaatctggtaatggtgataacaccacaacaaaagatgagattttgaaggatcctgctgtagaagatgcttcagtcaccaacaatgttacaaatcctgcctccgaggaagctaatgaagaaaatttgacaagtgaagcagcaaaagaagacagcacatctaagggcaacaagggcactgatggagcagcggacaaggcaattgagaaggttgtggtcgattcatcaaaccttggtgattttgttgggaaacctgtgttccaggctgagcgtatatatgagcatactccagttggagtggtcatgggtttagcttggactgctatgggtggttctactttgtacatcgaaacaaaaaaagtggaggaaagggaagggaaaggtgcacttgtgcttacaggacagcttggagatgtcatgaaagagagtgctcagattgcgcacacagttggcagagctgtattactggagaaagagccagataaccatttttttgcaaactcgaaggtgcacttgcatgttcctgcagggtccacccctaaggatggccctagtgctggatgcaccatgataacatctatgctgtccttagctatgggaaagcctgtcaagaaggacctcgcaatgacgggtgaagtaacactaaccggaagaatcctcccaatcggcggggtaaaagagaaaacaattgcggcaaggagaagtgcgataaagacactcatatttccggcagcgaataaaagggatttcgatgagcttgcttctaatgtgaaggaaggcctcgaagttcattttgttgacacatacagtgaaatatatgatttagctttccagagtgacgccgggacagaaacaagctgagatgatttagctttatgggattgagattttttccccctagacccacgacagaaacaagtccgtcaagaggcaggcaaaccagaccattgtaaccaagatgggtggagttaattgatattcacgagaaaaatgaaatcctttttttttgcccccaatataacatcattgaatttaagagatttttggctaggttgtacgtactagtgtggttgcccatctaggtggtatagcctatattattagtaggaataagaaaagcagcatggatgcaccatctgttatttatatttattgatttaagagtgttctctaaaagcagcaggtatgccccagttgttattcattaaatttgtttcagtgagtgttagttacctttggatactgtactgtgcgtcatcaatttataggatgttttgattttttttggatacacaaacttctatcattatgcatctaatttgtggccgattttgattttgtagtccttcctctgtttcaatttattggatgttttgagtttttttttatacataaatttttattgttatgtatccaatttatggatggttttagacatataacgtttattatgtatctagtaaaaatggcgatctgtaatttagaagagggtggtaaaaacagttgggcgtttaaactcgttctgtacatttacgtgagtgtggtgctgttcgggattgaacttagggtgccaggagaagtaaaagtgac

SEQ ID NO: 67591 - DNA, 968 bp, Zea Mays
tggatctctgtttcacacggaacggaatcacaagacgcgtgctccactccatcctctctctatatatgagctccaaaatccatatccatggcacacgccaacatatatcaccatatctgtttgtctcccttcccttcccttggatccatacagagccgaggaggacggcggcggcggcggcgagaagagatggccgacggcagcagcaactcatcggcgtcggtggccatgggacaggaggtgcaggctttcgttgagaacaagtatggtggaatggtgcctaagaagcctctgatttcaaaggatcaggagcgcgcctattttgattctgcagactgggtccttggcaagcaagctgcaaacagcggcaccgcacgggctgcgactgctatcgaattcttgaagccaaagctaaagaggacgccccatcaccagcttccccctcgcaagccgacctgtgcgtccagctgagctcaagacagtgcgaaaatccaaagggccaggcttacaaaagctccctggctgggagagacgatgaagagcgttatcaagttttttttagttggttgcattggttaggaaggcaaattcaggattgatgagccctgcatttggctttgttcgcagcactcgctgaattattaatttaagcatgtgggggacatagataaaactagactcctgctattatatgcttaattgtggaagtggtagatgacacccatctgtttcaatgtatctttggtcggcagatgaaatgtatcctctctatctacttggcttctccctttctttactagacctcatatataatattcaccgaaaagagaatgaacgaatggatattccaatttgggatgaaaatgctaaatcatttagaaggagcttattttttttattaagggaatccttttggaggagctgagaatggtacggtatatgctactctcgtcgtaggatgattttac

SEQ ID NO: 67592 - DNA, 971 bp, Zea Mays
tggatctctgtttcacacggaacggaatcacaagacgcgtgctccactccatcctctctctatatatgagctccaaaatccatatccatggcacacgccaacatatatcaccatatctgtttgtctcccttcccttcccttggatccatacacaggagccgaggaggacggcggcggcggcggcgagaagagatggccgacggcagcagcaactcatcggcgtcggtggccatgggacaggaggtgcaggctttcgttgagaacaagtatggtggaatggtgcctaagaagcctctgatttcaaaggatcaggagcgcgcctattttgattctgcagactgggtccttggcaagcaagctgcaaacagcggcaccgcacgggctgcgactgctatcgaattcttgaagccaaagctaaagaggacgccccatcaccagcttccccctcgcaagccgacctgtgcgtccagctgagctcaagacagtgcgaaaatccaaagggccaggcttacaaaagctccctggctgggagagacgatgaagagcgttatcaagttttttttagttggttgcattggttaggaaggcaaattcaggattgatgagccctgcatttggctttgttcgcagcactcgctgaattattaatttaagcatgtgggggacatagataaaactagactcctgctattatatgcttaattgtggaagtggtagatgacacccatctgtttcaatgtatctttggtcggcagatgaaatgtatcctctctatctacttggcttctccctttctttactagacctcatatataatattcaccgaaaagagaatgaacgaatggatattccaatttgggatgaaaatgctaaatcatttagaaggagcttattttttttattaagggaatccttttggaggagctgagaatggtacggtatatgctactctcgtcgtaggatgattttac

SEQ ID NO: 67593 - DNA, 846 bp, Zea Mays
cttcccttcccttggatccatacacagcaggagccgaggaggacggcggcggcggcggcgagaagagatggccgacggcagcagcaactcatcggcgtcggtggccatgggacaggaggtgcaggctttcgttgagaacaagtatggtggaatggtgcctaagaagcctctgatttcaaaggatcaggagcgcgcctattttgattctgcagactgggtccttggcaagcaagctgcaaacagcggcaccgcacgggctgcgactgctatcgaattcttgaagccaaagctaaagaggacgccccatcaccagcttccccctcgcaagccgacctgtgcgtccagctgagctcaagacagtgcgaaaatccaaagggccaggcttacaaaagctccctggctgggagagacgatgaagagcgttatcaagttttttttagttggttgcattggttaggaaggcaaattcaggattgatgagccctgcatttggctttgttcgcagcactcgctgaattattaatttaagcatgtgggggacatagataaaactagactcctgctattatatgcttaattgtggaagtggtagatgacacccatctgtttcaatgtatctttggtcggcagatgaaatgtatcctctctatctacttggcttctccctttctttactagacctcatatataatattcaccgaaaagagaatgaacgaatggatattccaatttgggatgaaaatgctaaatcatttagaaggagcttattttttttattaagggaatccttttggaggagctgagaatggtacggtatatgctactctcgtcgtaggatgattttac

SEQ ID NO: 67594 - DNA, 819 bp, Zea Mays
cgtgagccgaggaggacggcggcggcggcggcgagaagagatggccgacggcagcagcaactcatcggcgtcggtggccatgggacaggaggtgcaggctttcgttgagaacaagtatggtggaatggtgcctaagaagcctctgatttcaaaggatcaggagcgcgcctattttgattctgcagactgggtccttggcaagcaagctgcaaacagcggcaccgcacgggctgcgactgctatcgaattcttgaagccaaagctaaagaggacgccccatcaccagcttccccctcgcaagccgacctgtgcgtccagctgagctcaagacagtgcgaaaatccaaagggccaggcttacaaaagctccctggctgggagagacgatgaagagcgttatcaagttttttttagttggttgcattggttaggaaggcaaattcaggattgatgagccctgcatttggctttgttcgcagcactcgctgaattattaatttaagcatgtgggggacatagataaaactagactcctgctattatatgcttaattgtggaagtggtagatgacacccatctgtttcaatgtatctttggtcggcagatgaaatgtatcctctctatctacttggcttctccctttctttactagacctcatatataatattcaccgaaaagagaatgaacgaatggatattccaatttgggatgaaaatgctaaatcatttagaaggagcttattttttttattaagggaatccttttggaggagctgagaatggtacggtatatgctactctcgtcgtaggatgattttac

SEQ ID NO: 67595 - DNA, 867 bp, Zea Mays
caagcttctccctcacctacctaaatccaatccacttcctttctttcatctgagccgaggaggacggcggcggcggcggcgagaagagatggccgacggcagcagcaactcatcggcgtcggtggccatgggacaggaggtgcaggctttcgttgagaacaagtatggtggaatggtgcctaagaagcctctgatttcaaaggatcaggagcgcgcctattttgattctgcagactgggtccttggcaagcaagctgcaaacagcggcaccgcacgggctgcgactgctatcgaattcttgaagccaaagctaaagaggacgccccatcaccagcttccccctcgcaagccgacctgtgcgtccagctgagctcaagacagtgcgaaaatccaaagggccaggcttacaaaagctccctggctgggagagacgatgaagagcgttatcaagttttttttagttggttgcattggttaggaaggcaaattcaggattgatgagccctgcatttggctttgttcgcagcactcgctgaattattaatttaagcatgtgggggacatagataaaactagactcctgctattatatgcttaattgtggaagtggtagatgacacccatctgtttcaatgtatctttggtcggcagatgaaatgtatcctctctatctacttggcttctccctttctttactagacctcatatataatattcaccgaaaagagaatgaacgaatggatattccaatttgggatgaaaatgctaaatcatttagaaggagcttattttttttattaagggaatccttttggaggagctgagaatggtacggtatatgctactctcgtcgtaggatgattttac

SEQ ID NO: 67596 - DNA, 815 bp, Zea Mays
agcaggagccgaggaggacggcggcggcggcggcgagaagagatggccgacggcagcagcaactcatcggcgtcggtggccatgggacaggaggtgcaggctttcgttgagaacaagtatggtggaatggtgcctaagaagcctctgatttcaaaggagcgcgcctattttgattctgcagactgggtccttggcaagcaagctgcaaacagcggcaccgcacgggctgcgactgctatcgaattcttgaagccaaagctaaagaggacgccccatcaccagcttccccctcgcaagccgacctgtgcgtccagctgagctcaagacagtgcgaaaatccaaagggccaggcttacaaaagctccctggctgggagagacgatgaagagcgttatcaagttttttttagttggttgcattggttaggaaggcaaattcaggattgatgagccctgcatttggctttgttcgcagcactcgctgaattattaatttaagcatgtgggggacatagataaaactagactcctgctattatatgcttaattgtggaagtggtagatgacacccatctgtttcaatgtatctttggtcggcagatgaaatgtatcctctctatctacttggcttctccctttctttactagacctcatatataatattcaccgaaaagagaatgaacgaatggatattccaatttgggatgaaaatgctaaatcatttagaaggagcttattttttttattaagggaatccttttggaggagctgagaatggtacggtatatgctactctcgtcgtaggatgattttac

SEQ ID NO: 67597 - DNA, 750 bp, Zea Mays
agcctcgcgtcaagaaagtagaaacaaggctttcgttgagaacaagtatggtggaatggtgcctaagaagcctctgatttcaaaggatcaggagcgcgcctattttgattctgcagactgggtccttggcaagcaagctgcaaacagcggcaccgcacgggctgcgactgctatcgaattcttgaagccaaagctaaagaggacgccccatcaccagcttccccctcgcaagccgacctgtgcgtccagctgagctcaagacagtgcgaaaatccaaagggccaggcttacaaaagctccctggctgggagagacgatgaagagcgttatcaagttttttttagttggttgcattggttaggaaggcaaattcaggattgatgagccctgcatttggctttgttcgcagcactcgctgaattattaatttaagcatgtgggggacatagataaaactagactcctgctattatatgcttaattgtggaagtggtagatgacacccatctgtttcaatgtatctttggtcggcagatgaaatgtatcctctctatctacttggcttctccctttctttactagacctcatatataatattcaccgaaaagagaatgaacgaatggatattccaatttgggatgaaaatgctaaatcatttagaaggagcttattttttttattaagggaatccttttggaggagctgagaatggtacggtatatgctactctcgtcgtaggatgattttac

SEQ ID NO: 67598 - DNA, 2497 bp, Zea Mays
cgcgaatatacgtaccacatcatcttcctcccttcctcttcttcctcctctcccccgagcagatttaaagctatctagcagccgggagcagctatcggtacagtacgtgagcgagcggcggcggcaatgacaaggtgcggacgatgccgccagtgtgaatgcgccggcgcctccaccaccacctcccacggcgacgcgcgcaaccgcgacaacgatgcccccgacgcggtcctcgagggcctcgccatggcaggcctcgtcgacatcctccgccagctcggagacctcgcagagcttgccgcggaggtgttcgacgacatgcaagaccaagtgatggccgcgtccgcgcgagggcgacgactggccgcgagagccaggaagctgctggcggccgacctcgacctcgtcctcgacctcgacctgccgccgccgtccacccaagaacaccgctgcctcagctctgccgccgctgctactgctctcgccacctccggtggtgcaggccgtctgggctgccgctcctatctcggaggcgcgccgccgatgccgcgtgtcgtcgtccaacgtatcgagcgctgccgcgggcctcccaggctgtcactccttgacaagtatatatggccgctgatatacgatacgatgacgtgcagtgcagctgcctgtttgatttctgctcccaagtcccaactccaatgtccaatccatgctggtacggtggtgttgcgttgcaggtttgatgctgctggcgatggagcgtgcctcaagaggtacaccgacccctccttcttcttcagggcccactctgccaagattgatgagcaaggcacgctgaagcagcatcgtcggcaggcagaagcagcagcagcagcaggtgccgccgggtctatgttcctgctgatgcagcaaacagctgctcacagggtcgaacagcccaacatggaacagaagctgcaagaaggtagtacagcgcagcccagcccaagtgagctcgagagaacgagctctttcgaggcatggctctctccacaagctcgccgctttcctaccgctactgctgctactactcatcaccatcttcaggaaccacctgatgatgatgatggtggtggtggtggtggtgctactacctgtagtggatccatcagtagtcaggttgataccacatcgaatgctgcggctgttagcagcagttccacggtgaaggcggtcaggctgaactcagcatcattggtgaaaggtggtgagagtaatacgacgaggtcgaggtacaaaggcaagatcgcctcaagagtcagcagcttgccgaggaagctcttcatgaacaccaccaagcatcacaacgaccactcgcgctcttttcgtgcaggtagtagcagcctccgggtgacccaagccacagacatcggggattgcagccctgaacttgaagccatcgccgtcgccatccccaccccagatgcagatcgatgcagtaacagtaacagcagcactcctgaaacatgtacagcagctgactccaagaacctgctgctgctgctgccaggaagtggtcctgttctggagccacctgacaattcttctgctgctgctgctgaagacgccaaagtacatacgccacttgcgcctattccaccgatgcagtggctgtcagagaaagggactccacctgcatctcctaaacacagaacaccatgtttccagcaacaatttggtagcagtgggcaatctgatgagaagccaagccaagagcacgaggcttcagaccacagcagcaatctgctgcaggagagcgtgttcttctctgcggcacaagagctagcgaagatgtcccctcctcctccttgggtgccaaggcccaaatatccactgcttgatgttaaggcagttaagctacggaatggtccaagcccgatccatccttcaagaaacattttggacagcaggagtgcacagataaaagacattgcaattgtcagtgcattctcatttcctgcatcaagattcaaactcaactgccaccatgcatggttgtggttgtactgacaaagttgtatatatattactggctgtggctggtgcatgcagtcttccaagctgaaaccagcttctagagcgagctctcatgtgactgggactgggagtcctaccaacgccaccattctgaacagagcagatggcattcggcagagaaccgctgaggctcagagatttcaaacacaggattttaaaatatcttcagaccgcacgagcatggacgttcacttatcagttatattcttatcagggcttgttaagttagaggtctttctatttaattttgaataggaagaaatttaatcccatcaaaccccatgcgaccaaacaagctctcaaaagcatgcctagcttggtgtttttttttccttctttctgctagagctagagcttaattcatccttgacgactccatatccctgcttagacgtgtcatttgaatgtgaggatgcctcagttttct

SEQ ID NO: 67599 - DNA, 2304 bp, Zea Mays
atacgtaccacatcatcttcctcccttcctcttcttcctcctctcccccgagcagatttaaagctatctagcagccgggagcagctatcggtacagtacgtgagcgagcggcggcggcaatgacaaggtgcggacgatgccgccagtgtgaatgcgccggcgcctccaccaccacctcccacggcgacgcgcgcaaccgcgacaacgatgcccccgacgcggtcctcgagggcctcgccatggcaggcctcgtcgacatcctccgccagctcggagacctcgcagagcttgccgcggaggtgttcgacgacatgcaagaccaagtgatggccgcgtccgcgcgagggcgacgactggccgcgagagccaggaagctgctggcggccgacctcgacctcgtcctcgacctcgacctgccgccgccgtccacccaagaacaccgctgcctcagctctgccgccgctgctactgctctcgccacctccggtggtgcaggccgtctgggctgccgctcctatctcggaggcgcgccgccgatgccgcgtgtcgtcgtccaacgtatcgagcgctgccgcgggcctcccaggctgtcactccttgacaagtatatatggccgctgatatacgatacgatgacgtgcagtgcagctgcctgtttgatttctgctcccaagtcccaactccaatgtccaatccatgctggtacggtggtgttgcgttgcaggtttgatgctgctggcgatggagcgtgcctcaagaggtacaccgacccctccttcttcttcagggcccactctgccaagattgatgagcaaggcacgctgaagcagcatcgtcggcaggcagaagcagcagcagcagcaggtgccgccgggtctatgttcctgctgatgcagcaaacagctgctcacagggtcgaacagcccaacatggaacagaagctgcaagaaggtagtacagcgcagcccagcccaagtgagctcgagagaacgagctctttcgaggcatggctctctccacaagctcgccgctttcctaccgctactgctgctactactcatcaccatcttcaggaaccacctgatgatgatgatggtggtggtggtggtggtgctactacctgtagtggatccatcagtagtcaggttgataccacatcgaatgctgcggctgttagcagcagttccacggtgaaggcggtcaggctgaactcagcatcattggtgaaaggtggtgagagtaatacgacgaggtcgaggtacaaaggcaagatcgcctcaagagtcagcagcttgccgaggaagctcttcatgaacaccaccaagcatcacaacgaccactcgcgctcttttcgtgcaggtagtagcagcctccgggtgacccaagccacagacatcggggattgcagccctgaacttgaagccatcgccgtcgccatccccaccccagatgcagatcgatgcagtaacagtaacagcagcactcctgaaacatgtacagcagctgactccaagaacctgctgctgctgctgccaggaagtggtcctgttctggagccacctgacaattcttctgctgctgctgctgaagacgccaaagtacatacgccacttgcgcctattccaccgatgcagtggctgtcagagaaagggactccacctgcatctcctaaacacagaacaccatgtttccagcaacaatttggtagcagtgggcaatctgatgagaagccaagccaagagcacgaggcttcagaccacagcagcaatctgctgcaggagagcgtgttcttctctgcggcacaagagctagcgaagatgtcccctcctcctccttgggtgccaaggcccaaatatccactgcttgatgttaaggcagttaagctacggaatggtccaagcccgatccatccttcaagaaacattttggacagcaggagtgcacagataaaagacattgcaatttcttccaagctgaaaccagcttctagagcgagctctcatgtgactgggactgggagtcctaccaacgccaccattctgaacagagcagatggcattcgagaaccgctgaggctcagagatttcaaacacaggattttaaaatatcttcagaccgcacgagcatggacgttcacttatcagttatattcttatcagggcttgttaagttagaggtctttctatttaattttgaataggaagaaatttaatcccatcaaaccccatgcgaccaaacaagctctcaaaagcatgcctagcttggtgtttttttttccttctttctgctagagctagagcttaa

SEQ ID NO: 67600 - DNA, 2093 bp, Zea Mays
atacgtaccacatcatcttcctcccttcctcttcttcctcctctcccccgagcagatttaaagctatctagcagccgggagcagctatcggtacagtacgtgagcgagcggcggcggcaatgacaaggtgcggacgatgccgccagtgtgaatgcgccggcgcctccaccaccacctcccacggcgacgcgcgcaaccgcgacaacgatgcccccgacgcggtcctcgagggcctcgccatggcaggcctcgtcgacatcctccgccagctcggagacctcgcagagcttgccgcggaggtgttcgacgacatgcaagaccaagtgatggccgcgtccgcgcgagggcgacgactggccgcgagagccaggaagctgctggcggccgacctcgacctcgtcctcgacctcgacctgccgccgccgtccacccaagaacaccgctgcctcagctctgccgccgctgctactgctctcgccacctccggtggtgcaggccgtctgggctgccgctcctatctcggaggcgcgccgccgatgccgcgtgtcgtcgtccaacgtatcgagcgctgccgcgggcctcccaggctgtcactccttgacaagtttgatgctgctggcgatggagcgtgcctcaagaggtacaccgacccctccttcttcttcagggcccactctgccaagattgatgagcaaggcacgctgaagcagcatcgtcggcaggcagaagcagcagcagcagcaggtgccgccgggtctatgttcctgctgatgcagcaaacagctgctcacagggtcgaacagcccaacatggaacagaagctgcaagaaggtagtacagcgcagcccagcccaagtgagctcgagagaacgagctctttcgaggcatggctctctccacaagctcgccgctttcctaccgctactgctgctactactcatcaccatcttcaggaaccacctgatgatgatgatggtggtggtggtggtggtgctactacctgtagtggatccatcagtagtcaggttgataccacatcgaatgctgcggctgttagcagcagttccacggtgaaggcggtcaggctgaactcagcatcattggtgaaaggtggtgagagtaatacgacgaggtcgaggtacaaaggcaagatcgcctcaagagtcagcagcttgccgaggaagctcttcatgaacaccaccaagcatcacaacgaccactcgcgctcttttcgtgcaggtagtagcagcctccgggtgacccaagccacagacatcggggattgcagccctgaacttgaagccatcgccgtcgccatccccaccccagatgcagatcgatgcagtaacagtaacagcagcactcctgaaacatgtacagcagctgactccaagaacctgctgctgctgctgccaggaagtggtcctgttctggagccacctgacaattcttctgctgctgctgctgaagacgccaaagtacatacgccacttgcgcctattccaccgatgcagtggctgtcagagaaagggactccacctgcatctcctaaacacagaacaccatgtttccagcaacaatttggtagcagtgggcaatctgatgagaagccaagccaagagcacgaggcttcagaccacagcagcaatctgctgcaggagagcgtgttcttctctgcggcacaagagctagcgaagatgtcccctcctcctccttgggtgccaaggcccaaatatccactgcttgatgttaaggcagttaagctacggaatggtccaagcccgatccatccttcaagaaacattttggacagcaggagtgcacagataaaagacattgcaattgtcagtgcattctcatttcctgcatcaagattcaaactcaactgccaccatgcatggttgtggttgtactgacaaagttgtatatatattactggctgtggctggtgcatgcagtcttccaagctgaaaccagcttctagagcgagctctcatgtgactgggactgggagtcctaccaacgccaccattctgaacagagcagatggcattcggcaggtaaatttgtgtccttcaactttgcaaatgcac

SEQ ID NO: 67601 - DNA, 2370 bp, Zea Mays
cgtaccacatcatcttcctcccttcctcttcttcctcctctcccccgagcagatttaaagctatctagcagccgggagcagctatcggtacagtacgtgagcgagcggcggcggcaatgacaaggtgcggacgatgccgccagtgtgaatgcgccggcgcctccaccaccacctcccacggcgacgcgcgcaaccgcgacaacgatgcccccgacgcggtcctcgagggcctcgccatggcaggcctcgtcgacatcctccgccagctcggagacctcgcagagcttgccgcggaggtgttcgacgacatgcaagaccaagtgatggccgcgtccgcgcgagggcgacgactggccgcgagagccaggaagctgctggcggccgacctcgacctcgtcctcgacctcgacctgccgccgccgtccacccaagaacaccgctgcctcagctctgccgccgctgctactgctctcgccacctccggtggtgcaggccgtctgggctgccgctcctatctcggaggcgcgccgccgatgccgcgtgtcgtcgtccaacgtatcgagcgctgccgcgggcctcccaggctgtcactccttgacaagtttgatgctgctggcgatggagcgtgcctcaagaggtacaccgacccctccttcttcttcagggcccactctgccaagattgatgagcaaggcacgctgaagcagcatcgtcggcaggcagaagcagcagcagcagcaggtgccgccgggtctatgttcctgctgatgcagcaaacagctgctcacagggtcgaacagcccaacatggaacagaagctgcaagaaggtagtacagcgcagcccagcccaagtgagctcgagagaacgagctctttcgaggcatggctctctccacaagctcgccgctttcctaccgctactgctgctactactcatcaccatcttcaggaaccacctgatgatgatgatggtggtggtggtggtggtgctactacctgtagtggatccatcagtagtcaggttgataccacatcgaatgctgcggctgttagcagcagttccacggtgaaggcggtcaggctgaactcagcatcattggtgaaaggtggtgagagtaatacgacgaggtcgaggtagtagcagcctccgggtgacccaagccacagacatcggggattgcagccctgaacttgaagccatcgccgtcgccatccccaccccagatcgatgcagtaacagtaacagcagcactcctgaaacatgtacagcagctgactccaagaacctgctgctgctgctgccaggaagtggtcctgttctggagccacctgacaattcttctgctgctgctgctgaagacgccaaagtacatacgccacttgcgcctattccaccgatgcagtggctgtcagagaaagggactccacctgcatctcctaaacacagaacaccatgtttccagcaacaatttggtagcagtgggcaatctgatgagaagccaagccaagagcacgaggcttcagaccacagcagcaatctgctgcaggagagcgtgttcttctctgcggcacaagagctagcgaagatgtcccctcctcctccttgggtgccaaggcccaaatatccactgcttgatgttaaggcactacggaatggtccaagcccgatccatccttcaagaaacattttggacagcaggagtgcacagataaaagacattgcaatttcttccaagctgaaaccagcttctagagcgagctctcatgtgactgggactgggagtcctaccaacgccaccattctgaacagagcagatggcattcggcaggtgcacgatgatgaaactgatcaaatctggagcgatgacactcaatgaataatgatcatgtactaactgatggaagtagagtcattcaagttgagatggccgagttggtctaaggcgccagattaaggttctggtccgaaagggcgtgggttcaaatcccactctcaacaaatatttttttatttttcctgttactcttgtaattgtttgtagagaattcattagctttttttttcaaatccaactctcaacaaacatgtttttcattgtattgtttttctttttcctgtttcaaactactcttctaattgtaattgtttgtagagaattcattagccctttttttactttatcatgcagttcttgtttttggattgtttttcttcttcctgtgttaagctaatctggttcttgtaactgtttgtagaagattcattattcttgtaacagttcttggattgtctctacaaatttgttgaggcttatagttattagattttagccacaggatcaaatctttggcgcgcgcgtgtgtgtgtg

SEQ ID NO: 67602 - DNA, 2432 bp, Zea Mays
cgtaccacatcatcttcctcccttcctcttcttcctcctctcccccgagcagatttaaagctatctagcagccgggagcagctatcggtacagtacgtgagcgagcggcggcggcaatgacaaggtgcggacgatgccgccagtgtgaatgcgccggcgcctccaccaccacctcccacggcgacgcgcgcaaccgcgacaacgatgcccccgacgcggtcctcgagggcctcgccatggcaggcctcgtcgacatcctccgccagctcggagacctcgcagagcttgccgcggaggtgttcgacgacatgcaagaccaagtgatggccgcgtccgcgcgagggcgacgactggccgcgagagccaggaagctgctggcggccgacctcgacctcgtcctcgacctcgacctgccgccgccgtccacccaagaacaccgctgcctcagctctgccgccgctgctactgctctcgccacctccggtggtgcaggccgtctgggctgccgctcctatctcggaggcgcgccgccgatgccgcgtgtcgtcgtccaacgtatcgagcgctgccgcgggcctcccaggctgtcactccttgacaagtttgatgctgctggcgatggagcgtgcctcaagaggtacaccgacccctccttcttcttcagggcccactctgccaagattgatgagcaaggcacgctgaagcagcatcgtcggcaggcagaagcagcagcagcagcaggtgccgccgggtctatgttcctgctgatgcagcaaacagctgctcacagggtcgaacagcccaacatggaacagaagctgcaagaaggtagtacagcgcagcccagcccaagtgagctcgagagaacgagctctttcgaggcatggctctctccacaagctcgccgctttcctaccgctactgctgctactactcatcaccatcttcaggaaccacctgatgatgatgatggtggtggtggtggtggtgctactacctgtagtggatccatcagtagtcaggttgataccacatcgaatgctgcggctgttagcagcagttccacggtgaaggcggtcaggctgaactcagcatcattggtgaaaggtggtgagagtaatacgacgaggtcgaggtacaaaggcaagatcgcctcaagagtcagcagcttgccgaggaagctcttcatgaacaccaccaagcatcacaacgaccactcgcgctcttttcgtgcaggtagtagcagcctccgggtgacccaagccacagacatcggggattgcagccctgaacttgaagccatcgccgtcgccatccccaccccagcagctgactccaagaacctgctgctgctgctgccaggaagtggtcctgttctggagccacctgacaattcttctgctgctgctgctgaagacgccaaagtacatacgccacttgcgcctattccaccgatgcagtggctgtcagagaaagggactccacctgcatctcctaaacacagaacaccatgtttccagcaacaatttggtagcagtgggcaatctgatgagaagccaagccaagagcacgaggcttcagaccacagcagcaatctgctgcaggagagcgtgttcttctctgcggcacaagagctagcgaagatgtcccctcctcctccttgggtgccaaggcccaaatatccactgcttgatgttaaggcagttaagctacggaatggtccaagcccgatccatccttcaagaaacattttggacagcaggagtgcacagataaaagacattgcaatttcttccaagctgaaaccagcttctagagcgagctctcatgtgactgggactgggagtcctaccaacgccaccattctgaacagagcagatggcattcggcaggtgcacgatgatgaaactgatcaaatctggagcgatgacactcaatgaataatgatcatgtactaactgatggaagtagagtcattcaagttgagatggccgagttggtctaaggcgccagattaaggttctggtccgaaagggcgtgggttcaaatcccactctcaacaaatatttttttatttttcctgttactcttgtaattgtttgtagagaattcattagctttttttttcaaatccaactctcaacaaacatgtttttcattgtattgtttttctttttcctgtttcaaactactcttctaattgtaattgtttgtagagaattcattagccctttttttactttatcatgcagttcttgtttttggattgtttttcttcttcctgtgttaagctaatctggttcttgtaactgtttgtagaagattcattattcttgtaacagttcttggattgtctctacaaatttgttgaggcttatagttattagattttagccacaggatcaaatctttggcgcgcgcgtgtgtgtgtg

SEQ ID NO: 67603 - DNA, 2477 bp, Zea Mays
cgtaccacatcatcttcctcccttcctcttcttcctcctctcccccgagcagatttaaagctatctagcagccgggagcagctatcggtacagtacgtgagcgagcggcggcggcaatgacaaggtgcggacgatgccgccagtgtgaatgcgccggcgcctccaccaccacctcccacggcgacgcgcgcaaccgcgacaacgatgcccccgacgcggtcctcgagggcctcgccatggcaggcctcgtcgacatcctccgccagctcggagacctcgcagagcttgccgcggaggtgttcgacgacatgcaagaccaagtgatggccgcgtccgcgcgagggcgacgactggccgcgagagccaggaagctgctggcggccgacctcgacctcgtcctcgacctcgacctgccgccgccgtccacccaagaacaccgctgcctcagctctgccgccgctgctactgctctcgccacctccggtggtgcaggccgtctgggctgccgctcctatctcggaggcgcgccgccgatgccgcgtgtcgtcgtccaacgtatcgagcgctgccgcgggcctcccaggctgtcactccttgacaagtttgatgctgctggcgatggagcgtgcctcaagaggtacaccgacccctccttcttcttcagggcccactctgccaagattgatgagcaaggcacgctgaagcagcatcgtcggcaggcagaagcagcagcagcagcaggtgccgccgggtctatgttcctgctgatgcagcaaacagctgctcacagggtcgaacagcccaacatggaacagaagctgcaagaaggtagtacagcgcagcccagcccaagtgagctcgagagaacgagctctttcgaggcatggctctctccacaagctcgccgctttcctaccgctactgctgctactactcatcaccatcttcaggaaccacctgatgatgatgatggtggtggtggtggtggtgctactacctgtagtggatccatcagtagtcaggttgataccacatcgaatgctgcggctgttagcagcagttccacggtgaaggcggtcaggctgaactcagcatcattggtgaaaggtggtgagagtaatacgacgaggtcgaggtacaaaggcaagatcgcctcaagagtcagcagcttgccgaggaagctcttcatgaacaccaccaagcatcacaacgaccactcgcgctcttttcgtgcaggtagtagcagcctccgggtgacccaagccacagacatcggggattgcagccctgaacttgaagccatcgccgtcgccatccccaccccagatgcagatcgatgcagtaacagtaacagcagcactcctgaaacatgtacagcagctgactccaagaacctgctgctgctgctgccaggaagtggtcctgttctggagccacctgacaattcttctgctgctgctgctgaagacgccaaagtacatacgccacttgcgcctattccaccgatgcagtggctgtcagagaaagggactccacctgcatctcctaaacacagaacaccatgtttccagcaacaatttggtagcagtgggcaatctgatgagaagccaagccaagagcacgaggcttcagaccacagcagcaatctgctgcaggagagcgtgttcttctctgcggcacaagagctagcgaagatgtcccctcctcctccttgggtgccaaggcccaaatatccactgcttgatgttaaggcactacggaatggtccaagcccgatccatccttcaagaaacattttggacagcaggagtgcacagataaaagacattgcaatttcttccaagctgaaaccagcttctagagcgagctctcatgtgactgggactgggagtcctaccaacgccaccattctgaacagagcagatggcattcggcaggtgcacgatgatgaaactgatcaaatctggagcgatgacactcaatgaataatgatcatgtactaactgatggaagtagagtcattcaagttgagatggccgagttggtctaaggcgccagattaaggttctggtccgaaagggcgtgggttcaaatcccactctcaacaaatatttttttatttttcctgttactcttgtaattgtttgtagagaattcattagctttttttttcaaatccaactctcaacaaacatgtttttcattgtattgtttttctttttcctgtttcaaactactcttctaattgtaattgtttgtagagaattcattagccctttttttactttatcatgcagttcttgtttttggattgtttttcttcttcctgtgttaagctaatctggttcttgtaactgtttgtagaagattcattattcttgtaacagttcttggattgtctctacaaatttgttgaggcttatagttattagattttagccacaggatcaaatctttggcgcgcgcgtgtgtgtgtg

SEQ ID NO: 67604 - DNA, 2280 bp, Zea Mays
cgtaccacatcatcttcctcccttcctcttcttcctcctctcccccgagcagatttaaagctatctagcagccgggagcagctatcggtacagtacgtgagcgagcggcggcggcaatgacaaggtgcggacgatgccgccagtgtgaatgcgccggcgcctccaccaccacctcccacggcgacgcgcgcaaccgcgacaacgatgcccccgacgcggtcctcgagggcctcgccatggcaggcctcgtcgacatcctccgccagctcggagacctcgcagagcttgccgcggaggtgttcgacgacatgcaagaccaagtgatggccgcgtccgcgcgagggcgacgactggccgcgagagccaggaagctgctggcggccgacctcgacctcgtcctcgacctcgacctgccgccgccgtccacccaagaacaccgctgcctcagctctgccgccgctgctactgctctcgccacctccggtggtgcaggccgtctgggctgccgctcctatctcggaggcgcgccgccgatgccgcgtgtcgtcgtccaacgtatcgagcgctgccgcgggcctcccaggctgtcactccttgacaagtttgatgctgctggcgatggagcgtgcctcaagaggtacaccgacccctccttcttcttcagggcccactctgccaagattgatgagcaaggcacgctgaagcagcatcgtcggcaggcagaagcagcagcagcagcaggtgccgccgggtctatgttcctgctgatgcagcaaacagctgctcacagggtcgaacagcccaacatggaacagaagctgcaagaaggtagtacagcgcagcccagcccaagtgagctcgagagaacgagctctttcgaggcatggctctctccacaagctcgccgctttcctaccgctactgctgctactactcatcaccatcttcaggaaccacctgatgatgatgatggtggtggtggtggtggtgctactacctgtagtggatccatcagtagtcaggttgataccacatcgaatgctgcggctgttagcagcagttccacggtgaaggcggtcaggctgaactcagcatcattggtgaaaggtggtgagagtaatacgacgaggtcgaggtagtagcagcctccgggtgacccaagccacagacatcggggattgcagccctgaacttgaagccatcgccgtcgccatccccaccccagatcgatgcagtaacagtaacagcagcactcctgaaacatgtacagcagctgactccaagaacctgctgctgctgctgccaggaagtggtcctgttctggagccacctgacaattcttctgctgctgctgctgaagacgccaaacaacaatttggtagcagtgggcaatctgatgagaagccaagccaagagcacgaggcttcagaccacagcagcaatctgctgcaggagagcgtgttcttctctgcggcacaagagctagcgaagatgtcccctcctcctccttgggtgccaaggcccaaatatccactgcttgatgttaaggcagttaagctacggaatggtccaagcccgatccatccttcaagaaacattttggacagcaggagtgcacagataaaagacattgcaatttcttccaagctgaaaccagcttctagagcgagctctcatgtgactgggactgggagtcctaccaacgccaccattctgaacagagcagatggcattcggcaggtgcacgatgatgaaactgatcaaatctggagcgatgacactcaatgaataatgatcatgtactaactgatggaagtagagtcattcaagttgagatggccgagttggtctaaggcgccagattaaggttctggtccgaaagggcgtgggttcaaatcccactctcaacaaatatttttttatttttcctgttactcttgtaattgtttgtagagaattcattagctttttttttcaaatccaactctcaacaaacatgtttttcattgtattgtttttctttttcctgtttcaaactactcttctaattgtaattgtttgtagagaattcattagccctttttttactttatcatgcagttcttgtttttggattgtttttcttcttcctgtgttaagctaatctggttcttgtaactgtttgtagaagattcattattcttgtaacagttcttggattgtctctacaaatttgttgaggcttatagttattagattttagccacaggatcaaatctttggcgcgcgcgtgtgtgtgtg

SEQ ID NO: 67605 - DNA, 2301 bp, Zea Mays
cgtaccacatcatcttcctcccttcctcttcttcctcctctcccccgagcagatttaaagctatctagcagccgggagcagctatcggtacagtacgtgagcgagcggcggcggcaatgacaaggtgcggacgatgccgccagtgtgaatgcgccggcgcctccaccaccacctcccacggcgacgcgcgcaaccgcgacaacgatgcccccgacgcggtcctcgagggcctcgccatggcaggcctcgtcgacatcctccgccagctcggagacctcgcagagcttgccgcggaggtgttcgacgacatgcaagaccaagtgatggccgcgtccgcgcgagggcgacgactggccgcgagagccaggaagctgctggcggccgacctcgacctcgtcctcgacctcgacctgccgccgccgtccacccaagaacaccgctgcctcagctctgccgccgctgctactgctctcgccacctccggtggtgcaggccgtctgggctgccgctcctatctcggaggcgcgccgccgatgccgcgtgtcgtcgtccaacgtatcgagcgctgccgcgggcctcccaggctgtcactccttgacaagtttgatgctgctggcgatggagcgtgcctcaagaggtacaccgacccctccttcttcttcagggcccactctgccaagattgatgagcaaggcacgctgaagcagcatcgtcggcaggcagaagcagcagcagcagcaggtgccgccgggtctatgttcctgctgatgcagcaaacagctgctcacagggtcgaacagcccaacatggaacagaagctgcaagaaggtagtacagcgcagcccagcccaagtgagctcgagagaacgagctctttcgaggcatggctctctccacaagctcgccgctttcctaccgctactgctgctactactcatcaccatcttcaggaaccacctgatgatgatgatggtggtggtggtggtggtgctactacctgtagtggatccatcagtagtcaggttgataccacatcgaatgctgcggctgttagcagcagttccacggtgaaggcggtcaggctgaactcagcatcattggtgaaaggtggtgagagtaatacgacgaggtcgaggtacaaaggcaagatcgcctcaagagtcagcagcttgccgaggaagctcttcatgaacaccaccaagcatcacaacgaccactcgcgctcttttcgtgcaggtagtagcagcctccgggtgacccaagccacagacatcggggattgcagccctgaacttgaagccatcgccgtcgccatccccaccccaggaagtggtcctgttctggagccacctgacaattcttctgctgctgctgctgaagacgccaaagtacatacgccacttgcgcctattccaccgatgcagtggctgtcagagaaagggactccacctgcatctcctaaacacagaacaccatgtttccagcaacaatttggtagcagtgggcaatctgatgagaagccaagccaagagcacgaggcttcagaccacagcagcaatctgctgcaggagagcgtgttcttctctgcggcacaagagctagcgaagatgtcccctcctcctccttgggtgccaaggcccaaatatccactgcttgatgttaaggcagttaagctacggaatggtccaagcccgatccatccttcaagaaacattttggacagcaggagtgcacagataaaagacattgcaatttcttccaagctgaaaccagcttctagagcgagctctcatgtgactgggactgggagtcctaccaacgccaccattctgaacagagcagatggcattcggcaggtgcacgatgatgaaactgatcaaatctggagcgatgacactcaatgaataatgatcatgtactaactgatggaagtagagtcattcaagttgagatggccgagttggtctaaggcgccagattaagagaaccgctgaggctcagagatttcaaacacaggattttaaaatatcttcagaccgcacgagcatggacgttcacttatcagttatattcttatcagggcttgttaagttagaggtctttctatttaattttgaataggaagaaatttaatcccatcaaaccccatgcgaccaaacaagctctcaagtgagtcagattgcacttgtcaccttctaatcgaagcgaatatatatattttcagtttttttttataatggaaacatgagttccagctttagcatggtaatgtgtacttttcagttatatcttacagtgttt

SEQ ID NO: 67606 - DNA, 2255 bp, Zea Mays
cgtaccacatcatcttcctcccttcctcttcttcctcctctcccccgagcagatttaaagctatctagcagccgggagcagctatcggtacagtacgtgagcgagcggcggcggcaatgacaaggtgcggacgatgccgccagtgtgaatgcgccggcgcctccaccaccacctcccacggcgacgcgcgcaaccgcgacaacgatgcccccgacgcggtcctcgagggcctcgccatggcaggcctcgtcgacatcctccgccagctcggagacctcgcagagcttgccgcggaggtgttcgacgacatgcaagaccaagtgatggccgcgtccgcgcgagggcgacgactggccgcgagagccaggaagctgctggcggccgacctcgacctcgtcctcgacctcgacctgccgccgccgtccacccaagaacaccgctgcctcagctctgccgccgctgctactgctctcgccacctccggtggtgcaggccgtctgggctgccgctcctatctcggaggcgcgccgccgatgccgcgtgtcgtcgtccaacgtatcgagcgctgccgcgggcctcccaggctgtcactccttgacaagtttgatgctgctggcgatggagcgtgcctcaagaggtacaccgacccctccttcttcttcagggcccactctgccaagattgatgagcaaggcacgctgaagcagcatcgtcggcaggcagaagcagcagcagcagcaggtgccgccgggtctatgttcctgctgatgcagcaaacagctgctcacagggtcgaacagcccaacatggaacagaagctgcaagaaggtagtacagcgcagcccagcccaagtgagctcgagagaacgagctctttcgaggcatggctctctccacaagctcgccgctttcctaccgctactgctgctactactcatcaccatcttcaggaaccacctgatgatgatgatggtggtggtggtggtggtgctactacctgtagtggatccatcagtagtcaggttgataccacatcgaatgctgcggctgttagcagcagttccacggtgaaggcggtcaggctgaactcagcatcattggtgaaaggtggtgagagtaatacgacgaggtcgaggtacaaaggcaagatcgcctcaagagtcagcagcttgccgaggaagctcttcatgaacaccaccaagcatcacaacgaccactcgcgctcttttcgtgcaggtagtagcagcctccgggtgacccaagccacagacatcggggattgcagccctgaacttgaagccatcgccgtcgccatccccaccccagatcgatgcagtaacagtaacagcagcactcctgaaacatgtacagcagctgactccaagaacctgctgctgctgctgccaggaagtggtcctgttctggagccacctgacaattcttctgctgctgctgctgaagacgccaaagtacatacgccacttgcgcctattccaccgatgcagtggctgtcagagaaagggactccacctgcatctcctaaacacagaacaccatgtttccagcaacaatttggtagcagtgggcaatctgatgagaagccaagccaagagcacgaggcttcagaccacagcagcaatctgctgcaggagagcgtgttcttctctgcggcacaagagctagcgaagatgtcccctcctcctccttgggtgccaaggcccaaatatccactgcttgatgttaaggcagttaagctacggaatggtccaagcccgatccatccttcaagaaacattttggacagcaggagtgcacagataaaagacattgcaatttcttccaagctgaaaccagcttctagagcgagctctcatgtgactgggactgggagtcctaccaacgccaccattctgaacagagcagatggcattcggcagagaaccgctgaggctcagagatttcaaacacaggattttaaaatatcttcagaccgcacgagcatggacgttcacttatcagttatattcttatcagggcttgttaagttagaggtctttctatttaattttgaataggaagaaatttaatcccatcaaaccccatgcgaccaaacaagctctcaagtgagtcagattgcacttgtcaccttctaatcgaagcgaatatatatattttcagtttttttttataatggaaacatgagttccagctttagcatggtaatgtgtacttttcagttatatcttacagtgttt

SEQ ID NO: 67607 - DNA, 2281 bp, Zea Mays
cgtaccacatcatcttcctcccttcctcttcttcctcctctcccccgagcagatttaaagctatctagcagccgggagcagctatcggtacagtacgtgagcgagcggcggcggcaatgacaaggtgcggacgatgccgccagtgtgaatgcgccggcgcctccaccaccacctcccacggcgacgcgcgcaaccgcgacaacgatgcccccgacgcggtcctcgagggcctcgccatggcaggcctcgtcgacatcctccgccagctcggagacctcgcagagcttgccgcggaggtgttcgacgacatgcaagaccaagtgatggccgcgtccgcgcgagggcgacgactggccgcgagagccaggaagctgctggcggccgacctcgacctcgtcctcgacctcgacctgccgccgccgtccacccaagaacaccgctgcctcagctctgccgccgctgctactgctctcgccacctccggtggtgcaggccgtctgggctgccgctcctatctcggaggcgcgccgccgatgccgcgtgtcgtcgtccaacgtatcgagcgctgccgcgggcctcccaggctgtcactccttgacaagtttgatgctgctggcgatggagcgtgcctcaagaggtacaccgacccctccttcttcttcagggcccactctgccaagattgatgagcaaggcacgctgaagcagcatcgtcggcaggcagaagcagcagcagcagcaggtgccgccgggtctatgttcctgctgatgcagcaaacagctgctcacagggtcgaacagcccaacatggaacagaagctgcaagaaggtagtacagcgcagcccagcccaagtgagctcgagagaacgagctctttcgaggcatggctctctccacaagctcgccgctttcctaccgctactgctgctactactcatcaccatcttcaggaaccacctgatgatgatgatggtggtggtggtggtggtgctactacctgtagtggatccatcagtagtcaggttgataccacatcgaatgctgcggctgttagcagcagttccacggtgaaggcggtcaggctgaactcagcatcattggtgaaaggtggtgagagtaatacgacgaggtcgaggtagtagcagcctccgggtgacccaagccacagacatcggggattgcagccctgaacttgaagccatcgccgtcgccatccccaccccagatcgatgcagtaacagtaacagcagcactcctgaaacatgtacagcagctgactccaagaacctgctgctgctgctgccaggaagtggtcctgttctggagccacctgacaattcttctgctgctgctgctgaagacgccaaagtacatacgccacttgcgcctattccaccgatgcagtggctgtcagagaaagggactccacctgcatctcctaaacacagaacaccatgtttccagcaacaatttggtagcagtgggcaatctgatgagaagccaagccaagagcacgaggcttcagaccacagcagcaatctgctgcaggagagcgtgttcttctctgcggcacaagagctagcgaagatgtcccctcctcctccttgggtgccaaggcccaaatatccactgcttgatgttaaggcagttaagctacggaatggtccaagcccgatccatccttcaagaaacattttggacagcaggagtgcacagataaaagacattgcaatttcttccaagctgaaaccagcttctagagcgagctctcatgtgactgggactgggagtcctaccaacgccaccattctgaacagagcagatggcattcggcaggtgcacgatgatgaaactgatcaaatctggagcgatgacactcaatgaataatgatcatgtactaactgatggaagtagagtcattcaagttgagatggccgagttggtctaaggcgccagattaagagaaccgctgaggctcagagatttcaaacacaggattttaaaatatcttcagaccgcacgagcatggacgttcacttatcagttatattcttatcagggcttgttaagttagaggtctttctatttaattttgaataggaagaaatttaatcccatcaaaccccatgcgaccaaacaagctctcaagtgagtcagattgcacttgtcaccttctaatcgaagcgaatatatatattttcagtttttttttataatggaaacatgagttccagctttagcatggtaatgtgtacttttcagttatatcttacagtgttt

SEQ ID NO: 67608 - DNA, 4187 bp, Zea Mays
cagccgccagccgccggccgccggccgccgcattgcccatccacagcggcagtgcaatcgattgtcttccttctactggtatccggcactttcgtttgtgttcatgtgcctcaagtaatattgctgtcaacatggtcaagggatccacaggccaccacagcaaccccatcgctccagtcctccagcatgatattgatgggtcctatctgcgcgttcgttctagaaaggcaacttgctcggattgctcacatgttctcaagccaggcgccgatgtttgtgtatggcaagcagtttacagaggagaaacaaaagattctgtactgttgtgctgccgtgatgcaaggctcatcaaaatcaagagaaaccatcaatcggaccggtgcctatgcttgtttgccgttattttctacaaagaccagtgcccaggcagcaaagaaaaagtgatatccggtacaatagctgacgtagtgacgatagacgacatctgcatcttgcagaatctccaacctgaggagctccaggatgggagcgtgcgatggaattctgcagtggactgcttccatcataacagaagcaagctgctaagtgcaagattctccctggaagtcgcatacctcatagttttgtctagcctgaggagaatggaattcaacatcaagatggtcgacggcaacatcatttaccagatcatcaaaggagaccaagcacgggatagtattgattccatgagcatacctccaggttttgggaagaacatggacataatatcattcaaaccacgtggtgaggctttacgcccaattaccagaacagttccagtcactcaggttgaagaaggcaatctcacagaagatgggtgtatcgccgtgaagggagaatctgatagtgcacaagatgtcgagatcttgtatgcgcatgtggacataagacgctcaaagcgtatgaaaactcaaccagatcgctttactagttatgatgcgcgtaatttcaaccggacctacaacaagaaagaagcagatggaccatctactaagtatgaagattcggagagcggcttgagttgtgattcatcagagcagagagaatcaagtgatgaagaggccttagaaaatccaaggtctatggcagccgagcacaagtacccagtgaaaagaaatcagtgctctttgcctgtaaaagagaaacagatctcaatggaaataaagaagaacacaacagaccaagggtgttcagattcttacattccacatacgccagcaaagaatacagagcgtccgaggtttcgactaaagccatttgcttcgtctcgaagcctagatggcaatagtgaaccagcattctgccaaaagaggggtaggaaaagaaagaaacacatgtgccaaatagagtacaagcgaatgatagaccaatgcatcggaaatatccagtgtgaagtggagagagattctgactttaagtttggtgaccagatattggatggctgtgtacgtgcttaccaagaagtggattttacgtggccatcttccgctgatagtcaagaggagaaggatgagcttgacgaattgtggaaagaaatggactatgcactggccacagtagcaattcttgaacaaaagcagatgacagattcagaagtcgttcatgagagcaatactgatttaggaaaaggaggagagcactgtcatcatgactgcatgctggacgaacagcttggtctgacctgcagactgtgcaatgttgtatgcattgaggcaaaggatatctttccaccaatgttcactggtaaggaccacgagaggcctgaaaggaaccattttggccaggatggtcatgtacttgacctttccttttttgagatttgtgctccagaattctccaaaatcaaggaatctgggaatgtgtgggcttcaatcactgatcttgaaccaaagttacttgctcatcagagaaaagccttcgaatttatatggaaaaacttggcaggatcattacagcttgaagaaatggatggttcaacaagtagaggtggttgtgtggttgcacatactccaggagcgggtaaaactcttctgctgatttcgtttcttgtcagttacttgaaagttcacccaagaagccggccattggtccttactccaaaagctgcaatccatacctggaggacagagtttcagaaatggggcatcctgcttccgttacatgtgcttcaccactctaacagaacaagcaaactgatggggggtcttagttcgaaactgcaggcggttttgaagagtttccaccagccatcgtggaaaacaatgcgcatcatgcattgtctggacaaactatgcaagtggcatgaggaaccaagcattcttctcatgacgtattcttccttcttatcgcttacgaaagaagactcaaaactgcgtcatcaggcgttcataacgaaagttttgatgaacaaccccgggctattgattcttgatgaagggcacaacccaaggagcaacaaatcaaagttgagaaagttgctgatgaaggtgaagactgaattcaggatactcttgtctggcacggtctttcagaacaactttgaagagtacttcaacaccttgtctttggccagacctcgttttgtcaacgacgttatgaccacgctggttacagaatcagaaaagagaacacggagccgaaccggcaaacatcaagaagcactggcaaggcatgtttttgtggaaagagtggggcacaagatagagtctagcagcaaacatgacaggatggatggcatctccttgttaaatgagcttactcaaggattcatcgattcgttcgaaggtacaaaactgaacattcttccgggtatacgtgtttatacccttttcatgaaacccaccgacgtccaggaagaggtactggcgaaactgctgatgcccttgtcaggcaatgcgcgttaccctctcgagtatgagctgctcatcacaattgcttctatccatccttggcttataaacacaaccaagtgtgctagcacttacttcaccccagcagaagtagctagcgttgacaagtacaagcggaactttgctgctggttgcaaggcaaagtttgtgattgatctgttgcacaagtcctcgttcagaggggagagggttctggtattttgccacaacgtggccccgatagccttcctggtcacgctcatagagatcgtctttggatggcgccttgggcaggaagtcctggtgctgcagggagaccaagaactgcatgtgcggtcagatgtcatggataaattcaacagcgacagaagagggaagaggaaggtgctgattgcttcaactacagcctgtgccgagggtatcagtctcaccggcgcgtccagactggtgatgcttgattcggagtggaaccattccaagacaaggcaggcaatcgcgagggcgttccggcctggccaggagaggatggtgtttgtctaccttcttgtggcgtctgggacatgggaggaagataaatacaacagtaacaggaggaaagcttggatcgcaaaaatggtcttctttggccgtcatttcgatgacccattgcaaaaccgtgtgaccgaaatcgatgacgaggttctcaaggagcttgctgatgaagatgagaccaatactttccatatgatagtgaaacaggactgaaaaaaaaagatatggtccctttgttctacatggttaagtgctgctatgcttttgtaattgtaatctggtggttttagctgaggaaaaagaaacctatggatatctttcgttaagactttgtgctgtaacaaggatgtgcttgccttgctaactagtcttgcatgaaatgcatattccactcggcatgatcagaacccgatgtggcgccttatcaacagcttccgcctcttcttctggtttgaatttgtcaggctttgccgatggtctcggtggttcttcggtcaactgctctatggccactgggattaccgcgtttggatcatcatccccttccgccattgcaaaagtttgttgtagtggtcccaccggacgtgccaatgagcatgagcccacaacctctatcacttacatgcacattctgaaggtttagaaacacattccactcactttttttctcgagaacacggcataattacgtatcagtatcattatattaagaagaaaaaaacgagtctt

SEQ ID NO: 67609 - DNA, 4248 bp, Zea Mays
agcggcagtgcaatcgattgtcttccttctactggtatccggcactttcgtttgtgttcatgtgcctcaagtaatattgctgtcaacatggtcaagggatccacaggccaccacagcaaccccatcgctccagtcccgtttgaggcgtttcataacggatcatggcatggagccaattctataatgatacgggatggtggtttgcttgtaaaatttgtctcctctggatacgcagtcgcagtccagcatgatattgatgggtcctatctgcgcgttcgttctagaaaggcaacttgctcggattgctcacatgttctcaagccaggcgccgatgtttgtgtatggcaagcagtttacagaggagaaacaaaagattctgtactgttgtgctgccgtgatgcaaggctcatcaaaatcaagagaaaccatcaatcggaccggtgcctatgcttgtttgccgttattttctacaaagaccagtgcccaggcagcaaagaaaaagtgatatccggtacaatagctgacgtagtgacgatagacgacatctgcatcttgcagaatctccaacctgaggagctccaggatgggagcgtgcgatggaattctgcagtggactgcttccatcataacagaagcaagctgctaagtgcaagattctccctggaagtcgcatacctcatagttttgtctagcctgaggagaatggaattcaacatcaagatggtcgacggcaacatcatttaccagatcatcaaaggagaccaagcacgggatagtattgattccatgagcatacctccaggttttgggaagaacatggacataatatcattcaaaccacgtggtgaggctttacgcccaattaccagaacagttccagtcactcaggttgaagaaggcaatctcacagaagatgggtgtatcgccgtgaagggagaatctgatagtgcacaagatgtcgagatcttgtatgcgcatgtggacataagacgctcaaagcgtatgaaaactcaaccagatcgctttactagttatgatgcgcgtaatttcaaccggacctacaacaagaaagaagcagatggaccatctactaagtatgaagattcggagagcggcttgagttgtgattcatcagagcagagagaatcaagtgatgaagaggccttagaaaatccaaggtctatggcagccgagcacaagtacccagtgaaaagaaatcagtgctctttgcctgtaaaagagaaacagatctcaatggaaataaagaagaacacaacagaccaagggtgttcagattcttacattccacatacgccagcaaagaatacagagcgtccgaggtttcgactaaagccatttgcttcgtctcgaagcctagatggcaatagtgaaccagcattctgccaaaagaggggtaggaaaagaaagaaacacatgtgccaaatagagtacaagcgaatgatagaccaatgcatcggaaatatccagtgtgaagtggagagagattctgactttaagtttggtgaccagatattggatggctgtgtacgtgcttaccaagaagtggattttacgtggccatcttccgctgatagtcaagaggagaaggatgagcttgacgaattgtggaaagaaatggactatgcactggccacagtagcaattcttgaacaaaagcagatgacagattcagaagtcgttcatgagagcaatactgatttaggaaaaggaggagagcactgtcatcatgactgcatgctggacgaacagcttggtctgacctgcagactgtgcaatgttgtatgcattgaggcaaaggatatctttccaccaatgttcactggtaaggaccacgagaggcctgaaaggaaccattttggccaggatggtcatgtacttgacctttccttttttgagatttgtgctccagaattctccaaaatcaaggaatctgggaatgtgtgggcttcaatcactgatcttgaaccaaagttacttgctcatcagagaaaagccttcgaatttatatggaaaaacttggcaggatcattacagcttgaagaaatggatggttcaacaagtagaggtggttgtgtggttgcacatactccaggagcgggtaaaactcttctgctgatttcgtttcttgtcagttacttgaaagttcacccaagaagccggccattggtccttactccaaaagctgcaatccatacctggaggacagagtttcagaaatggggcatcctgcttccgttacatgtgcttcaccactctaacagaacaagcaaactgatggggggtcttagttcgaaactgcaggcggttttgaagagtttccaccagccatcgtggaaaacaatgcgcatcatgcattgtctggacaaactatgcaagtggcatgaggaaccaagcattcttctcatgacgtattcttccttcttatcgcttacgaaagaagactcaaaactgcgtcatcaggcgttcataacgaaagttttgatgaacaaccccgggctattgattcttgatgaagggcacaacccaaggagcaacaaatcaaagttgagaaagttgctgatgaaggtgaagactgaattcaggatactcttgtctggcacggtctttcagaacaactttgaagagtacttcaacaccttgtctttggccagacctcgttttgtcaacgacgttatgaccacgctggttacagaatcagaaaagagaacacggagccgaaccggcaaacatcaagaagcactggcaaggcatgtttttgtggaaagagtggggcacaagatagagtctagcagcaaacatgacaggatggatggcatctccttgttaaatgagcttactcaaggattcatcgattcgttcgaaggtacaaaactgaacattcttccgggtatacgtgtttatacccttttcatgaaacccaccgacgtccaggaagaggtactggcgaaactgctgatgcccttgtcaggcaatgcgcgttaccctctcgagtatgagctgctcatcacaattgcttctatccatccttggcttataaacacaaccaagtgtgctagcacttacttcaccccagcagaagtagctagcgttgacaagtacaagcggaactttgctgctggttgcaaggcaaagtttgtgattgatctgttgcacaagtcctcgttcagaggggagagggttctggtattttgccacaacgtggccccgatagccttcctggtcacgctcatagagatcgtctttggatggcgccttgggcaggaagtcctggtgctgcagggagaccaagaactgcatgtgcggtcagatgtcatggataaattcaacagcgacagaagagggaagaggaaggtgctgattgcttcaactacagcctgtgccgagggtatcagtctcaccggcgcgtccagactggtgatgcttgattcggagtggaaccattccaagacaaggcaggcaatcgcgagggcgttccggcctggccaggagaggatggtgtttgtctaccttcttgtggcgtctgggacatgggaggaagataaatacaacagtaacaggaggaaagcttggatcgcaaaaatggtcttctttggccgtcatttcgatgacccattgcaaaaccgtgtgaccgaaatcgatgacgaggttctcaaggagcttgctgatgaagatgagaccaatactttccatatgatagtgaaacaggactgaaaaaaaaagatatggtccctttgttctacatggttaagtgctgctatgcttttgtaattgtaatctggtggttttagctgaggaaaaagaaacctatggatatctttcgttaagactttgtgctgtaacaaggatgtgcttgccttgctaactagtcttgcatgaaatgcatattccactcggcatgatcagaacccgatgtggcgccttatcaacagcttccgcctcttcttctggtttgaatttgtcaggctttgccgatggtctcggtggttcttcggtcaactgctctatggccactgggattaccgcgtttggatcatcatccccttccgccattgcaaaagtttgttgtagtggtcccaccggacgtgccaatgagcatgagcccacaacctctatcacttacatgcacattctgaaggtttagaaacacattccactcactttttttctcgagaacacggcataattacgtatcagtatcattatattaagaagaaaaaaacgagtctt

SEQ ID NO: 67610 - DNA, 4237 bp, Zea Mays
cgattgtcttccttctactggtatccgcaggcactttcgtttgtgttcatgtgcctcaagtaatattgctgtcaacatggtcaagggatccacaggccaccacagcaaccccatcgctccagtcccgtttgaggcgtttcataacggatcatggcatggagccaattctataatgatacgggatggtggtttgcttgtaaaatttgtctcctctggatacgcagtcgcagtccagcatgatattgatgggtcctatctgcgcgttcgttctagaaaggcaacttgctcggattgctcacatgttctcaagccaggcgccgatgtttgtgtatggcaagcagtttacagaggagaaacaaaagattctgtactgttgtgctgccgtgatgcaaggctcatcaaaatcaagagaaaccatcaatcggaccggtgcctatgcttgtttgccgttattttctacaaagaccagtgcccaggcagcaaagaaaaagtgatatccggtacaatagctgacgtagtgacgatagacgacatctgcatcttgcagaatctccaacctgaggagctccaggatgggagcgtgcgatggaattctgcagtggactgcttccatcataacagaagcaagctgctaagtgcaagattctccctggaagtcgcatacctcatagttttgtctagcctgaggagaatggaattcaacatcaagatggtcgacggcaacatcatttaccagatcatcaaaggagaccaagcacgggatagtattgattccatgagcatacctccaggttttgggaagaacatggacataatatcattcaaaccacgtggtgaggctttacgcccaattaccagaacagttccagtcactcaggttgaagaaggcaatctcacagaagatgggtgtatcgccgtgaagggagaatctgatagtgcacaagatgtcgagatcttgtatgcgcatgtggacataagacgctcaaagcgtatgaaaactcaaccagatcgctttactagttatgatgcgcgtaatttcaaccggacctacaacaagaaagaagcagatggaccatctactaagtatgaagattcggagagcggcttgagttgtgattcatcagagcagagagaatcaagtgatgaagaggccttagaaaatccaaggtctatggcagccgagcacaagtacccagtgaaaagaaatcagtgctctttgcctgtaaaagagaaacagatctcaatggaaataaagaagaacacaacagaccaagggtgttcagattcttacattccacatacgccagcaaagaatacagagcgtccgaggtttcgactaaagccatttgcttcgtctcgaagcctagatggcaatagtgaaccagcattctgccaaaagaggggtaggaaaagaaagaaacacatgtgccaaatagagtacaagcgaatgatagaccaatgcatcggaaatatccagtgtgaagtggagagagattctgactttaagtttggtgaccagatattggatggctgtgtacgtgcttaccaagaagtggattttacgtggccatcttccgctgatagtcaagaggagaaggatgagcttgacgaattgtggaaagaaatggactatgcactggccacagtagcaattcttgaacaaaagcagatgacagattcagaagtcgttcatgagagcaatactgatttaggaaaaggaggagagcactgtcatcatgactgcatgctggacgaacagcttggtctgacctgcagactgtgcaatgttgtatgcattgaggcaaaggatatctttccaccaatgttcactggtaaggaccacgagaggcctgaaaggaaccattttggccaggatggtcatgtacttgacctttccttttttgagatttgtgctccagaattctccaaaatcaaggaatctgggaatgtgtgggcttcaatcactgatcttgaaccaaagttacttgctcatcagagaaaagccttcgaatttatatggaaaaacttggcaggatcattacagcttgaagaaatggatggttcaacaagtagaggtggttgtgtggttgcacatactccaggagcgggtaaaactcttctgctgatttcgtttcttgtcagttacttgaaagttcacccaagaagccggccattggtccttactccaaaagctgcaatccatacctggaggacagagtttcagaaatggggcatcctgcttccgttacatgtgcttcaccactctaacagaacaagcaaactgatggggggtcttagttcgaaactgcaggcggttttgaagagtttccaccagccatcgtggaaaacaatgcgcatcatgcattgtctggacaaactatgcaagtggcatgaggaaccaagcattcttctcatgacgtattcttccttcttatcgcttacgaaagaagactcaaaactgcgtcatcaggcgttcataacgaaagttttgatgaacaaccccgggctattgattcttgatgaagggcacaacccaaggagcaacaaatcaaagttgagaaagttgctgatgaaggtgaagactgaattcaggatactcttgtctggcacggtctttcagaacaactttgaagagtacttcaacaccttgtctttggccagacctcgttttgtcaacgacgttatgaccacgctggttacagaatcagaaaagagaacacggagccgaaccggcaaacatcaagaagcactggcaaggcatgtttttgtggaaagagtggggcacaagatagagtctagcagcaaacatgacaggatggatggcatctccttgttaaatgagcttactcaaggattcatcgattcgttcgaaggtacaaaactgaacattcttccgggtatacgtgtttatacccttttcatgaaacccaccgacgtccaggaagaggtactggcgaaactgctgatgcccttgtcaggcaatgcgcgttaccctctcgagtatgagctgctcatcacaattgcttctatccatccttggcttataaacacaaccaagtgtgctagcacttacttcaccccagcagaagtagctagcgttgacaagtacaagcggaactttgctgctggttgcaaggcaaagtttgtgattgatctgttgcacaagtcctcgttcagaggggagagggttctggtattttgccacaacgtggccccgatagccttcctggtcacgctcatagagatcgtctttggatggcgccttgggcaggaagtcctggtgctgcagggagaccaagaactgcatgtgcggtcagatgtcatggataaattcaacagcgacagaagagggaagaggaaggtgctgattgcttcaactacagcctgtgccgagggtatcagtctcaccggcgcgtccagactggtgatgcttgattcggagtggaaccattccaagacaaggcaggcaatcgcgagggcgttccggcctggccaggagaggatggtgtttgtctaccttcttgtggcgtctgggacatgggaggaagataaatacaacagtaacaggaggaaagcttggatcgcaaaaatggtcttctttggccgtcatttcgatgacccattgcaaaaccgtgtgaccgaaatcgatgacgaggttctcaaggagcttgctgatgaagatgagaccaatactttccatatgatagtgaaacaggactgaaaaaaaaagatatggtccctttgttctacatggttaagtgctgctatgcttttgtaattgtaatctggtggttttagctgaggaaaaagaaacctatggatatctttcgttaagactttgtgctgtaacaaggatgtgcttgccttgctaactagtcttgcatgaaatgcatattccactcggcatgatcagaacccgatgtggcgccttatcaacagcttccgcctcttcttctggtttgaatttgtcaggctttgccgatggtctcggtggttcttcggtcaactgctctatggccactgggattaccgcgtttggatcatcatccccttccgccattgcaaaagtttgttgtagtggtcccaccggacgtgccaatgagcatgagcccacaacctctatcacttacatgcacattctgaaggtttagaaacacattccactcactttttttctcgagaacacggcataattacgtatcagtatcattatattaagaagaaaaaaacgagtctt

SEQ ID NO: 67611 - DNA, 3239 bp, Zea Mays
ctgtcctagtgtactcttgccttgacacgaatactcagagagctcactctctccagcccatcccaaacctagccgccacgccaagcaccttccctcgcctccgatcctttcctttcccccaccggcgaggtcgccgcccgcccgccgcccaggggtttcctcgccatgcttccgtccaagaggtctgcaagcgccgacggcggcgagcccaagcgggctaagctgggggaatcgccatccgccgcccgcgtgggtaccagcaacggcacccggaatggggcggcgccggagattgacgaggacctgcacagcaggcagctcgccgtgtacggcagggagacaatgcgccgcctctttgccgccgatgttctcgtctctggcctcgatggcctcggtgctgagattgcaaagaatcttgctcttgctggagtcaaatctgtcaccatacatgatgtcaaaatggtggaaatgtgggacttgtctggcaatttcttcttgtcagagcaagacatcggaaagaacagggctctagcttgtgtctctaagctgcaagagctgaataacgctgttctggtctctgctctgacagaggaattgacgatagagcacctgtctaagttccaggctgttgttttcactgatataagtttggagaaggcttatgaatttgacgactattgtcacagccaccagcctccaatctcttttatcaaagctcaagtctgtggccttttcggtagtgtcttctgtgattttggacctgagtttactgtccttgacgttgatggtgaagatccacatactggtataattgcatccatcagcaacgacactcctgcaattgtatcctgtgttgatgatgagaggcttgagtttcaggacggtgatcttgttgttttctctgaggtccaaggcatgacagaactgaatgatggaaaaccaaggaaggtaaaaaatgctaggccgttttcatttagcgtcgaggaggacacaagtagctatggtgtttacacaaaaggtggtatcgttacacaagtcaaagaaccgaaggttctacgtttcaaggcactaagagatgcaatgagagatcctggtgatttccttctgagcgacttttcgaagtttgaacattcacctgtgcttcatctagcctttgaagctctggataagtttaagaaggagcatgtgcgctatcctaccgccggctgtgagcaggatgctcaaagtttcctgaagtttgctgctgatattaatgaagcatctgttggttctaagctggaaaacattgatgaaaagttgctccgtcatttcgcaagtggttctcgagctgttttgaacccaatggccgcaatgtttggtggtattgttggccaggaagttgtgaaggcatgttcagggaaattccatccgctttaccagttcttctacttcgattcagttgaatctcttcctacatatcagttggatccccaggacttgaagccttcaaatagccgctatgatgcccagatctctgtatttggttccaagcttcagaaaaaactgctagatgcaaatgttttcattgtgggttctggcgctcttggatgcgagttcttgaagaatcttgccttaatgggtgtctcctgcagctccaagggaaaggtaactataacagatgacgatgtcatcgagaaaagcaatctgagccgccaatttctattccgtgactggaacattgggcgcaaagtgcaatacacaaatggtcattcctcaccttactgaaaattatggagcttcaagagacccacctgagaagcaggcacccatgtgcacagtccattcttttccacacaacattgaccattgcttgacatgggcccgttcagagtttgagggtttgctagagaaaacaccaaatgaagtaaactcttttctgtctaatcctgctcaatatgctgctgtcatgaggaaggcaggtgatgcccaagcaagggaattacttgaacgcgtctccgaatgtcttgacaaggagcgatgcaatacatttgaggactgtataacttgggctcgattgagatttgaggattatttctcaaaccgcgtgaagcagcttacattcacttttcctgaagatgctgctactagcacaggcactcctttctggtcggccccaaagcgctttccccgccctctgcaattttcagccactgattcatctcacatcaacttcctcatggctgcttcaatactgagggcggagtcatttgggattgctatacctgagtgggcaaagaacactagcaagctggccgatgcggtcaataaggttgcagttcctaaatttgagccaaagaaaggggtgaatattgtgacagatgagaaggctactaacctttctagcgcctcagttgatgatgttgctgttattaatgatcttttggcgaaactggaagaatatgccaagggcctgccaccagggttccaaatgaaacctatccaatttgagaaggatgatgatactaattttcacatggatttaatagctgggcttgcaaacatgcgcgcaaggaattacagcattcctgaggttgacaagttgaaggctaagttcatcgccggaaggatcatcccggccatcgcaacttcaacagccatggccacaggtctagtgtgcctggagctgtacaaggtcattgctggggagcaccccatggaggactaccgcaacacattcgccaacctagctatacctctgctgtctatggcggagccggttggggccaagctgatgaagcatcaagatatgaggtggaccgtatgggaccggtggactatcaggggcaacctgactgtggcggaactgctgcagtggttcagtgacaagggcctcagcgcctacagcatgtcctgcggcacctgtctgctgtacaacagcatgttcgcgaggcacaaggagaggctgcagaggaaggtggttgatgtcgccagggaggtggccaaggtggaggttcctgaataccggaggcacatagatgtggtggtagcatgcgaggatgacgatgggaatgacattgacattcctctagtctcggtgtacttccgatagtctccctctatctgcacatacaaagtcaagtctattatgtcgtccaagagaacacattcggtcatctggaacgataaacagacgatggactgcattcaatcaaattcccatgccaagggctaatttgggaacctattttttaaggcatttc

SEQ ID NO: 67612 - DNA, 3395 bp, Zea Mays
ctgtcctagtgtactcttgccttgacacgaatactcagagagctcactctctccagcccatcccaaacctagccgccacgccaagcaccttccctcgcctccgatcctttcctttcccccaccggcgaggtcgccgcccgcccgccgcccaggggtttcctcgccatgcttccgtccaagaggtctgcaagcgccgacggcggcgagcccaagcgggctaagctgggggaatcgccatccgccgcccgcgtgggtaccagcaacggcacccggaatggggcggcgccggagattgacgaggacctgcacagcaggcagctcgccgtgtacggcagggagacaatgcgccgcctctttgccgccgatgttctcgtctctggcctcgatggcctcggtgctgagattgcaaagaatcttgctcttgctggagtcaaatctgtcaccatacatgatgtcaaaatggtggaaatgtgggacttgtctggcaatttcttcttgtcagagcaagacatcggaaagaacagggctctagcttgtgtctctaagctgcaagagctgaataacgctgttctggtctctgctctgacagaggaattgacgatagagcacctgtctaagttccaggctgttgttttcactgatataagtttggagaaggcttatgaatttgacgactattgtcacagccaccagcctccaatctcttttatcaaagctcaagtctgtggccttttcggtagtgtcttctgtgattttggacctgagtttactgtccttgacgttgatggtgaagatccacatactggtataattgcatccatcagcaacgacactcctgcaattgtatcctgtgttgatgatgagaggcttgagtttcaggacggtgatcttgttgttttctctgaggtccaaggcatgacagaactgaatgatggaaaaccaaggaaggtaaaaaatgctaggccgttttcatttagcgtcgaggaggacacaagtagctatggtgtttacacaaaaggtggtatcgttacacaagtcaaagaaccgaaggttctacgtttcaaggcactaagagatgcaatgagagatcctggtgatttccttctgagcgacttttcgaagtttgaacattcacctgtgcttcatctagcctttgaagctctggataagtttaagaaggagcatgtgcgctatcctaccgccggctgtgagcaggatgctcaaagtttcctgaagtttgctgctgatattaatgaagcatctgttggttctaagctggaaaacattgatgaaaagttgctccgtcatttcgcaagtggttctcgagctgttttgaacccaatggccgcaatgtttggtggtattgttggccaggaagttgtgaaggcatgttcagggaaattccatccgctttaccagttcttctacttcgattcagttgaatctcttcctacatatcagttggatccccaggacttgaagccttcaaatagccgctatgatgcccagatctctgtatttggttccaagcttcagaaaaaactgctagatgcaaatgttttcattgtgggttctggcgctcttggatgcgagttcttgaagaatcttgccttaatgggtgtctcctgcagctccaagggaaaggtaactataacagatgacgatgtcatcgagaaaagcaatctgagccgccaatttctattccgtgactggaacattgggcaagcaaagtctactgtagctgcagccgctgccattgctatcaatcccagcttacaaattgacgctcttcaaaaccgtgcttctccagataccgaaaatgtgttccatgacacattctgggatggtttggatgttgtcatcaatgcccttgataatgtgaatgctaggatgtatatggacatgaggtgcctgtacttccagaagccactactggagtcagggacattgggcgcaaagtgcaatacacaaatggtcattcctcaccttactgaaaattatggagcttcaagagacccacctgagaagcaggcacccatgtgcacagtccattcttttccacacaacattgaccattgcttgacatgggcccgttcagagtttgagggtttgctagagaaaacaccaaatgaagtaaactcttttctgtctaatcctgctcaatatgctgctgtcatgaggaaggcaggtgatgcccaagcaagggaattacttgaacgcgtctccgaatgtcttgacaaggagcgatgcaatacatttgaggactgtataacttgggctcgattgaggcactcctttctggtcggccccaaagcgctttccccgccctctgcaattttcagccactgattcatctcacatcaacttcctcatggctgcttcaatactgagggcggagtcatttgggattgctatacctgagtgggcaaagaacactagcaagctggccgatgcggtcaataaggttgcagttcctaaatttgagccaaagaaaggggtgaatattgtgacagatgagaaggctactaacctttctagcgcctcagttgatgatgttgctgttattaatgatcttttggcgaaactggaagaatatgccaagggcctgccaccagggttccaaatgaaacctatccaatttgagaaggatgatgatactaattttcacatggatttaatagctgggcttgcaaacatgcgcgcaaggaattacagcattcctgaggttgacaagttgaaggctaagttcatcgccggaaggatcatcccggccatcgcaacttcaacagccatggccacaggtctagtgtgcctggagctgtacaaggtcattgctggggagcaccccatggaggactaccgcaacacattcgccaacctagctatacctctgctgtctatggcggagccggttggggccaagctgatgaagcatcaagatatgaggtggaccgtatgggaccggtggactatcaggggcaacctgactgtggcggaactgctgcagtggttcagtgacaagggcctcagcgcctacagcatgtcctgcggcacctgtctgctgtacaacagcatgttcgcgaggcacaaggagaggctgcagaggaaggtggttgatgtcgccagggaggtggccaaggtggaggttcctgaataccggaggcacatagatgtggtggtagcatgcgaggatgacgatgggaatgacattgacattcctctagtctcggtgtacttccgatagtctccctctatctgcacatacaaagtcaagtctattatgtcgtccaagagaacacattcggtcatctggaacgataaacagacgatggactgcattcaatcaaattcccatgccaagggctaatttgggaacctattttttaaggcatttc

SEQ ID NO: 67613 - DNA, 3464 bp, Zea Mays
ctgtcctagtgtactcttgccttgacacgaatactcagagagctcactctctccagcccatcccaaacctagccgccacgccaagcaccttccctcgcctccgatcctttcctttcccccaccggcgaggtcgccgcccgcccgccgcccaggggtttcctcgccatgcttccgtccaagaggtctgcaagcgccgacggcggcgagcccaagcgggctaagctgggggaatcgccatccgccgcccgcgtgggtaccagcaacggcacccggaatggggcggcgccggagattgacgaggacctgcacagcaggcagctcgccgtgtacggcagggagacaatgcgccgcctctttgccgccgatgttctcgtctctggcctcgatggcctcggtgctgagattgaatcttgctcttgctggagtcaaatctgtcaccatacatgatgtcaaaatggtggaaatgtgggacttgtctggcaatttcttcttgtcagagcaagacatcggaaagaacagggctctagcttgtgtctctaagctgcaagagctgaataacgctgttctggtctctgctctgacagaggaattgacgatagagcacctgtctaagttccaggctgttgttttcactgatataagtttggagaaggcttatgaatttgacgactattgtcacagccaccagcctccaatctcttttatcaaagctcaagtctgtggccttttcggtagtgtcttctgtgattttggacctgagtttactgtccttgacgttgatggtgaagatccacatactggtataattgcatccatcagcaacgacactcctgcaattgtatcctgtgttgatgatgagaggcttgagtttcaggacggtgatcttgttgttttctctgaggtccaaggcatgacagaactgaatgatggaaaaccaaggaaggtaaaaaatgctaggccgttttcatttagcgtcgaggaggacacaagtagctatggtgtttacacaaaaggtggtatcgttacacaagtcaaagaaccgaaggttctacgtttcaaggcactaagagatgcaatgagagatcctggtgatttccttctgagcgacttttcgaagtttgaacattcacctgtgcttcatctagcctttgaagctctggataagtttaagaaggagcatgtgcgctatcctaccgccggctgtgagcaggatgctcaaagtttcctgaagtttgctgctgatattaatgaagcatctgttggttctaagctggaaaacattgatgaaaagttgctccgtcatttcgcaagtggttctcgagctgttttgaacccaatggccgcaatgtttggtggtattgttggccaggaagttgtgaaggcatgttcagggaaattccatccgctttaccagttcttctacttcgattcagttgaatctcttcctacatatcagttggatccccaggacttgaagccttcaaatagccgctatgatgcccagatctctgtatttggttccaagcttcagaaaaaactgctagatgcaaatgttttcattgtgggttctggcgctcttggatgcgagttcttgaagaatcttgccttaatgggtgtctcctgcagctccaagggaaaggtaactataacagatgacgatgtcatcgagaaaagcaatctgagccgccaatttctattccgtgactggaacattgggcaagcaaagtctactgtagctgcagccgctgccattgctatcaatcccagcttacaaattgacgctcttcaaaaccgtgcttctccagataccgaaaatgtgttccatgacacattctgggatggtttggatgttgtcatcaatgcccttgataatgtgaatgctaggatgtatatggacatgaggtgcctgtacttccagaagccactactggagtcagggacattgggcgcaaagtgcaatacacaaatggtcattcctcaccttactgaaaattatggagcttcaagagacccacctgagaagcaggcacccatgtgcacagtccattcttttccacacaacattgaccattgcttgacatgggcccgttcagagtttgagggtttgctagagaaaacaccaaatgaagtaaactcttttctgtctaatcctgctcaatatgctgctgtcatgaggaaggcaggtgatgcccaagcaagggaattacttgaacgcgtctccgaatgtcttgacaaggagcgatgcaatacatttgaggactgtataacttgggctcgattgagatttgaggattatttctcaaaccgcgtgaagcagcttacattcacttttcctgaagatgctgctactagcacaggcactcctttctggtcggccccaaagcgctttccccgccctctgcaattttcagccactgattcatctcacatcaacttcctcatggctgcttcaatactgagggcggagtcatttgggattgctatacctgagtgggcaaagaacactagcaagctggccgatgcggtcaataaggttgcagttcctaaatttgagccaaagaaaggggtgaatattgtgacagatgagaaggctactaacctttctagcgcctcagttgatgatgttgctgttattaatgatcttttggcgaaactggaagaatatgccaagggcctgccaccagggttccaaatgaaacctatccaatttgagaaggatgatgatactaattttcacatggatttaatagctgggcttgcaaacatgcgcgcaaggaattacagcattcctgaggttgacaagttgaaggctaagttcatcgccggaaggatcatcccggccatcgcaacttcaacagccatggccacaggtctagtgtgcctggagctgtacaaggtcattgctggggagcaccccatggaggactaccgcaacacattcgccaacctagctatacctctgctgtctatggcggagccggttggggccaagctgatgaagcatcaagatatgaggtggaccgtatgggaccggtggactatcaggggcaacctgactgtggcggaactgctgcagtggttcagtgacaagggcctcagcgcctacagcatgtcctgcggcacctgtctgctgtacaacagcatgttcgcgaggcacaaggagaggctgcagaggaaggtggttgatgtcgccagggaggtggccaaggtggaggttcctgaataccggaggcacatagatgtggtggtagcatgcgaggatgacgatgggaatgacattgacattcctctagtctcggtgtacttccgatagtctccctctatctgcacatacaaagtcaagtctattatgtcgtccaagagaacacattcggtcatctggaacgataaacagacgatggactgcattcaatcaaattcccatgccaagggctaatttgggaacctattttttaaggcatttc

SEQ ID NO: 67614 - DNA, 3303 bp, Zea Mays
ctgtcctagtgtactcttgccttgacacgaatactcagagagctcactctctccagcccatcccaaacctagccgccacgccaagcaccttccctcgcctccgatcctttcctttcccccaccggcgaggtcgccgcccgcccgccgcccaggggtttcctcgccatgcttccgtccaagaggtctgcaagcgccgacggcggcgagcccaagcgggctaagctgggggaatcgccatccgccgcccgcgtgggtaccagcaacggcacccggaatggggcggcgccggagattgacgaggacctgcacagcaggcagctcgccgtgtacggcagggagacaatgcgccgcctctttgccgccgatgttctcgtctctggcctcgatggcctcggtgctgagattgcaaagaatcttgctcttgctggagtcaaatctgtcaccatacatgatgtcaaaatggtggaaatgtgggacttgtctggcaatttcttcttgtcagagcaagacatcggaaagaacagggctctagcttgtgtctctaagctgcaagagctgaataacgctgttctggtctctgctctgacagaggaattgacgatagagcacctgtctaagttccaggctgttgttttcactgatataagtttggagaaggcttatgaatttgacgactattgtcacagccaccagcctccaatctcttttatcaaagctcaagtctgtggccttttcggtagtgtcttctgtgattttggacctgagtttactgtccttgacgttgatggtgaagatccacatactggtataattgcatccatcagcaacgacactcctgcaattgtatcctgtgttgatgatgagaggcttgagtttcaggacggtgatcttgttgttttctctgaggtccaaggcatgacagaactgaatgatggaaaaccaaggaaggtaaaaaatgctaggccgttttcatttagcgtcgaggaggacacaagtagctatggtgtttacacaaaaggtggtatcgttacacaagtcaaagaaccgaaggttctacgtttcaaggcactaagagatgcaatgagagatcctggtgatttccttctgagcgacttttcgaagtttgaacattcacctgtgcttcatctagcctttgaagctctggataagtttaagaaggagcatgtgcgctatcctaccgccggctgtgagcaggatgctcaaagtttcctgaagtttgctgctgatattaatgaagcatctgttggttctaagctggaaaacattgatgaaaagttgctccgtcatttcgcaagtggttctcgagctgttttgaacccaatggccgcaatgtttggtggtattgttggccaggaagttgtgaaggcatgttcagggaaattccatccgctttaccagttcttctacttcgattcagttgaatctcttcctacatatcagttggatccccaggacttgaagccttcaaatagccgctatgatgcccagatctctgtatttggttccaagcttcagaaaaaactgctagatgcaaatgttttcattgtgggttctggcgctcttggatgcgagttcttgaagaatcttgccttaatgggtgtctcctgcagctccaagggaaagataccgaaaatgtgttccatgacacattctgggatggtttggatgttgtcatcaatgcccttgataatgtgaatgctaggatgtatatggacatgaggtgcctgtacttccagaagccactactggagtcagggacattgggcgcaaagtgcaatacacaaatggtcattcctcaccttactgaaaattatggagcttcaagagacccacctgagaagcaggcacccatgtgcacagtccattcttttccacacaacattgaccattgcttgacatgggcccgttcagagtttgagggtttgctagagaaaacaccaaatgaagtaaactcttttctgtctaatcctgctcaatatgctgctgtcatgaggaaggcaggtgatgcccaagcaagggaattacttgaacgcgtctccgaatgtcttgacaaggagcgatgcaatacatttgaggactgtataacttgggctcgattgagatttgaggattatttctcaaaccgcgtgaagcagcttacattcacttttcctgaagatgctgctactagcacaggcactcctttctggtcggccccaaagcgctttccccgccctctgcaattttcagccactgattcatctcacatcaacttcctcatggctgcttcaatactgagggcggagtcatttgggattgctatacctgagtgggcaaagaacactagcaagctggccgatgcggtcaataaggttgcagttcctaaatttgagccaaagaaaggggtgaatattgtgacagatgagaaggctactaacctttctagcgcctcagttgatgatgttgctgttattaatgatcttttggcgaaactggaagaatatgccaagggcctgccaccagggttccaaatgaaacctatccaatttgagaaggatgatgatactaattttcacatggatttaatagctgggcttgcaaacatgcgcgcaaggaattacagcattcctgaggttgacaagttgaaggctaagttcatcgccggaaggatcatcccggccatcgcaacttcaacagccatggccacaggtctagtgtgcctggagctgtacaaggtcattgctggggagcaccccatggaggactaccgcaacacattcgccaacctagctatacctctgctgtctatggcggagccggttggggccaagctgatgaagcatcaagatatgaggtggaccgtatgggaccggtggactatcaggggcaacctgactgtggcggaactgctgcagtggttcagtgacaagggcctcagcgcctacagcatgtcctgcggcacctgtctgctgtacaacagcatgttcgcgaggcacaaggagaggctgcagaggaaggtggttgatgtcgccagggaggtggccaaggtggaggttcctgaataccggaggcacatagatgtggtggtagcatgcgaggatgacgatgggaatgacattgacattcctctagtctcggtgtacttccgatagtctccctctatctgcacatacaaagtcaagtctattatgtcgtccaagagaacacattcggtcatctggaacgataaacagacgatggactgcattcaatcaaattcccatgccaagggctaatttgggaacctattttttaaggcatttc

SEQ ID NO: 67615 - DNA, 3435 bp, Zea Mays
ctgtcctagtgtactcttgccttgacacgaatactcagagagctcactctctccagcccatcccaaacctagccgccacgccaagcaccttccctcgcctccgatcctttcctttcccccaccggcgaggtcgccgcccgcccgccgcccaggggtttcctcgccatgcttccgtccaagaggtctgcaagcgccgacggcggcgagcccaagcgggctaagctgggggaatcgccatccgccgcccgcgtgggtaccagcaacggcacccggaatggggcggcgccggagattgacgaggacctgcacagcaggcagctcgccgtgtacggcagggagacaatgcgccgcctctttgccgccgatgttctcgtctctggcctcgatggcctcggtgctgagattgcaaagaatcttgctcttgctggagtcaaatctgtcaccatacatgatgtcaaaatggtggaaatgtgggacttgtctggcaatttcttcttgtcagagcaagacatcggaaagaacagggctctagcttgtgtctctaagctgcaagagctgaataacgctgttctggtctctgctctgacagaggaattgacgatagagcacctgtctaagttccaggctgttgttttcactgatataagtttggagaaggcttatgaatttgacgactattgtcacagccaccagcctccaatctcttttatcaaagctcaagtctgtggccttttcggtagtgtcttctgtgattttggacctgagtttactgtccttgacgttgatggtgaagatccacatactggtataattgcatccatcagcaacgacactcctgcaattgtatcctgtgttgatgatgagaggcttgagtttcaggacggtgatcttgttgttttctctgaggtccaaggcatgacagaactgaatgatggaaaaccaaggaaggtaaaaaatgctaggccgttttcatttagcgtcgaggaggacacaagtagctatggtgtttacacaaaaggtggtatcgttacacaagtcaaagaaccgaaggttctacgtttcaaggcactaagagatgcaatgagagatcctggtgatttccttctgagcgacttttcgaagtttgaacattcacctgtgcttcatctagcctttgaagctctggataagtttaagaaggagcatgtgcgctatcctaccgccggctgtgagcaggatgctcaaagtttcctgaagtttgctgctgatattaatgaagcatctgttggttctaagctggaaaacattgatgaaaagttgctccgtcatttcgcaagtggttctcgagctgttttgaacccaatggccgcaatgtttggtggtattgttggccaggaagttgtgaaggcatgttcagggaaattccatccgctttaccagttcttctacttcgattcagttgaatctcttcctacatatcagttggatccccaggacttgaagccttcaaatagccgctatgatgcccagatctctgtatttggttccaagcttcagaaaaaactgctagatgcaaatgttttcattgtgggttctggcgctcttggatgcgagttcttgaagaatcttgccttaatgggtgtctcctgcagctccaagggaaaggtaactataacagatgacgatgtcatcgagaaaagcaatctgagccgccaatttctattccgtgactggaacattgggcaagcaaagtctactgtagctgcagccgctgccattgctatcaatcccagcttacaaattgacgctcttcaaaaccgtgcttctccagataccgaaaatgtgttccatgacacattctgggatggtttggatgttgtcatcaatgcccttgataatgtgaatgctaggatgtatatggacatgaggtgcctgtacttccagaagccactactggagtcagggacattgggcgcaaagtgcaatacacaaatggtcattcctcaccttactgaaaattatggagcttcaagagacccacctgagaagcaggcacccatgtgcacagtccattcttttccacacaacattgaccattgcttgacatgggcccgttcagagtttgagggtttgctagagaaaacaccaaatgaagtaaactcttttctgtctaatcctgctcaatatgctgctgtcatgaggaaggcaggtgatgcccaagcaagggaattacttgaacgcgtctccgaatgtcttgacaaggagcgatgcaatacatttgaggactgtataacttgggctcgattgagatttgaggattatttctcaaaccgcgtgaagcagcttacattcacttttcctgaagatgctgctactagcacaggcactcctttctggtcggccccaaagcgctttccccgccctctgcaattttcagccactgattcatctcacatcaacttcctcatggctgcttcaatactgagggcggagtcatttgggattgctatacctgagtgggcaaagaacactagcaagctggccgatgcggtcaataaggttgcagttcctaaatttgagccaaagaaaggggtgaatattgtgacagatgagaaggctactaacctttctagcgcctcagttgatgatgttgctgttattaatgatcttttggcgaaactggaagaatatgccaagggcctgccaccagggttccaaatgaaacctatccaatttgagaagctgggcttgcaaacatgcgcgcaaggaattacagcattcctgaggttgacaagttgaaggctaagttcatcgccggaaggatcatcccggccatcgcaacttcaacagccatggccacaggtctagtgtgcctggagctgtacaaggtcattgctggggagcaccccatggaggactaccgcaacacattcgccaacctagctatacctctgctgtctatggcggagccggttggggccaagctgatgaagcatcaagatatgaggtggaccgtatgggaccggtggactatcaggggcaacctgactgtggcggaactgctgcagtggttcagtgacaagggcctcagcgcctacagcatgtcctgcggcacctgtctgctgtacaacagcatgttcgcgaggcacaaggagaggctgcagaggaaggtggttgatgtcgccagggaggtggccaaggtggaggttcctgaataccggaggcacatagatgtggtggtagcatgcgaggatgacgatgggaatgacattgacattcctctagtctcggtgtacttccgatagtctccctctatctgcacatacaaagtcaagtctattatgtcgtccaagagaacacattcggtcatctggaacgataaacagacgatggactgcattcaatcaaattcccatgccaagggctaatttgggaacctattttttaaggcatttc

SEQ ID NO: 67616 - DNA, 1982 bp, Zea Mays
ccccggctgccttttctgcattcgacgccgccgcaggcccgcagccagctcgagcccaaaggagagaacccaggttggcggcggcgctccggcggcgatggactccccctacgctctccacctcgccatcgccgcgctcgtcggcgcctccttcgccgccgcctccgcctactacatgcaccgcaagaccctcgaccagcttctccgtttcgcccgcgaccagcagcgccgccgcaaccgcctcctccccgaaggcgacgaactggaggacggcgaagaggaccctccgccgcactgggatcatgatcgccgcaccctgcccatcccgccgggcctcccgccgctccacaccggccgagagggtaggccagttgtttctccaggttcgactaaaagagttggacctattgttagaccgactacacccaaatcctctgtccccactatcagtgcatttgatagaattgaagattcagatgacgaggaggatcttgtcccagatgccaagaatgatactgcttacttgaccccaaatggtgctattggatcagatctcacagataaagcgagccagaatggggaattaacatcagcaccatcaacgcagatgattagatcccatagtgcaactggcagcctgcatgtaccccagcttaacccaatagcagctgatatacttcgaaaggagcctgaacatgaaaccttcagtaaaatcaatatcacagctgttgagactccttctcctgatgaaattgaggcatacaaagttcttcagaaatgccttgagctgcgtcagaggtacatattcagagaagaagttgctccttgggaaaaagagatcataactgatcctagtactccaaagcctaatccaaatccgttcagttatgaacatcaggctaaaaccgatcaccatttcgaaatggttgatggcgtcattcatgtgtaccccaataaagattctaaagaaagactctatccagttgccgatgcaactaccttctttactgatatgcactacgtccttcgtgtgttggctgctggggatatccgaaccgtgtgtcatcaccgtttaaatcttctagagcaaaaatttaatcttcacttgatggtcaatacggatagagaactgcttgctcagaaagctgcacctcaccgggacttctacaatgttaggaaggttgatactcatgttcatcactcagcatgcatgaaccagaagcacctgttgagatttatcaagtctaagttgaggaaggaacctgatgaggttgtaatctttagagatgggacctatttgactcttaaggaggtttttgagagtttggatttgacagggtatgacctcaatgttgatctcttagatgttcatgctgataagagtacatttcatcgttttgacaagttcaatctgaaatataatccatgtggtcaatctcgcctgagggagatatttttaaagcaggataatcttattcaaggtcgcttccttgctgagctgacaaaagaagtattttctgaccttgaagcaagtaaatatcagatggctgagtatcggatatctatttatgggaggaagaaaagcgaatgggaccaaatggcaagttggatagtgaacaatgaattatatagcgagaatgttgtttggttaattcagattcctcggatatacaatgtatacagggagatgggcacaatcaattctttccaaaacctccttgacaatatttttctccctctttatgaagtaactgttgacccagcttcacatcctcagctccatgttttcttaaaacaggttgttgggttggatttggtggatgatgaaagcaaacctgaaagacgcccaacaaaacacatgccaacacctgagcaatggactaatattttcaatccagcctatgcgtattatgtgtactattgctatgccaatctgtatacactgaacaaggtcgaacttgaacttggtgaacttattgttg

SEQ ID NO: 67617 - DNA, 2968 bp, Zea Mays
ttttctgcattcgacgccgccgcaggcccgcagccagctcgagcccaaaggagagaacccaggttggcggcggcgctccggcggcgatggactccccctacgctctccacctcgccatcgccgcgctcgtcggcgcctccttcgccgccgcctccgcctactacatgcaccgcaagaccctcgaccagcttctccgtttcgcccgcgaccagcagcgccgccgcaaccgcctcctccccgaaggcgacgaactggaggacggcgaagaggaccctccgccgcactgggatcatgatcgccgcaccctgcccatcccgccgggcctcccgccgctccacaccggccgagagggtaggccagttgtttctccaggttcgactaaaagagttggacctattgttagaccgactacacccaaatcctctgtccccactatcagtgcatttgatagaattgaagattcagatgacgaggaggatcttgtcccagatgccaagaatgatactgcttacttgaccccaaatggtgctattggatcagatctcacagataaagcgagccagaatggggaattaacatcagcaccatcaacgcagatgattagatcccatagtgcaactggcagcctgcatgtaccccagcttaacccaatagcagctgatatacttcgaaaggagcctgaacatgaaaccttcagtaaaatcaatatcacagctgttgagactccttctcctgatgaaattgaggcatacaaagttcttcagaaatgccttgagctgcgtcagaggtacatattcagagaagaagttgctccttgggaaaaagagatcataactgatcctagtactccaaagcctaatccaaatccgttcagttatgaacatcaggctaaaaccgatcaccatttcgaaatggttgatggcgtcattcatgtgtaccccaataaagattctaaagaaagactctatccagttgccgatgcaactaccttctttactgatatgcactacgtccttcgtgtgttggctgctggggatatccgaaccgtgtgtcatcaccgtttaaatcttctagagcaaaaatttaatcttcacttgatggtcaatacggatagagaactgcttgctcagaaagctgcacctcaccgggacttctacaatgttaggaaggttgatactcatgttcatcactcagcatgcatgaaccagaagcacctgttgagatttatcaagtctaagttgaggaaggaacctgatgaggttgtaatctttagagatgggacctatttgactcttaaggaggtttttgagagtttggatttgacagggtatgacctcaatgttgatctcttagatgttcatgctgataagagtacatttcatcgttttgacaagttcaatctgaaatataatccatgtggtcaatctcgcctgagggagatatttttaaagcaggataatcttattcaaggtcgcttccttgctgagctgacaaaagaagtattttctgaccttgaagcaagtaaatatcagatggctgagtatcggatatctatttatgggaggaagaaaagcgaatgggaccaaatggcaagttggatagtgaacaatgaattatatagcgagaatgttgtttggttaattcagattcctcggatatacaatgtatacagggagatgggcacaatcaattctttccaaaacctccttgacaatatttttctccctctttatgaagtaactgttgacccagcttcacatcctcagctccatgttttcttaaaacaggttgttgggttggatttggtggatgatgaaagcaaacctgaaagacgcccaacaaaacacatgccaacacctgagcaatggactaatattttcaatccagcctatgcgtattatgtgtactattgctatgccaatctgtatacactgaacaagcttcgtgagtccaagggcatgacaacaatcaaacttcgtccacactgtggggagcatttcttacttcacataacattgctcatggggtgaacctaaagaaatcccctgtacttcagtacctgtattatcttgctcagattggtctagcaatgtctcccttaagtaacaactcactgtttatcgactatcatcggaaccctttcccaacatttttcttaaggggtcttaacgtgtctctttcgactgacgaccctctacaaattcacctgacgaaggaacctttggttgaagaatacagtgttgctgcttcactttggaagctgagctcatgtgacttgtgtgaaatcgctagaaattctgtctaccagtccggattctctcacaggctcaagtctcactggatcgggagaaactactacagaaggggtccggagggcaatgacatccaccagacaaatgttcctcacatcagggttgaatttcgacacactatctggaaagaagaaatggagctgatacattttggaaatgttaacctacccgaagaagttgacaggtgaagagcaggggaattgcagtgaagtctggcggtggcggcaaggggacgagagaatgtgtcaacacgagagactcgtttgcttgcagaggaggtatcatgacaatggatgtcgccaagtcctccgtgtcgaccatatatatatgaagaataataagaaaacacaaatacccaagtatttagaagcgttgaatccagatgtggcatgaggtcggagccaacgtgtacttgcatacgttacgtttatatacatgtactgctctgctgtaatggtgtttcgacgaatgtgtcttgtcattaatgttttgttaggctcgttccaggcttctgctgatatatacgttacgttcaggcccgaactaggtttgggttttcgctttcgctactcgtaggaaatgtttaagtaccggacttcatgctatagggatactagctcagatggctcagattttatgtccagccctattattta

SEQ ID NO: 67618 - DNA, 2306 bp, Zea Mays
cggagcacttccaacgcatagccacttaagagactccttctcctgatgaaattgaggcatacaaagttcttcagaaatgccttgagctgcgtcagaggtacatattcagagaagaagttgctccttgggaaaaagagatcataactgatcctagtactccaaagcctaatccaaatccgttcagttatgaacatcaggctaaaaccgatcaccatttcgaaatggttgatggcgtcattcatgtgtaccccaataaagattctaaagaaagactctatccagttgccgatgcaactaccttctttactgatatgcactacgtccttcgtgtgttggctgctggggatatccgaaccgtgtgtcatcaccgtttaaatcttctagagcaaaaatttaatcttcacttgatggtcaatacggatagagaactgcttgctcagaaagctgcacctcaccgggacttctacaatgttaggaaggttgatactcatgttcatcactcagcatgcatgaaccagaagcacctgttgagatttatcaagtctaagttgaggaaggaacctgatgaggttgtaatctttagagatgggacctatttgactcttaaggaggtttttgagagtttggatttgacagggtatgacctcaatgttgatctcttagatgttcatgctgataagagtacatttcatcgttttgacaagttcaatctgaaatataatccatgtggtcaatctcgcctgagggagatatttttaaagcaggataatcttattcaaggtcgcttccttgctgagctgacaaaagaagtattttctgaccttgaagcaagtaaatatcagatggctgagtatcggatatctatttatgggaggaagaaaagcgaatgggaccaaatggcaagttggatagtgaacaatgaattatatagcgagaatgttgtttggttaattcagattcctcggatatacaatgtatacagggagatgggcacaatcaattctttccaaaacctccttgacaatatttttctccctctttatgaagtaactgttgacccagcttcacatcctcagctccatgttttcttaaaacaggttgttgggttggatttggtggatgatgaaagcaaacctgaaagacgcccaacaaaacacatgccaacacctgagcaatggactaatattttcaatccagcctatgcgtattatgtgtactattgctatgccaatctgtatacactgaacaagcttcgtgagtccaagggcatgacaacaatcaaacttcgtccacactgtggggaggctggtgatatcgatcaccttgctgcagcatttcttacttcacataacattgctcatggggtgaacctaaagaaatcccctgtacttcagtacctgtattatcttgctcagattggtctagcaatgtctcccttaagtaacaactcactgtttatcgactatcatcggaaccctttcccaacatttttcttaaggggtcttaacgtgtctctttcgactgacgaccctctacaaattcacctgacgaaggaacctttggttgaagaatacagtgttgctgcttcactttggaagctgagctcatgtgacttgtgtgaaatcgctagaaattctgtctaccagtccggattctctcacaggctcaagtctcactggatcgggagaaactactacagaaggggtccggagggcaatgacatccaccagacaaatgttcctcacatcagggttgaatttcgacacactatctggaaagaagaaatggagctgatacattttggaaatgttaacctacccgaagaagttgacaggtgaagagcaggggaattgcagtgaagtctggcggtggcggcaaggggacgagagaatgtgtcaacacgagagactcgtttgcttgcagaggaggtatcatgacaatggatgtcgccaagtcctccgtgtcgaccatatatatatgaagaataataagaaaacacaaatacccaagtatttagaagcgttgaatccagatgtggcatgaggtcggagccaacgtgtacttgcatacgttacgtttatatacatgtactgctctgctgtaatggtgtttcgacgaatgtgtcttgtcattaatgttttgttaggctcgttccaggcttctgctgatatatacgttacgttcaggcccgaactaggtttgggttttcgctttcgctactcgtaggaaatgtttaagtaccggacttcatgctatagggatactagctcagatggctcagattttatgtccagccctattattta

SEQ ID NO: 67619 - DNA, 2277 bp, Zea Mays
ggagcacttccaacgcatagccacttaagagactccttctcctgatgaaattgaggcatacaaagttcttcagaaatgccttgagctgcgtcagaggtacatattcagagaagaagttgctccttgggaaaaagagatcataactgatcctagtactccaaagcctaatccaaatccgttcagttatgaacatcaggctaaaaccgatcaccatttcgaaatggttgatggcgtcattcatgtgtaccccaataaagattctaaagaaagactctatccagttgccgatgcaactaccttctttactgatatgcactacgtccttcgtgtgttggctgctggggatatccgaaccgtgtgtcatcaccgtttaaatcttctagagcaaaaatttaatcttcacttgatggtcaatacggatagagaactgcttgctcagaaagctgcacctcaccgggacttctacaatgttaggaaggttgatactcatgttcatcactcagcatgcatgaaccagaagcacctgttgagatttatcaagtctaagttgaggaaggaacctgatgaggttgtaatctttagagatgggacctatttgactcttaaggaggtttttgagagtttggatttgacagggtatgacctcaatgttgatctcttagatgttcatgctgataagagtacatttcatcgttttgacaagttcaatctgaaatataatccatgtggtcaatctcgcctgagggagatatttttaaagcaggataatcttattcaaggtcgcttccttgctgagctgacaaaagaagtattttctgaccttgaagcaagtaaatatcagatggctgagtatcggatatctatttatgggaggaagaaaagcgaatgggaccaaatggcaagttggatagtgaacaatgaattatatagcgagaatgttgtttggttaattcagattcctcggatatacaatgtatacagggagatgggcacaatcaattctttccaaaacctccttgacaatatttttctccctctttatgaagtaactgttgacccagcttcacatcctcagctccatgttttcttaaaacaggttgttgggttggatttggtggatgatgaaagcaaacctgaaagacgcccaacaaaacacatgccaacacctgagcaatggactaatattttcaatccagcctatgcgtattatgtgtactattgctatgccaatctgtatacactgaacaagcttcgtgagtccaagggcatgacaacaatcaaacttcgtccacactgtggggagcatttcttacttcacataacattgctcatggggtgaacctaaagaaatcccctgtacttcagtacctgtattatcttgctcagattggtctagcaatgtctcccttaagtaacaactcactgtttatcgactatcatcggaaccctttcccaacatttttcttaaggggtcttaacgtgtctctttcgactgacgaccctctacaaattcacctgacgaaggaacctttggttgaagaatacagtgttgctgcttcactttggaagctgagctcatgtgacttgtgtgaaatcgctagaaattctgtctaccagtccggattctctcacaggctcaagtctcactggatcgggagaaactactacagaaggggtccggagggcaatgacatccaccagacaaatgttcctcacatcagggttgaatttcgacacactatctggaaagaagaaatggagctgatacattttggaaatgttaacctacccgaagaagttgacaggtgaagagcaggggaattgcagtgaagtctggcggtggcggcaaggggacgagagaatgtgtcaacacgagagactcgtttgcttgcagaggaggtatcatgacaatggatgtcgccaagtcctccgtgtcgaccatatatatatgaagaataataagaaaacacaaatacccaagtatttagaagcgttgaatccagatgtggcatgaggtcggagccaacgtgtacttgcatacgttacgtttatatacatgtactgctctgctgtaatggtgtttcgacgaatgtgtcttgtcattaatgttttgttaggctcgttccaggcttctgctgatatatacgttacgttcaggcccgaactaggtttgggttttcgctttcgctactcgtaggaaatgtttaagtaccggacttcatgctatagggatactagctcagatggctcagattttatgtccagccctattattta

SEQ ID NO: 67620 - DNA, 3787 bp, Zea Mays
cggaagtccggaagcctgccctaaccttccctgttatatatataaacggattgcgttggatggaatggaactcattttcatttcaggcaatggagtccgtcgaactccatccatcttcatcctctcctgcggttacctcctgcagcaaggaacgaaagcccaatttgcaccaacaacggcccaactcctactctcaggcccggcccactcggttttcttccacgccaatgttcgccaagcggctcttccacagggcactcggagtaggaagaggaggaggaggaggagcctcagcaccagcggcatcaccagcggatgccatccaaatggacgcgcagatctcgactcactgcggggtgccatacacagcttcactactcgccttcgatcccgtccagcgcctcctcgctgtcgcaactctggatggtaggataaaaatatttggcggtgataacattgaaggcctccttatatcaccgaagagtgtgccgtacaagtttttgcagtttattacaaaccagggacttctggttgcaatttccaatgaaaatgaaatccaggtatggaatcttgagttcaggcaactattttattcgtcacagtgggatgtcaacattactgcttttgcagtcatagagaggacctttatgatgtatcttggagatgagaatggccttctttctgtattgaagtatgatgtagatgatgggaagcttcaaataatgccatacaatgttcatatccattctctaatcgaaagatctggtgtttcgttacaggatcctcaacctattgttggaatactgatccagcctgacacttttgggacaaggttgctaattgcatatgagagagggttgttggttctttgggatgtatctgaggaccgtgcagtttctgtcagaggctatggggatttacgcatgaagggtcaaatcaatggtgctcagggggattctggtgaagatcaactaaatactactattgatgacagtgaagaagaaagagaaatttgctctctttgttgggcttcaagagagggctcaactgttgcggtgggctatataacaggtgacatacttctatgggatatgactacaaaatcctccagacaagagaagcaaagtgatgtttcatctaatgttgttaagctacagctggcctcagggagtcgtaggcttcctgttattgtcttgcattggtctgctgggtcagcagtacattctaataaaggagggcatctttttgtttatggcggcgatgatatgggatctgaagaagttctcacggttcttagcctggaatcaactgctggattagaatcagtgagatgcatgtcacgaactgatctcaaacttgatggatcatttgctgatatgattcttattcctgatactggggttcctgataaaagcagaacttctgcactttttattttgacaaatcctggacagctgaatttttatgatggtggctctctattttctgtgcaaaactcaaaagagggaactcctcttcctgaagcacagaaatttccagtcgcaattcctacccttgatcccaacataacggtcactggtctttattcgctaaccgaaagtgaatttccaaatatttcactgaagaaattttgtgctaggaaaaatgctgggcatttcatatcagagaacatgaaatggcctttgactggtggggttccaaatgagatgtcactggacgaagatcatgctgttgaaagaatatacattgcaggctaccaagatggttctgtgagaatatgggatgcaacatttcctgttctaatgccaatgtttgtcttggatggaaatgttgctgatgttaatttggatggagctaatgcttctgtatcatctctagccttttgttcattaagcatgactttggctgttgggacaacaagtggtctggtgcgcatctataaactccgagaacacactgggggttcaagcttccattttgtgagtgaatttaagcaagaagttcatgttgttcatcatgggaaaggatttcattgttatgttgcctttttgtcagcaaattcctcagtgctatctctattatttatggcttcaggtggcctccttgctgcaggctatcagaatggtcaggtggcaatgcttgatccaagtcagttatcaattctattcactgtagatggtgcatcaggaacaaattctcctgttgtttccttgggcatctacagtgttgctgcatctgctgcaaaagcagatcaatcaaagaaagataatcctcaaaatgcaacgttatccagagatgttcttctttccttgacaaaggatgctcgtgttactgtacttgactgtacaacgggtgtgatgataaattcacatatcatacatcagaagcaatcatctgctatttccatgtatgtcatagatgcagagtcagacgagacacaaacccaattatcagaggacaaaattccaagtcaaggtcagacagggaaagatggcaatgatcttgacaaaatacaaacccaaggaattgaaaagcacctgaaaaatgcttcccagctttcgcaaaatggtggttcagattcactccttgtggtgtgctgcgaggatgttttgcttttgttatccctggcgtcattgattcagggaagcagcaagcatctacagaagacgaaacttgcaaaaccttgttgctggtcagcagttttcaaaaacatggatgacaaagtttgtgggctgatattagcttatcagactggcactatagaaatgaggtttgggccagatctggctattgttgctgagacctctttgatgtcattattgcgatggagttacaagacaggcatggaaaaatccacaagctcctcaaatggacaagttactttggtaaatggatctgaatttgcgattatctctcttatggcctcagagaatgacttgaggattccagaatctctgccatgccttcatgacaaagtacttgcagcagctgcggaagcagctatgagtttctcaactgatcagagaagaaagcagaatccagcagcagggattattggtggcttcattaaaggaatgaaaggcaaggctgaagaaaatgcaaaaatgagagaaagtttgacattgcgagctccaagcgaacagttggagtcaattttctcgaaagaaccatttgctgaaccttcaatacccgaccttgatgatccgatggaagaactgtcaatcgatgacatagagattgacgatgaagtagcagtagccctggcacaagcagcatcgtccacatcccaagggaataagagaacagcagtggaggaggagagagcgaagctgtttgaagggtcaaacagtgcggataaaccgagaatgagaacgcagcaggagattctaaccaaatataggtttggcggggacgccgccgccgcagctgctcatgcgaaggataagctgatgcagaggcaggagaaactggagagaattagccaacaaaccgcggagcttcagaatggagcggagaactttgcttccctggcgcaggagctcgcgaaaacaatggagaacaagaagtggtggaagctataaactgggtttgtttgtacgtatgtgtgttgttggatgccacccgtcgttgcgaattgggacacataccagcattaccatttttttgtgtccgtattaatcactttggatattctttttgtgttttggtgatgtacgtgtaaagataaaaaagagagaatgaaaggaaccctcttctcctggctatatgagcgagtctcttattcgtc

SEQ ID NO: 67621 - DNA, 3789 bp, Zea Mays
aacggattgcgttggatggaatggaactcattttcatttcaggcaatggagtccgtcgaactccatccatcttcatcctctcctgcggttacctcctgcagcaaggaacgaaagcccaatttgcaccaacaacggcccaactcctactctcaggcccggcccactcggttttcttccacgccatcagcgactcacctcgtcgtcgcccggtcgccgtgcacgtagatgttcgccaagcggctcttccacagggcactcgtgcatcatcatcagggagtaggaagaggaggaggaggaggagcctcagcaccagcggcatcaccagcggatgccatccaaatggacgcgcagatctcgactcactgcggggtgccatacacagcttcactactcgccttcgatcccgtccagcgcctcctcgctgtcgcaactctggatggtaggataaaaatatttggcggtgataacattgaaggcctccttatatcaccgaagagtgtgccgtacaagtttttgcagtttattacaaaccagggacttctggttgcaatttccaatgaaaatgaaatccaggtatggaatcttgagttcaggcaactattttattcgtcacagtgggatgtcaacattactgcttttgcagtcatagagaggacctttatgatgtatcttggagatgagaatggccttctttctgtattgaagtatgatgtagatgatgggaagcttcaaataatgccatacaatgttcatatccattctctaatcgaaagatctggtgtttcgttacaggatcctcaacctattgttggaatactgatccagcctgacacttttgggacaaggttgctaattgcatatgagagagggttgttggttctttgggatgtatctgaggaccgtgcagtttctgtcagaggctatggggatttacgcatgaagggtcaaatcaatggtgctcagggggattctggtgaagatcaactaaatactactattgatgacagtgaagaagaaagagaaatttgctctctttgttgggcttcaagagagggctcaactgttgcggtgggctatataacaggtgacatacttctatgggatatgactacaaaatcctccagacaagagaagcaaagtgatgtttcatctaatgttgttaagctacagctggcctcagggagtcgtaggcttcctgttattgtcttgcattggtctgctgggtcagcagtacattctaataaaggagggcatctttttgtttatggcggcgatgatatgggatctgaagaagttctcacggttcttagcctggaatcaactgctggattagaatcagtgagatgcatgtcacgaactgatctcaaacttgatggatcatttgctgatatgattcttattcctgatactggggttcctgataaaagcagaacttctgcactttttattttgacaaatcctggacagctgaatttttatgatggtggctctctattttctgtgcaaaactcaaaagagggaactcctcttcctgaagcacagaaatttccagtcgcaattcctacccttgatcccaacataacggtcactggtctttattcgctaaccgaaagtgaatttccaaatatttcactgaagaaattttgtgctaggaaaaatgctgggcatttcatatcagagaacatgaaatggcctttgactggtggggttccaaatgagatgtcactggacgaagatcatgctgttgaaagaatatacattgcaggctaccaagatggttctgtgagaatatgggatgcaacatttcctgttctaatgccaatgtttgtcttggatggaaatgttgctgatgttaatttggatggagctaatgcttctgtatcatctctagccttttgttcattaagcatgactttggctgttgggacaacaagtggtctggtgcgcatctataaactccgagaacacactgggggttcaagcttccattttgtgagtgaatttaagcaagaagttcatgttgttcatcatgggaaaggatttcattgttatgttgcctttttgtcagcaaattcctcagtgctatctctattatttatggcttcaggtggcctccttgctgcaggctatcagaatggtcaggtggcaatgcttgatccaagtcagttatcaattctattcactgtagatggtgcatcaggaacaaattctcctgttgtttccttgggcatctacagtgttgctgcatctgctgcaaaagcagatcaatcaaagaaagataatcctcaaaatgcaacgttatccagagatgttcttctttccttgacaaaggatgctcgtgttactgtacttgactgtacaacgggtgtgatgataaattcacatatcatacatcagaagcaatcatctgctatttccatatgcagagtcagacgagacacaaacccaattatcagaggacaaaattccaagtcaaggtcagacagggaaagatggcaatgatcttgacaaaatacaaacccaaggaattgaaaagcacctgaaaaatgcttcccagctttcgcaaaatggtggttcagattcactccttgtggtgtgctgcgaggatgttttgcttttgttatccctggcgtcattgattcagggaagcagcaagcatctacagaagacgaaacttgcaaaaccttgttgctggtcagcagttttcaaaaacatggatgacaaagtttgtgggctgatattagcttatcagactggcactatagaaatgaggtttgggccagatctggctattgttgctgagacctctttgatgtcattattgcgatggagttacaagacaggcatggaaaaatccacaagctcctcaaatggacaagttactttggtaaatggatctgaatttgcgattatctctcttatggcctcagagaatgacttgaggattccagaatctctgccatgccttcatgacaaagtacttgcagcagctgcggaagcagctatgagtttctcaactgatcagagaagaaagcagaatccagcagcagggattattggtggcttcattaaaggaatgaaaggcaaggctgaagaaaatgcaaaaatgagagaaagtttgacattgcgagctccaagcgaacagttggagtcaattttctcgaaagaaccatttgctgaaccttcaatacccgaccttgatgatccgatggaagaactgtcaatcgatgacatagagattgacgatgaagtagcagtagccctggcacaagcagcatcgtccacatcccaagggaataagagaacagcagtggaggaggagagagcgaagctgtttgaagggtcaaacagtgcggataaaccgagaatgagaacgcagcaggagattctaaccaaatataggtttggcggggacgccgccgccgcagctgctcatgcgaaggataagctgatgcagaggcaggagaaactggagagaattagccaacaaaccgcggagcttcagaatggagcggagaactttgcttccctggcgcaggagctcgcgaaaacaatggagaacaagaagtggtggaagctataaactgggtttgtttgtacgtatgtgtgttgttggatgccacccgtcgttgcgaattgggacacataccagcattaccatttttttgtgtccgtattaatcactttggatattctttttgtgttttggtgatgtacgtgtaaagataaaaaagagagaatgaaaggaaccctcttctcctggctatatgagcgagtctcttattcgtc

SEQ ID NO: 67622 - DNA, 3792 bp, Zea Mays
aatggagtccgtcgaactccatccatcttcatcctctcctgcggttacctcctgcagcaaggaacgaaagcccaatttgcaccaacaacggcccaactcctactctcaggcccggcccactcggttttcttccacgccagtacgccaccgtccccatcagtttcgccgctttcgattccattgcaacttcagcttgaactcggaagcagtcagcgactcacctcgtcgtcgcccggtcgccgtgcacgtagatgttcgccaagcggctcttccacagggcactcggagtaggaagaggaggaggaggaggagcctcagcaccagcggcatcaccagcggatgccatccaaatggacgcgcagatctcgactcactgcggggtgccatacacagcttcactactcgccttcgatcccgtccagcgcctcctcgctgtcgcaactctggatggtaggataaaaatatttggcggtgataacattgaaggcctccttatatcaccgaagagtgtgccgtacaagtttttgcagtttattacaaaccagggacttctggttgcaatttccaatgaaaatgaaatccaggtatggaatcttgagttcaggcaactattttattcgtcacagtgggatgtcaacattactgcttttgcagtcatagagaggacctttatgatgtatcttggagatgagaatggccttctttctgtattgaagtatgatgtagatgatgggaagcttcaaataatgccatacaatgttcatatccattctctaatcgaaagatctggtgtttcgttacaggatcctcaacctattgttggaatactgatccagcctgacacttttgggacaaggttgctaattgcatatgagagagggttgttggttctttgggatgtatctgaggaccgtgcagtttctgtcagaggctatggggatttacgcatgaagggtcaaatcaatggtgctcagggggattctggtgaagatcaactaaatactactattgatgacagtgaagaagaaagagaaatttgctctctttgttgggcttcaagagagggctcaactgttgcggtgggctatataacaggtgacatacttctatgggatatgactacaaaatcctccagacaagagaagcaaagtgatgtttcatctaatgttgttaagctacagctggcctcagggagtcgtaggcttcctgttattgtcttgcattggtctgctgggtcagcagtacattctaataaaggagggcatctttttgtttatggcggcgatgatatgggatctgaagaagttctcacggttcttagcctggaatcaactgctggattagaatcagtgagatgcatgtcacgaactgatctcaaacttgatggatcatttgctgatatgattcttattcctgatactggggttcctgataaaagcagaacttctgcactttttattttgacaaatcctggacagctgaatttttatgatggtggctctctattttctgtgcaaaactcaaaagagggaactcctcttcctgaagcacagaaatttccagtcgcaattcctacccttgatcccaacataacggtcactggtctttattcgctaaccgaaagtgaatttccaaatatttcactgaagaaattttgtgctaggaaaaatgctgggcatttcatatcagagaacatgaaatggcctttgactggtggggttccaaatgagatgtcactggacgaagatcatgctgttgaaagaatatacattgcaggctaccaagatggttctgtgagaatatgggatgcaacatttcctgttctaatgccaatgtttgtcttggatggaaatgttgctgatgttaatttggatggagctaatgcttctgtatcatctctagccttttgttcattaagcatgactttggctgttgggacaacaagtggtctggtgcgcatctataaactccgagaacacactgggggttcaagcttccattttgtgagtgaatttaagcaagaagttcatgttgttcatcatgggaaaggatttcattgttatgttgcctttttgtcagcaaattcctcagtgctatctctattatttatggcttcaggtggcctccttgctgcaggctatcagaatggtcaggtggcaatgcttgatccaagtcagttatcaattctattcactgtagatggtgcatcaggaacaaattctcctgttgtttccttgggcatctacagtgttgctgcatctgctgcaaaagcagatcaatcaaagaaagataatcctcaaaatgcaacgttatccagagatgttcttctttccttgacaaaggatgctcgtgttactgtacttgactgtacaacgggtgtgatgataaattcacatatcatacatcagaagcaatcatctgctatttccatatgcagagtcagacgagacacaaacccaattatcagaggacaaaattccaagtcaaggtcagacagggaaagatggcaatgatcttgacaaaatacaaacccaaggaattgaaaagcacctgaaaaatgcttcccagctttcgcaaaatggtggttcagattcactccttgtggtgtgctgcgaggatgttttgcttttgttatccctggcgtcattgattcagggaagcagcaagcatctacagaagacgaaacttgcaaaaccttgttgctggtcagcagttttcaaaaacatggatgacaaagtttgtgggctgatattagcttatcagactggcactatagaaatgaggtttgggccagatctggctattgttgctgagacctctttgatgtcattattgcgatggagttacaagacaggcatggaaaaatccacaagctcctcaaatggacaagttactttggtaaatggatctgaatttgcgattatctctcttatggcctcagagaatgacttgagaatctctgccatgccttcatgacaaagtacttgcagcagctgcggaagcagctatgagtttctcaactgatcagagaagaaagcagaatccagcagcagggattattggtggcttcattaaaggaatgaaaggcaaggctgaagaaaatgcaaaaatgagagaaagtttgacattgcgagctccaagcgaacagttggagtcaattttctcgaaagaaccatttgctgaaccttcaatacccgaccttgatgatccgatggaagaactgtcaatcgatgacatagagattgacgatgaagtagcagtagccctggcacaagcagcatcgtccacatcccaagggaataagagaacagcagtggaggaggagagagcgaagctgtttgaagggtcaaacagtgcggataaaccgagaatgagaacgcagcaggagattctaaccaaatataggtttggcggggacgccgccgccgcagctgctcatgcgaaggataagctgatgcagaggcaggagaaactggagagaattagccaacaaaccgcggagcttcagaatggagcggagaactttgcttccctggcgcaggagctcgcgaaaacaatggagaacaagaagtggtggaagctataaactgggtttgtttgtacgtatgtgtgttgttggatgccacccgtcgttgcgaattgggacacataccagcattaccatttttttgtgtccgtattaatcactttggatattctttttgtgttttggtgatgtacgtgtaaagataaaaaagagagaatgaaaggaaccctcttctcctggctatatgagcgagtctcttattcgtc

SEQ ID NO: 67623 - DNA, 3615 bp, Zea Mays
caacaacggcccaactcctactctcaggcccggcccactcggttttcttccacgccaatgttcgccaagcggctcttccacagggcactcgtgcatcatcatcagggagtaggaagaggaggaggaggaggagcctcagcaccagcggcatcaccagcggatgccatccaaatggacgcgcagatctcgactcactgcggggtgccatacacagcttcactactcgccttcgatcccgtccagcgcctcctcgctgtcgcaactctggatggtaggataaaaatatttggcggtgataacattgaaggcctccttatatcaccgaagagtgtgccgtacaagtttttgcagtttattacaaaccagggacttctggttgcaatttccaatgaaaatgaaatccaggtatggaatcttgagttcaggcaactattttattcgtcacagtgggatgtcaacattactgcttttgcagtcatagagaggacctttatgatgtatcttggagatgagaatggccttctttctgtattgaagtatgatgtagatgatgggaagcttcaaataatgccatacaatgttcatatccattctctaatcgaaagatctggtgtttcgttacaggatcctcaacctattgttggaatactgatccagcctgacacttttgggacaaggttgctaattgcatatgagagagggttgttggttctttgggatgtatctgaggaccgtgcagtttctgtcagaggctatggggatttacgcatgaagggtcaaatcaatggtgctcagggggattctggtgaagatcaactaaatactactattgatgacagtgaagaagaaagagaaatttgctctctttgttgggcttcaagagagggctcaactgttgcggtgggctatataacaggtgacatacttctatgggatatgactacaaaatcctccagacaagagaagcaaagtgatgtttcatctaatgttgttaagctacagctggcctcagggagtcgtaggcttcctgttattgtcttgcattggtctgctgggtcagcagtacattctaataaaggagggcatctttttgtttatggcggcgatgatatgggatctgaagaagttctcacggttcttagcctggaatcaactgctggattagaatcagtgagatgcatgtcacgaactgatctcaaacttgatggatcatttgctgatatgattcttattcctgatactggggttcctgataaaagcagaacttctgcactttttattttgacaaatcctggacagctgaatttttatgatggtggctctctattttctgtgcaaaactcaaaagagggaactcctcttcctgaagcacagaaatttccagtcgcaattcctacccttgatcccaacataacggtcactggtctttattcgctaaccgaaagtgaatttccaaatatttcactgaagaaattttgtgctaggaaaaatgctgggcatttcatatcagagaacatgaaatggcctttgactggtggggttccaaatgagatgtcactggacgaagatcatgctgttgaaagaatatacattgcaggctaccaagatggttctgtgagaatatgggatgcaacatttcctgttctaatgccaatgtttgtcttggatggaaatgttgctgatgttaatttggatggagctaatgcttctgtatcatctctagccttttgttcattaagcatgactttggctgttgggacaacaagtggtctggtgcgcatctataaactccgagaacacactgggggttcaagcttccattttgtgagtgaatttaagcaagaagttcatgttgttcatcatgggaaaggatttcattgttatgttgcctttttgtcagcaaattcctcagtgctatctctattatttatggcttcaggtggcctccttgctgcaggctatcagaatggtcaggtggcaatgcttgatccaagtcagttatcaattctattcactgtagatggtgcatcaggaacaaattctcctgttgtttccttgggcatctacagtgttgctgcatctgctgcaaaagcagatcaatcaaagaaagataatcctcaaaatgcaacgttatccagagatgttcttctttccttgacaaaggatgctcgtgttactgtacttgactgtacaacgggtgtgatgataaattcacatatcatacatcagaagcaatcatctgctatttccatagtcagacgagacacaaacccaattatcagaggacaaaattccaagtcaaggtcagacagggaaagatggcaatgatcttgacaaaatacaaacccaaggaattgaaaagcacctgaaaaatgcttcccagctttcgcaaaatggtggttcagattcactccttgtggtgtgctgcgaggatgttttgcttttgttatccctggcgtcattgattcagggaagcagcaagcatctacagaagacgaaacttgcaaaaccttgttgctggtcagcagttttcaaaaacatggatgacaaagtttgtgggctgatattagcttatcagactggcactatagaaatgaggtttgggccagatctggctattgttgctgagacctctttgatgtcattattgcgatggagttacaagacaggcatggaaaaatccacaagctcctcaaatggacaagttactttggtaaatggatctgaatttgcgattatctctcttatggcctcagagaatgacttgaggattccagaatctctgccatgccttcatgacaaagtacttgcagcagctgcggaagcagctatgagtttctcaactgatcagagaagaaagcagaatccagcagcagggattattggtggcttcattaaaggaatgaaaggcaaggctgaagaaaatgcaaaaatgagagaaagtttgacattgcgagctccaagcgaacagttggagtcaattttctcgaaagaaccatttgctgaaccttcaatacccgaccttgatgatccgatggaagaactgtcaatcgatgacatagagattgacgatgaagtagcagtagccctggcacaagcagcatcgtccacatcccaagggaataagagaacagcagtggaggaggagagagcgaagctgtttgaagggtcaaacagtgcggataaaccgagaatgagaacgcagcaggagattctaaccaaatataggtttggcggggacgccgccgccgcagctgctcatgcgaaggataagctgatgcagaggcaggagaaactggagagaattagccaacaaaccgcggagcttcagaatggagcggagaactttgcttccctggcgcaggagctcgcgaaaacaatggagaacaagaagtggtggaagctataaactgggtttgtttgtacgtatgtgtgttgttggatgccacccgtcgttgcgaattgggacacataccagcattaccatttttttgtgtccgtattaatcactttggatattctttttgtgttttggtgatgtacgtgtaaagataaaaaagagagaatgaaaggaaccctcttctcctggctatatgagcgagtctcttattcgtc

SEQ ID NO: 67624 - DNA, 3632 bp, Zea Mays
caacaacggcccaactcctactctcaggcccggcccactcggttttcttccacgccaatgttcgccaagcggctcttccacagggcactcgtgcatcatcatcagggagtaggaagaggaggaggaggaggagcctcagcaccagcggcatcaccagcggatgccatccaaatggacgcgcagatctcgactcactgcggggtgccatacacagcttcactactcgccttcgatcccgtccagcgcctcctcgctgtcgcaactctggatggtaggataaaaatatttggcggtgataacattgaaggcctccttatatcaccgaagagtgtgccgtacaagtttttgcagtttattacaaaccagggacttctggttgcaatttccaatgaaaatgaaatccaggtatggaatcttgagttcaggcaactattttattcgtcacagtgggatgtcaacattactgcttttgcagtcatagagaggacctttatgatgtatcttggagatgagaatggccttctttctgtattgaagtatgatgtagatgatgggaagcttcaaataatgccatacaatgttcatatccattctctaatcgaaagatctggtgtttcgttacaggatcctcaacctattgttggaatactgatccagcctgacacttttgggacaaggttgctaattgcatatgagagagggttgttggttctttgggatgtatctgaggaccgtgcagtttctgtcagaggctatggggatttacgcatgaagggtcaaatcaatggtgctcagggggattctggtgaagatcaactaaatactactattgatgacagtgaagaagaaagagaaatttgctctctttgttgggcttcaagagagggctcaactgttgcggtgggctatataacaggtgacatacttctatgggatatgactacaaaatcctccagacaagagaagcaaagtgatgtttcatctaatgttgttaagctacagctggcctcagggagtcgtaggcttcctgttattgtcttgcattggtctgctgggtcagcagtacattctaataaaggagggcatctttttgtttatggcggcgatgatatgggatctgaagaagttctcacggttcttagcctggaatcaactgctggattagaatcagtgagatgcatgtcacgaactgatctcaaacttgatggatcatttgctgatatgattcttattcctgatactggggttcctgataaaagcagaacttctgcactttttattttgacaaatcctggacagctgaatttttatgatggtggctctctattttctgtgcaaaactcaaaagagggaactcctcttcctgaagcacagaaatttccagtcgcaattcctacccttgatcccaacataacggtcactggtctttattcgctaaccgaaagtgaatttccaaatatttcactgaagaaattttgtgctaggaaaaatgctgggcatttcatatcagagaacatgaaatggcctttgactggtggggttccaaatgagatgtcactggacgaagatcatgctgttgaaagaatatacattgcaggctaccaagatggttctgtgagaatatgggatgcaacatttcctgttctaatgccaatgtttgtcttggatggaaatgttgctgatgttaatttggatggagctaatgcttctgtatcatctctagccttttgttcattaagcatgactttggctgttgggacaacaagtggtctggtgcgcatctataaactccgagaacacactgggggttcaagcttccattttgtgagtgaatttaagcaagaagttcatgttgttcatcatgggaaaggatttcattgttatgttgcctttttgtcagcaaattcctcagtgctatctctattatttatggcttcaggtggcctccttgctgcaggctatcagaatggtcaggtggcaatgcttgatccaagtcagttatcaattctattcactgtagatggtgcatcaggaacaaattctcctgttgtttccttgggcatctacagtgttgctgcatctgctgcaaaagcagatcaatcaaagaaagataatcctcaaaatgcaacgttatccagagatgttcttctttccttgacaaaggatgctcgtgttactgtacttgactgtacaacgggtgtgatgataaattcacatatcatacatcagaagcaatcatctgctatttccatgtatgtcatagatgcagagtcagacgagacacaaacccaattatcagaggacaaaattccaagtcaaggtcagacagggaaagatggcaatgatcttgacaaaatacaaacccaaggaattgaaaagcacctgaaaaatgcttcccagctttcgcaaaatggtggttcagattcactccttgtggtgtgctgcgaggatgttttgcttttgttatccctggcgtcattgattcagggaagcagcaagcatctacagaagacgaaacttgcaaaaccttgttgctggtcagcagttttcaaaaacatggatgacaaagtttgtgggctgatattagcttatcagactggcactatagaaatgaggtttgggccagatctggctattgttgctgagacctctttgatgtcattattgcgatggagttacaagacaggcatggaaaaatccacaagctcctcaaatggacaagttactttggtaaatggatctgaatttgcgattatctctcttatggcctcagagaatgacttgaggattccagaatctctgccatgccttcatgacaaagtacttgcagcagctgcggaagcagctatgagtttctcaactgatcagagaagaaagcagaatccagcagcagggattattggtggcttcattaaaggaatgaaaggcaaggctgaagaaaatgcaaaaatgagagaaagtttgacattgcgagctccaagcgaacagttggagtcaattttctcgaaagaaccatttgctgaaccttcaatacccgaccttgatgatccgatggaagaactgtcaatcgatgacatagagattgacgatgaagtagcagtagccctggcacaagcagcatcgtccacatcccaagggaataagagaacagcagtggaggaggagagagcgaagctgtttgaagggtcaaacagtgcggataaaccgagaatgagaacgcagcaggagattctaaccaaatataggtttggcggggacgccgccgccgcagctgctcatgcgaaggataagctgatgcagaggcaggagaaactggagagaattagccaacaaaccgcggagcttcagaatggagcggagaactttgcttccctggcgcaggagctcgcgaaaacaatggagaacaagaagtggtggaagctataaactgggtttgtttgtacgtatgtgtgttgttggatgccacccgtcgttgcgaattgggacacataccagcattaccatttttttgtgtccgtattaatcactttggatattctttttgtgttttggtgatgtacgtgtaaagataaaaaagagagaatgaaaggaaccctcttctcctggctatatgagcgagtctcttattcgtc

SEQ ID NO: 67625 - DNA, 3965 bp, Zea Mays
actctcaggcccggcccactcggttttcttccacgccaatgttcgccaagcggctcttccacagggcactcgtgcatcatcatcagggagtaggaagaggaggaggaggaggagcctcagcaccagcggcatcaccagcggatgccatccaaatggacgcgcagatctcgactcactgcggggtgccatacacagcttcactactcgccttcgatcccgtccagcgcctcctcgctgtcgcaactctggatggtaggataaaaatatttggcggtgataacattgaaggcctccttatatcaccgaagagtgtgccgtacaagtttttgcagtttattacaaaccagggacttctggttgcaatttccaatgaaaatgaaatccaggtgagctattgacaggcagtgaagtttttatgcattcaaactattcgttttttttttcaaattttgggaccttggtgcctggagctcatatgttaacaacagctatgtggtggtgctcatgtgttggttcatactgcaagtatttttcattatatgctctttgaagacaacctgcgaaaaaaagtggcttgaccaacctaggaggaactacctagcccctgaaatctgtaagaatgttttctattagtgcggtggccattttatatgatatatatctgtcttgtaggtatggaatcttgagttcaggcaactattttattcgtcacagtgggatgtcaacattactgcttttgcagtcatagagaggacctttatgatgtatcttggagatgagaatggccttctttctgtattgaagtatgatgtagatgatgggaagcttcaaataatgccatacaatgttcatatccattctctaatcgaaagatctggtgtttcgttacaggatcctcaacctattgttggaatactgatccagcctgacacttttgggacaaggttgctaattgcatatgagagagggttgttggttctttgggatgtatctgaggaccgtgcagtttctgtcagaggctatggggatttacgcatgaagggtcaaatcaatggtgctcagggggattctggtgaagatcaactaaatactactattgatgacagtgaagaagaaagagaaatttgctctctttgttgggcttcaagagagggctcaactgttgcggtgggctatataacaggtgacatacttctatgggatatgactacaaaatcctccagacaagagaagcaaagtgatgtttcatctaatgttgttaagctacagctggcctcagggagtcgtaggcttcctgttattgtcttgcattggtctgctgggtcagcagtacattctaataaaggagggcatctttttgtttatggcggcgatgatatgggatctgaagaagttctcacggttcttagcctggaatcaactgctggattagaatcagtgagatgcatgtcacgaactgatctcaaacttgatggatcatttgctgatatgattcttattcctgatactggggttcctgataaaagcagaacttctgcactttttattttgacaaatcctggacagctgaatttttatgatggtggctctctattttctgtgcaaaactcaaaagagggaactcctcttcctgaagcacagaaatttccagtcgcaattcctacccttgatcccaacataacggtcactggtctttattcgctaaccgaaagtgaatttccaaatatttcactgaagaaattttgtgctaggaaaaatgctgggcatttcatatcagagaacatgaaatggcctttgactggtggggttccaaatgagatgtcactggacgaagatcatgctgttgaaagaatatacattgcaggctaccaagatggttctgtgagaatatgggatgcaacatttcctgttctaatgccaatgtttgtcttggatggaaatgttgctgatgttaatttggatggagctaatgcttctgtatcatctctagccttttgttcattaagcatgactttggctgttgggacaacaagtggtctggtgcgcatctataaactccgagaacacactgggggttcaagcttccattttgtgagtgaatttaagcaagaagttcatgttgttcatcatgggaaaggatttcattgttatgttgcctttttgtcagcaaattcctcagtgctatctctattatttatggcttcaggtggcctccttgctgcaggctatcagaatggtcaggtggcaatgcttgatccaagtcagttatcaattctattcactgtagatggtgcatcaggaacaaattctcctgttgtttccttgggcatctacagtgttgctgcatctgctgcaaaagcagatcaatcaaagaaagataatcctcaaaatgcaacgttatccagagatgttcttctttccttgacaaaggatgctcgtgttactgtacttgactgtacaacgggtgtgatgataaattcacatatcatacatcagaagcaatcatctgctatttccatatgcagagtcagacgagacacaaacccaattatcagaggacaaaattccaagtcaaggtcagacagggaaagatggcaatgatcttgacaaaatacaaacccaaggaattgaaaagcacctgaaaaatgcttcccagctttcgcaaaatggtggttcagattcactccttgtggtgtgctgcgaggatgttttgcttttgttatccctggcgtcattgattcagggaagcagcaagcatctacagaagacgaaacttgcaaaaccttgttgctggtcagcagttttcaaaaacatggatgacaaagtttgtgggctgatattagcttatcagactggcactatagaaatgaggtttgggccagatctggctattgttgctgagacctctttgatgtcattattgcgatggagttacaagacaggcatggaaaaatccacaagctcctcaaatggacaagttactttggtaaatggatctgaatttgcgattatctctcttatggcctcagagaatgacttgaggattccagaatctctgccatgccttcatgacaaagtacttgcagcagctgcggaagcagctatgagtttctcaactgatcagagaagaaagcagaatccagcagcagggattattggtggcttcattaaaggaatgaaaggcaaggctgaagaaaatgcaaaaatgagagaaagtttgacattgcgagctccaagcgaacagttggagtcaattttctcgaaagaaccatttgctgaaccttcaatacccgaccttgatgatccgatggaagaactgtcaatcggttctctttctccttccttgtgcatcattttatattgagtgctcccttccctcttgacttgggagtaatgaatgcagatgacatagagattgacgatgaagtagcagtagccctggcacaagcagcatcgtccacatcccaagggaataagagaacagcagtggaggaggagagagcgaagctgtttgaagggtcaaacagtgcggataaaccgagaatgagaacgcagcaggagattctaaccaaatataggtttggcggggacgccgccgccgcagctgctcatgcgaaggataagctgatgcagaggcaggagaaactggagagaattagccaacaaaccgcggagcttcagaatggagcggagaactttgcttccctggcgcaggagctcgcgaaaacaatggagaacaagaagtggtggaagctataaactgggtttgtttgtacgtatgtgtgttgttggatgccacccgtcgttgcgaattgggacacataccagcattaccatttttttgtgtccgtattaatcactttggatattctttttgtgttttggtgatgtacgtgtaaagataaaaaagagagaatgaaaggaaccctcttctcctggctatatgagcgagtctcttattcgtc

SEQ ID NO: 67626 - DNA, 3601 bp, Zea Mays
ctctcaggcccggcccactcggttttcttccacgccaatgttcgccaagcggctcttccacagggcactcgtgcatcatcatcagggagtaggaagaggaggaggaggaggagcctcagcaccagcggcatcaccagcggatgccatccaaatggacgcgcagatctcgactcactgcggggtgccatacacagcttcactactcgccttcgatcccgtccagcgcctcctcgctgtcgcaactctggatggtaggataaaaatatttggcggtgataacattgaaggcctccttatatcaccgaagagtgtgccgtacaagtttttgcagtttattacaaaccagggacttctggttgcaatttccaatgaaaatgaaatccaggtatggaatcttgagttcaggcaactattttattcgtcacagtgggatgtcaacattactgcttttgcagtcatagagaggacctttatgatgtatcttggagatgagaatggccttctttctgtattgaagtatgatgtagatgatgggaagcttcaaataatgccatacaatgttcatatccattctctaatcgaaagatctggtgtttcgttacaggatcctcaacctattgttggaatactgatccagcctgacacttttgggacaaggttgctaattgcatatgagagagggttgttggttctttgggatgtatctgaggaccgtgcagtttctgtcagaggctatggggatttacgcatgaagggtcaaatcaatggtgctcagggggattctggtgaagatcaactaaatactactattgatgacagtgaagaagaaagagaaatttgctctctttgttgggcttcaagagagggctcaactgttgcggtgggctatataacaggtgacatacttctatgggatatgactacaaaatcctccagacaagagaagcaaagtgatgtttcatctaatgttgttaagctacagctggcctcagggagtcgtaggcttcctgttattgtcttgcattggtctgctgggtcagcagtacattctaataaaggagggcatctttttgtttatggcggcgatgatatgggatctgaagaagttctcacggttcttagcctggaatcaactgctggattagaatcagtgagatgcatgtcacgaactgatctcaaacttgatggatcatttgctgatatgattcttattcctgatactggggttcctgataaaagcagaacttctgcactttttattttgacaaatcctggacagctgaatttttatgatggtggctctctattttctgtgcaaaactcaaaagagggaactcctcttcctgaagcacagaaatttccagtcgcaattcctacccttgatcccaacataacggtcactggtctttattcgctaaccgaaagtgaatttccaaatatttcactgaagaaattttgtgctaggaaaaatgctgggcatttcatatcagagaacatgaaatggcctttgactggtggggttccaaatgagatgtcactggacgaagatcatgctgttgaaagaatatacattgcaggctaccaagatggttctgtgagaatatgggatgcaacatttcctgttctaatgccaatgtttgtcttggatggaaatgttgctgatgttaatttggatggagctaatgcttctgtatcatctctagccttttgttcattaagcatgactttggctgttgggacaacaagtggtctggtgcgcatctataaactccgagaacacactgggggttcaagcttccattttgtgagtgaatttaagcaagaagttcatgttgttcatcatgggaaaggatttcattgttatgttgcctttttgtcagcaaattcctcagtgctatctctattatttatggcttcaggtggcctccttgctgcaggctatcagaatggtcaggtggcaatgcttgatccaagtcagttatcaattctattcactgtagatggtgcatcaggaacaaattctcctgttgtttccttgggcatctacagtgttgctgcatctgctgcaaaagcagatcaatcaaagaaagataatcctcaaaatgcaacgttatccagagatgttcttctttccttgacaaaggatgctcgtgttactgtacttgactgtacaacgggtgtgatgataaattcacatatcatacatcagaagcaatcatctgctatttccatatgcagagtcagacgagacacaaacccaattatcagaggacaaaattccaagtcaaggtcagacagggaaagatggcaatgatcttgacaaaatacaaacccaaggaattgaaaagcacctgaaaaatgcttcccagctttcgcaaaatggtggttcagattcactccttgtggtgtgctgcgaggatgttttgcttttgttatccctggcgtcattgattcagggaagcagcaagcatctacagaagacgaaacttgcaaaaccttgttgctggtcagcagttttcaaaaacatggatgacaaagtttgtgggctgatattagcttatcagactggcactatagaaatgaggtttgggccagatctggctattgttgctgagacctctttgatgtcattattgcgatggagttacaagacaggcatggaaaaatccacaagctcctcaaatggacaagttactttggtaaatggatctgaatttgcgattatctctcttatggcctcagagaatgacttgaggattccagaatctctgccatgccttcatgacaaagtacttgcagcagctgcggaagcagctatgagtttctcaactgatcagagaagaaagcagaatccagcagcagggattattggtggcttcattaaaggaatgaaaggcaaggctgaagaaaatgcaaaaatgagagaaagtttgacattgcgagctccaagcgaacagttggagtcaattttctcgaaagaaccatttgctgaaccttcaatacccgaccttgatgatccgatggaagaactgtcaatcgatgacatagagattgacgatgaagtagcagtagccctggcacaagcagcatcgtccacatcccaagggaataagagaacagcagtggaggaggagagagcgaagctgtttgaagggtcaaacagtgcggataaaccgagaatgagaacgcagcaggagattctaaccaaatataggtttggcggggacgccgccgccgcagctgctcatgcgaaggataagctgatgcagaggcaggagaaactggagagaattagccaacaaaccgcggagcttcagaatggagcggagaactttgcttccctggcgcaggagctcgcgaaaacaatggagaacaagaagtggtggaagctataaactgggtttgtttgtacgtatgtgtgttgttggatgccacccgtcgttgcgaattgggacacataccagcattaccatttttttgtgtccgtattaatcactttggatattctttttgtgttttggtgatgtacgtgtaaagataaaaaagagagaatgaaaggaaccctcttctcctggctatatgagcgagtctcttattcgtc

SEQ ID NO: 67627 - DNA, 3705 bp, Zea Mays
tcagcttgaactcggaagcagtcagcgactcacctcgtcgtcgcccggtcgccgtgcacgtagatgttcgccaagcggctcttccacagggcactcgtgcaggagtaggaagaggaggaggaggaggagcctcagcaccagcggcatcaccagcggatgccatccaaatggacgcgcagatctcgactcactgcggggtgccatacacagcttcactactcgccttcgatcccgtccagcgcctcctcgctgtcgcaactctggatggtaggataaaaatatttggcggtgataacattgaaggcctccttatatcaccgaagagtgtgccgtacaagtttttgcagtttattacaaaccagggacttctggttgcaatttccaatgaaaatgaaatccaggtatggaatcttgagttcaggcaactattttattcgtcacagtgggatgtcaacattactgcttttgcagtcatagagaggacctttatgatgtatcttggagatgagaatggccttctttctgtattgaagtatgatgtagatgatgggaagcttcaaataatgccatacaatgttcatatccattctctaatcgaaagatctggtgtttcgttacaggatcctcaacctattgttggaatactgatccagcctgacacttttgggacaaggttgctaattgcatatgagagagggttgttggttctttgggatgtatctgaggaccgtgcagtttctgtcagaggctatggggatttacgcatgaagggtcaaatcaatggtgctcagggggattctggtgaagatcaactaaatactactattgatgacagtgaagaagaaagagaaatttgctctctttgttgggcttcaagagagggctcaactgttgcggtgggctatataacaggtgacatacttctatgggatatgactacaaaatcctccagacaagagaagcaaagtgatgtttcatctaatgttgttaagctacagctggcctcagggagtcgtaggcttcctgttattgtcttgcattggtctgctgggtcagcagtacattctaataaaggagggcatctttttgtttatggcggcgatgatatgggatctgaagaagttctcacggttcttagcctggaatcaactgctggattagaatcagtgagatgcatgtcacgaactgatctcaaacttgatggatcatttgctgatatgattcttattcctgatactggggttcctgataaaagcagaacttctgcactttttattttgacaaatcctggacagctgaatttttatgatggtggctctctattttctgtgcaaaactcaaaagagggaactcctcttcctgaagcacagaaatttccagtcgcaattcctacccttgatcccaacataacggtcactggtctttattcgctaaccgaaagtgaatttccaaatatttcactgaagaaattttgtgctaggaaaaatgctgggcatttcatatcagagaacatgaaatggcctttgactggtggggttccaaatgagatgtcactggacgaagatcatgctgttgaaagaatatacattgcaggctaccaagatggttctgtgagaatatgggatgcaacatttcctgttctaatgccaatgtttgtcttggatggaaatgttgctgatgttaatttggatggagctaatgcttctgtatcatctctagccttttgttcattaagcatgactttggctgttgggacaacaagtggtctggtgcgcatctataaactccgagaacacactgggggttcaagcttccattttgtgagtgaatttaagcaagaagttcatgttgttcatcatgggaaaggatttcattgttatgttgcctttttgtcagcaaattcctcagtgctatctctattatttatggcttcaggtggcctccttgctgcaggctatcagaatggtcaggtggcaatgcttgatccaagtcagttatcaattctattcactgtagatggtgcatcaggaacaaattctcctgttgtttccttgggcatctacagtgttgctgcatctgctgcaaaagcagatcaatcaaagaaagataatcctcaaaatgcaacgttatccagagatgttcttctttccttgacaaaggatgctcgtgttactgtacttgactgtacaacgggtgtgatgataaattcacatatcatacatcagaagcaatcatctgctatttccatgtatgtcatagatgcagagtcagacgagacacaaacccaattatcagaggacaaaattccaagtcaaggtcagacagggaaagatggcaatgatcttgacaaaatacaaacccaaggaattgaaaagcacctgaaaaatgcttcccagctttcgcaaaatggtggttcagattcactccttgtggtgtgctgcgaggatgttttgcttttgttatccctggcgtcattgattcagggaagcagcaagcatctacagaagacgaaacttgcaaaaccttgttgctggtcagcagttttcaaaaacatggatgacaaagtttgtgggctgatattagcttatcagactggcactatagaaatgaggtttgggccagatctggctattgttgctgagacctctttgatgtcattattgcgatggagttacaagacaggcatggaaaaatccacaagctcctcaaatggacaagttactttggtaaatggatctgaatttgcgattatctctcttatggcctcagagaatgacttgaggattccagaatctctgccatgccttcatgacaaagtacttgcagcagctgcggaagcagctatgagtttctcaactgatcagagaagaaagcagaatccagcagcagggattattggtggcttcattaaaggaatgaaaggcaaggctgaagaaaatgcaaaaatgagagaaagtttgacattgcgagctccaagcgaacagttggagtcaattttctcgaaagaaccatttgctgaaccttcaatacccgaccttgatgatccgatggaagaactgtcaatcggttctctttctccttccttgtgcatcattttatattgagtgctcccttccctcttgacttgggagtaatgaatgcagatgacatagagattgacgatgaagtagcagtagccctggcacaagcagcatcgtccacatcccaagggaataagagaacagcagtggaggaggagagagcgaagctgtttgaagggtcaaacagtgcggataaaccgagaatgagaacgcagcaggagattctaaccaaatataggtttggcggggacgccgccgccgcagctgctcatgcgaaggataagctgatgcagaggcaggagaaactggagagaattagccaacaaaccgcggagcttcagaatggagcggagaactttgcttccctggcgcaggagctcgcgaaaacaatggagaacaagaagtggtggaagctataaactgggtttgtttgtacgtatgtgtgttgttggatgccacccgtcgttgcgaattgggacacataccagcattaccatttttttgtgtccgtattaatcactttggatattctttttgtgttttggtgatgtacgtgtaaagataaaaaagagagaatgaaaggaaccctcttctcctggctatatgagcgagtctcttattcgtc

SEQ ID NO: 67628 - DNA, 3689 bp, Zea Mays
cttgaactcggaagcagtcagcgactcacctcgtcgtcgcccggtcgccgtgcacgtagatgttcgccaagcggctcttccacagggcactcgtgcatcatcatcagggagtaggaagaggaggaggaggaggagcctcagcaccagcggcatcaccagcggatgccatccaaatggacgcgcagatctcgactcactgcggggtgccatacacagcttcactactcgccttcgatcccgtccagcgcctcctcgctgtcgcaactctggatggtaggataaaaatatttggcggtgataacattgaaggcctccttatatcaccgaagagtgtgccgtacaagtttttgcagtttattacaaaccagggacttctggttgcaatttccaatgaaaatgaaatccaggtatggaatcttgagttcaggcaactattttattcgtcacagtgggatgtcaacattactgcttttgcagtcatagagaggacctttatgatgtatcttggagatgagaatggccttctttctgtattgaagtatgatgtagatgatgggaagcttcaaataatgccatacaataaagatctggtgtttcgttacaggatcctcaacctattgttggaatactgatccagcctgacacttttgggacaaggttgctaattgcatatgagagagggttgttggttctttgggatgtatctgaggaccgtgcagtttctgtcagaggctatggggatttacgcatgaagggtcaaatcaatggtgctcagggggattctggtgaagatcaactaaatactactattgatgacagtgaagaagaaagagaaatttgctctctttgttgggcttcaagagagggctcaactgttgcggtgggctatataacaggtgacatacttctatgggatatgactacaaaatcctccagacaagagaagcaaagtgatgtttcatctaatgttgttaagctacagctggcctcagggagtcgtaggcttcctgttattgtcttgcattggtctgctgggtcagcagtacattctaataaaggagggcatctttttgtttatggcggcgatgatatgggatctgaagaagttctcacggttcttagcctggaatcaactgctggattagaatcagtgagatgcatgtcacgaactgatctcaaacttgatggatcatttgctgatatgattcttattcctgatactggggttcctgataaaagcagaacttctgcactttttattttgacaaatcctggacagctgaatttttatgatggtggctctctattttctgtgcaaaactcaaaagagggaactcctcttcctgaagcacagaaatttccagtcgcaattcctacccttgatcccaacataacggtcactggtctttattcgctaaccgaaagtgaatttccaaatatttcactgaagaaattttgtgctaggaaaaatgctgggcatttcatatcagagaacatgaaatggcctttgactggtggggttccaaatgagatgtcactggacgaagatcatgctgttgaaagaatatacattgcaggctaccaagatggttctgtgagaatatgggatgcaacatttcctgttctaatgccaatgtttgtcttggatggaaatgttgctgatgttaatttggatggagctaatgcttctgtatcatctctagccttttgttcattaagcatgactttggctgttgggacaacaagtggtctggtgcgcatctataaactccgagaacacactgggggttcaagcttccattttgtgagtgaatttaagcaagaagttcatgttgttcatcatgggaaaggatttcattgttatgttgcctttttgtcagcaaattcctcagtgctatctctattatttatggcttcaggtggcctccttgctgcaggctatcagaatggtcaggtggcaatgcttgatccaagtcagttatcaattctattcactgtagatggtgcatcaggaacaaattctcctgttgtttccttgggcatctacagtgttgctgcatctgctgcaaaagcagatcaatcaaagaaagataatcctcaaaatgcaacgttatccagagatgttcttctttccttgacaaaggatgctcgtgttactgtacttgactgtacaacgggtgtgatgataaattcacatatcatacatcagaagcaatcatctgctatttccatgtatgtcatagatgcagagtcagacgagacacaaacccaattatcagaggacaaaattccaagtcaaggtcagacagggaaagatggcaatgatcttgacaaaatacaaacccaaggaattgaaaagcacctgaaaaatgcttcccagctttcgcaaaatggtggttcagattcactccttgtggtgtgctgcgaggatgttttgcttttgttatccctggcgtcattgattcagggaagcagcaagcatctacagaagacgaaacttgcaaaaccttgttgctggtcagcagttttcaaaaacatggatgacaaagtttgtgggctgatattagcttatcagactggcactatagaaatgaggtttgggccagatctggctattgttgctgagacctctttgatgtcattattgcgatggagttacaagacaggcatggaaaaatccacaagctcctcaaatggacaagttactttggtaaatggatctgaatttgcgattatctctcttatggcctcagagaatgacttgaggattccagaatctctgccatgccttcatgacaaagtacttgcagcagctgcggaagcagctatgagtttctcaactgatcagagaagaaagcagaatccagcagcagggattattggtggcttcattaaaggaatgaaaggcaaggctgaagaaaatgcaaaaatgagagaaagtttgacattgcgagctccaagcgaacagttggagtcaattttctcgaaagaaccatttgctgaaccttcaatacccgaccttgatgatccgatggaagaactgtcaatcggttctctttctccttccttgtgcatcattttatattgagtgctcccttccctcttgacttgggagtaatgaatgcagatgacatagagattgacgatgaagtagcagtagccctggcacaagcagcatcgtccacatcccaagggaataagagaacagcagtggaggaggagagagcgaagctgtttgaagggtcaaacagtgcggataaaccgagaatgagaacgcagcaggagattctaaccaaatataggtttggcggggacgccgccgccgcagctgctcatgcgaaggataagctgatgcagaggcaggagaaactggagagaattagccaacaaaccgcggagcttcagaatggagcggagaactttgcttccctggcgcaggagctcgcgaaaacaatggagaacaagaagtggtggaagctataaactgggtttgtttgtacgtatgtgtgttgttggatgccacccgtcgttgcgaattgggacacataccagcattaccatttttttgtgtccgtattaatcactttggatattctttttgtgttttggtgatgtacgtgtaaagataaaaaagagagaatgaaaggaaccctcttctcctggctatatgagcgagtctcttattcgtc

SEQ ID NO: 67629 - DNA, 3608 bp, Zea Mays
cttgaactcggaagcagtcagcgactcacctcgtcgtcgcccggtcgccgtgcacgtagatgttcgccaagcggctcttccacagggcactcggagtaggaagaggaggaggaggaggagcctcagcaccagcggcatcaccagcggatgccatccaaatggacgcgcagatctcgactcactgcggggtgccatacacagcttcactactcgccttcgatcccgtccagcgcctcctcgctgtcgcaactctggatggtaggataaaaatatttggcggtgataacattgaaggcctccttatatcaccgaagagtgtgccgtacaagtttttgcagtttattacaaaccagggacttctggttgcaatttccaatgaaaatgaaatccaggtatggaatcttgagttcaggcaactattttattcgtcacagtgggatgtcaacattactgcttttgcagtcatagagaggacctttatgatgtatcttggagatgagaatggccttctttctgtattgaagtatgatgtagatgatgggaagcttcaaataatgccatacaatgttcatatccattctctaatcgaaagatctggtgtttcgttacaggatcctcaacctattgttggaatactgatccagcctgacacttttgggacaaggttgctaattgcatatgagagagggttgttggttctttgggatgtatctgaggaccgtgcagtttctgtcagaggctatggggatttacgcatgaagggtcaaatcaatggtgctcagggggattctggtgaagatcaactaaatactactattgatgacagtgaagaagaaagagaaatttgctctctttgttgggcttcaagagagggctcaactgttgcggtgggctatataacaggtgacatacttctatgggatatgactacaaaatcctccagacaagagaagcaaagtgatgtttcatctaatgttgttaagctacagctggcctcagggagtcgtaggcttcctgttattgtcttgcattggtctgctgggtcagcagtacattctaataaaggagggcatctttttgtttatggcggcgatgatatgggatctgaagaagttctcacggttcttagcctggaatcaactgctggattagaatcagtgagatgcatgtcacgaactgatctcaaacttgatggatcatttgctgatatgattcttattcctgatactggggttcctgataaaagcagaacttctgcactttttattttgacaaatcctggacagctgaatttttatgatggtggctctctattttctgtgcaaaactcaaaagagggaactcctcttcctgaagcacagaaatttccagtcgcaattcctacccttgatcccaacataacggtcactggtctttattcgctaaccgaaagtgaatttccaaatatttcactgaagaaattttgtgctaggaaaaatgctgggcatttcatatcagagaacatgaaatggcctttgactggtggggttccaaatgagatgtcactggacgaagatcatgctgttgaaagaatatacattgcaggctaccaagatggttctgtgagaatatgggatgcaacatttcctgttctaatgccaatgtttgtcttggatggaaatgttgctgatgttaatttggatggagctaatgcttctgtatcatctctagccttttgttcattaagcatgactttggctgttgggacaacaagtggtctggtgcgcatctataaactccgagaacacactgggggttcaagcttccattttgtgagtgaatttaagcaagaagttcatgttgttcatcatgggaaaggatttcattgttatgttgcctttttgtcagcaaattcctcagtgctatctctattatttatggcttcaggtggcctccttgctgcaggctatcagaatggtcaggtggcaatgcttgatccaagtcagttatcaattctattcactgtagatggtgcatcaggaacaaattctcctgttgtttccttgggcatctacagtgttgctgcatctgctgcaaaagcagatcaatcaaagaaagataatcctcaaaatgcaacgttatccagagatgttcttctttccttgacaaaggatgctcgtgttactgtacttgactgtacaacgggtgtgatgataaattcacatatcatacatcagaagcaatcatctgctatttccatatgcagagtcagacgagacacaaacccaattatcagaggacaaaattccaagtcaaggtcagacagggaaagatggcaatgatcttgacaaaatacaaacccaaggaattgaaaagcacctgaaaaatgcttcccagctttcgcaaaatggtggttcagattcactccttgtggtgtgctgcgaggatgttttgcttttgttatccctggcgtcattgattcagggaagcagcaagcatctacagaagacgaaacttgcaaaaccttgttgctggtcagcagttttcaaaaacatggatgacaaagtttgtgggctgatattagcttatcagactggcactatagaaatgaggtttgggccagatctggctattgttgctgagacctctttgatgtcattattgcgatggagttacaagacaggcatggaaaaatccacaagctcctcaaatggacaagttactttggtaaatggatctgaatttgcgattatctctcttatggcctcagagaatgacttgaggattccagaatctctgccatgccttcatgacaaagtacttgcagcagctgcggaagcagctatgagtttctcaactgatcagagaagaaagcagaatccagcagcagggattattggtggcttcattaaaggaatgaaaggcaaggctgaagaaaatgcaaaaatgagagaaagtttgacattgcgagctccaagcgaacagttggagtcaattttctcgaaagaaccatttgctgaaccttcaatacccgaccttgatgatccgatggaagaactgtcaatcgatgacatagagattgacgatgaagtagcagtagccctggcacaagcagcatcgtccacatcccaagggaataagagaacagcagtggaggaggagagagcgaagctgtttgaagggtcaaacagtgcggataaaccgagaatgagaacgcagcaggagattctaaccaaatataggtttggcggggacgccgccgccgcagctgctcatgcgaaggataagctgatgcagaggcaggagaaactggagagaattagccaacaaaccgcggagcttcagaatggagcggagaactttgcttccctggcgcaggagctcgcgaaaacaatggagaacaagaagtggtggaagctataaactgggtttgtttgtacgtatgtgtgttgttggatgccacccgtcgttgcgaattgggacacataccagcattaccatttttttgtgtccgtattaatcactttggatattctttttgtgttttggtgatgtacgtgtaaagataaaaaagagagaatgaaaggaaccctcttctcctggctatatgagcgagtctcttattcgtc

SEQ ID NO: 67630 - DNA, 3660 bp, Zea Mays
cttgaactcggaagcagtcagcgactcacctcgtcgtcgcccggtcgccgtgcacgtagatgttcgccaagcggctcttccacagggcactcgtgcatcatcatcagggagtaggaagaggaggaggaggaggagcctcagcaccagcggcatcaccagcggatgccatccaaatggacgcgcagatctcgactcactgcggggtgccatacacagcttcactactcgccttcgatcccgtccagcgcctcctcgctgtcgcaactctggatggtaggataaaaatatttggcggtgataacattgaaggcctccttatatcaccgaagagtgtgccgtacaagtttttgcagtttattacaaaccagggacttctggttgcaatttccaatgaaaatgaaatccaggtatggaatcttgagttcaggcaactattttattcgtcacagtgggatgtcaacattactgcttttgcagtcatagagaggacctttatgatgtatcttggagatgagaatggccttctttctgtattgaagtatgatgtagatgatgggaagcttcaaataatgccatacaatgttcatatccattctctaatcggtacctttatgcctttcttgccaaataaagatctggtgtttcgttacaggatcctcaacctattgttggaatactgatccagcctgacacttttgggacaaggttgctaattgcatatgagagagggttgttggttctttgggatgtatctgaggaccgtgcagtttctgtcagaggctatggggatttacgcatgaagggtcaaatcaatggtgctcagggggattctggtgaagatcaactaaatactactattgatgacagtgaagaagaaagagaaatttgctctctttgttgggcttcaagagagggctcaactgttgcggtgggctatataacaggtgacatacttctatgggatatgactacaaaatcctccagacaagagaagcaaagtgatgtttcatctaatgttgttaagctacagctggcctcagggagtcgtaggcttcctgttattgtcttgcattggtctgctgggtcagcagtacattctaataaaggagggcatctttttgtttatggcggcgatgatatgggatctgaagaagttctcacggttcttagcctggaatcaactgctggattagaatcagtgagatgcatgtcacgaactgatctcaaacttgatggatcatttgctgatatgattcttattcctgatactggggttcctgataaaagcagaacttctgcactttttattttgacaaatcctggacagctgaatttttatgatggtggctctctattttctgtgcaaaactcaaaagagggaactcctcttcctgaagcacagaaatttccagtcgcaattcctacccttgatcccaacataacggtcactggtctttattcgctaaccgaaagtgaatttccaaatatttcactgaagaaattttgtgctaggaaaaatgctgggcatttcatatcagagaacatgaaatggcctttgactggtggggttccaaatgagatgtcactggacgaagatcatgctgttgaaagaatatacattgcaggctaccaagatggttctgtgagaatatgggatgcaacatttcctgttctaatgccaatgtttgtcttggatggaaatgttgctgatgttaatttggatggagctaatgcttctgtatcatctctagccttttgttcattaagcatgactttggctgttgggacaacaagtggtctggtgcgcatctataaactccgagaacacactgggggttcaagcttccattttgtgagtgaatttaagcaagaagttcatgttgttcatcatgggaaaggatttcattgttatgttgcctttttgtcagcaaattcctcagtgctatctctattatttatggcttcaggtggcctccttgctgcaggctatcagaatggtcaggtggcaatgcttgatccaagtcagttatcaattctattcactgtagatggtgcatcaggaacaaattctcctgttgtttccttgggcatctacagtgttgctgcatctgctgcaaaagcagatcaatcaaagaaagataatcctcaaaatgcaacgttatccagagatgttcttctttccttgacaaaggatgctcgtgttactgtacttgactgtacaacgggtgtgatgataaattcacatatcatacatcagaagcaatcatctgctatttccatgtatgtcatagatgcagagtcagacgagacacaaacccaattatcagaggacaaaattccaagtcaaggtcagacagggaaagatggcaatgatcttgacaaaatacaaacccaaggaattgaaaagcacctgaaaaatgcttcccagctttcgcaaaatggtggttcagattcactccttgtggtgtgctgcgaggatgttttgcttttgttatccctggcgtcattgattcagggaagcagcaagcatctacagaagacgaaacttgcaaaaccttgttgctggtcagcagttttcaaaaacatggatgacaaagtttgtgggctgatattagcttatcagactggcactatagaaatgaggtttgggccagatctggctattgttgctgagacctctttgatgtcattattgcgatggagttacaagacaggcatggaaaaatccacaagctcctcaaatggacaagttactttggtaaatggatctgaatttgcgattatctctcttatggcctcagagaatgacttgaggattccagaatctctgccatgccttcatgacaaagtacttgcagcagctgcggaagcagctatgagtttctcaactgatcagagaagaaagcagaatccagcagcagggattattggtggcttcattaaaggaatgaaaggcaaggctgaagaaaatgcaaaaatgagagaaagtttgacattgcgagctccaagcgaacagttggagtcaattttctcgaaagaaccatttgctgaaccttcaatacccgaccttgatgatccgatggaagaactgtcaatcgatgacatagagattgacgatgaagtagcagtagccctggcacaagcagcatcgtccacatcccaagggaataagagaacagcagtggaggaggagagagcgaagctgtttgaagggtcaaacagtgcggataaaccgagaatgagaacgcagcaggagattctaaccaaatataggtttggcggggacgccgccgccgcagctgctcatgcgaaggataagctgatgcagaggcaggagaaactggagagaattagccaacaaaccgcggagcttcagaatggagcggagaactttgcttccctggcgcaggagctcgcgaaaacaatggagaacaagaagtggtggaagctataaactgggtttgtttgtacgtatgtgtgttgttggatgccacccgtcgttgcgaattgggacacataccagcattaccatttttttgtgtccgtattaatcactttggatattctttttgtgttttggtgatgtacgtgtaaagataaaaaagagagaatgaaaggaaccctcttctcctggctatatgagcgagtctcttattcgtc

SEQ ID NO: 67631 - DNA, 3551 bp, Zea Mays
aagcagtcagcgactcacctcgtcgtcgcccggtcgccgtgcacgtagatgttcgccaagcggctcttccacagggcactcgtgcatcatcatcagggagtaggaagaggaggaggaggaggagcctcagcaccagcggcatcaccagcggatgccatccaaatggacgcgcagatctcgactcactgcggggtgccatacacagcttcactactcgccttcgatcccgtccagcgcctcctcgctgtcgcaactctggatggtaggataaaaatatttggcggtgataacattgaaggcctccttatatcaccgaagagtgtgccgtacaagtttttgcagtttattacaaaccagggacttctggttgcaatttccaatgaaaatgaaatccaggtatggaatcttgagttcaggcaactattttattcgtcacagtgggatgtcaacattactgcttttgcagtcatagagaggacctttatgatgtatcttggagatgagaatggccttctttctgtattgaagtatgatgtagatgatgggaagcttcaaataatgccatacaatgttcatatccattctctaatcgaaagatctggtgtttcgttacaggatcctcaacctattgttggaatactgatccagcctgacacttttgggacaaggttgctaattgcatatgagagagggttgttggttctttgggatgtatctgaggaccgtgcagtttctgtcagaggctatggggatttacgcatgaagggtcaaatcaatggtgctcagggggattctggtgaagatcaactaaatactactattgatgacagtgaagaagaaagagaaatttgctctctttgttgggcttcaagagagggctcaactgttgcggtgggctatataacaggtgacatacttctatgggatatgactacaaaatcctccagacaagagaagcaaagtgatgtttcatctaatgttgttaagctacagctggcctcagggagtcgtaggcttcctgttattgtcttgcattggtctgctgggtcagcagtacattctaataaaggagggcatctttttgtttatggcggcgatgatatgggatctgaagaagttctcacggttcttagcctggaatcaactgctggattagaatcagtgagatgcatgtcacgaactgatctcaaacttgatggatcatttgctgatatgattcttattcctgatactggggttcctgataaaagcagaacttctgcactttttattttgacaaatcctggacagctgaatttttatgatggtggctctctattttctgtgcaaaactcaaaagagggaactcctcttcctgaagcacagaaatttccagtcgcaattcctacccttgatcccaacataacggtcactggtctttattcgctaaccgaaagtgaatttccaaatatttcactgaagaaattttgtgctaggaaaaatgctgggcatttcatatcagagaacatgaaatggcctttgactggtggggttccaaatgagatgtcactggacgaagatcatgctgttgaaagaatatacattgcaggctaccaagatggttctgtgagaatatgggatgcaacatttcctgttctaatgccaatgtttgtcttggatggaaatgttgctgatgttaatttggatggagctaatgcttctgtatcatctctagccttttgttcattaagcatgactttggctgttgggacaacaagtggtctggtgcgcatctataaactccgagaacacactgggggttcaagcttccattttgtgagtgaatttaagcaagaagttcatgttgttcatcatgggaaaggatttcattgttatgttgcctttttgtcagcaaattcctcagtgctatctctattatttatggcttcaggtggcctccttgctgcaggctatcagaatggtcaggtggcaatgcttgatccaagtcagttatcaattctattcactgtagatggtgcatcaggaacaaattctcctgttgtttccttgggcatctacagtgttgctgcatctgctgcaaaagcagatcaatcaaagaaagataatcctcaaaatgcaacgttatccagagatgttcttctttccttgacaaaggatgctcgtgttactgtacttgactgtacaacggagtcagacgagacacaaacccaattatcagaggacaaaattccaagtcaaggtcagacagggaaagatggcaatgatcttgacaaaatacaaacccaaggaattgaaaagcacctgaaaaatgcttcccagctttcgcaaaatggtggttcagattcactccttgtggtgtgctgcgaggatgttttgcttttgttatccctggcgtcattgattcagggaagcagcaagcatctacagaagacgaaacttgcaaaaccttgttgctggtcagcagttttcaaaaacatggatgacaaagtttgtgggctgatattagcttatcagactggcactatagaaatgaggtttgggccagatctggctattgttgctgagacctctttgatgtcattattgcgatggagttacaagacaggcatggaaaaatccacaagctcctcaaatggacaagttactttggtaaatggatctgaatttgcgattatctctcttatggcctcagagaatgacttgaggattccagaatctctgccatgccttcatgacaaagtacttgcagcagctgcggaagcagctatgagtttctcaactgatcagagaagaaagcagaatccagcagcagggattattggtggcttcattaaaggaatgaaaggcaaggctgaagaaaatgcaaaaatgagagaaagtttgacattgcgagctccaagcgaacagttggagtcaattttctcgaaagaaccatttgctgaaccttcaatacccgaccttgatgatccgatggaagaactgtcaatcgatgacatagagattgacgatgaagtagcagtagccctggcacaagcagcatcgtccacatcccaagggaataagagaacagcagtggaggaggagagagcgaagctgtttgaagggtcaaacagtgcggataaaccgagaatgagaacgcagcaggagattctaaccaaatataggtttggcggggacgccgccgccgcagctgctcatgcgaaggataagctgatgcagaggcaggagaaactggagagaattagccaacaaaccgcggagcttcagaatggagcggagaactttgcttccctggcgcaggagctcgcgaaaacaatggagaacaagaagtggtggaagctataaactgggtttgtttgtacgtatgtgtgttgttggatgccacccgtcgttgcgaattgggacacataccagcattaccatttttttgtgtccgtattaatcactttggatattctttttgtgttttggtgatgtacgtgtaaagataaaaaagagagaatgaaaggaaccctcttctcctggctatatgagcgagtctcttattcgtc

SEQ ID NO: 67632 - DNA, 3687 bp, Zea Mays
cagcgactcacctcgtcgtcgcccggtcgccgtgcacgtagatgttcgccaagcggctcttccacagggcactcgtgcatcatcatcagggagtaggaagaggaggaggaggaggagcctcagcaccagcggcatcaccagcggatgccatccaaatggacgcgcagatctcgactcactgcggggtgccatacacagcttcactactcgccttcgatcccgtccagcgcctcctcgctgtcgcaactctggatggtaggataaaaatatttggcggtgataacattgaaggcctccttatatcaccgaagagtgtgccgtacaagtttttgcagtttattacaaaccagggacttctggttgcaatttccaatgaaaatgaaatccaggtatggaatcttgagttcaggcaactattttattcgtcacagtgggatgtcaacattactgcttttgcagtcatagagaggacctttatgatgtatcttggagatgagaatggccttctttctgtattgaagtatgatgtagatgatgggaagcttcaaataatgccatacaatgttcatatccattctctaatcgaaagatctggtgtttcgttacaggatcctcaacctattgttggaatactgatccagcctgacacttttgggacaaggttgctaattgcatatgagagagggttgttggttctttgggatgtatctgaggaccgtgcagtttctgtcagaggctatggggatttacgcatgaagggtcaaatcaatggtgctcagggggattctggtgaagatcaactaaatactactattgatgacagtgaagaagaaagagaaatttgctctctttgttgggcttcaagagagggctcaactgttgcggtgggctatataacaggtgacatacttctatgggatatgactacaaaatcctccagacaagagaagcaaagtgatgtttcatctaatgttgttaagctacagctggcctcagggagtcgtaggcttcctgttattgtcttgcattggtctgctgggtcagcagtacattctaataaaggagggcatctttttgtttatggcggcgatgatatgggatctgaagaagttctcacggttcttagcctggaatcaactgctggattagaatcagtgagatgcatgtcacgaactgatctcaaacttgatggatcatttgctgatatgattcttattcctgatactggggttcctgataaaagcagaacttctgcactttttattttgacaaatcctggacagctgaatttttatgatggtggctctctattttctgtgcaaaactcaaaagagggaactcctcttcctgaagcacagaaatttccagtcgcaattcctacccttgatcccaacataacggtcactggtctttattcgctaaccgaaagtgaatttccaaatatttcactgaagaaattttgtgctaggaaaaatgctgggcatttcatatcagagaacatgaaatggcctttgactggtggggttccaaatgagatgtcactggacgaagatcatgctgttgaaagaatatacattgcaggctaccaagatggttctgtgagaatatgggatgcaacatttcctgttctaatgccaatgtttgtcttggatggaaatgttgctgatgttaatttggatggagctaatgcttctgtatcatctctagccttttgttcattaagcatgactttggctgttgggacaacaagtggtctggtgcgcatctataaactccgagaacacactgggggttcaagcttccattttgtgagtgaatttaagcaagaagttcatgttgttcatcatgggaaaggatttcattgttatgttgcctttttgtcagcaaattcctcagtgctatctctattatttatggcttcaggtggcctccttgctgcaggctatcagaatggtcaggtggcaatgcttgatccaagtcagttatcaattctattcactgtagatggtgcatcaggaacaaattctcctgttgtttccttgggcatctacagtgttgctgcatctgctgcaaaagcagatcaatcaaagaaagataatcctcaaaatgcaacgttatccagagatgttcttctttccttgacaaaggatgctcgtgttactgtacttgactgtacaacgggtgtgatgataaattcacatatcatacatcagaagcaatcatctgctatttccatgtatgtcatagagtcagacgagacacaaacccaattatcagaggacaaaattccaagtcaaggtcagacagggaaagatggcaatgatcttgacaaaatacaaacccaaggaattgaaaagcacctgaaaaatgcttcccagctttcgcaaaatggtggttcagattcactccttgtggtgtgctgcgaggatgttttgcttttgttatccctggcgtcattgattcagggaagcagcaagcatctacagaagacgaaacttgcaaaaccttgttgctggtcagcagttttcaaaaacatggatgacaaagtttgtgggctgatattagcttatcagactggcactatagaaatgaggtttgggccagatctggctattgttgctgagacctctttgatgtcattattgcgatggagttacaagacaggcatggaaaaatccacaagctcctcaaatggacaagttactttggtaaatggatctgaatttgcgattatctctcttatggcctcagagaatgacttgaggattccagaatctctgccatgccttcatgacaaagtacttgcagcagctgcggaagcagctatgagtttctcaactgatcagagaagaaagcagaatccagcagcagggattattggtggcttcattaaaggaatgaaaggcaaggctgaagaaaatgcaaaaatgagagaaagtttgacattgcgagctccaagcgaacagttggagtcaattttctcgaaagaaccatttgctgaaccttcaatacccgaccttgatgatccgatggaagaactgtcaatcggttctctttctccttccttgtgcatcattttatattgagtgctcccttccctcttgacttgggagtaatgaatgcagatgacatagagattgacgatgaagtagcagtagccctggcacaagcagcatcgtccacatcccaagggaataagagaacagcagtggaggaggagagagcgaagctgtttgaagggtcaaacagtgcggataaaccgagaatgagaacgcagcaggagattctaaccaaatataggtttggcggggacgccgccgccgcagctgctcatgcgaaggataagctgatgcagaggcaggagaaactggagagaattagccaacaaaccgcggagcttcagaatggagcggagaactttgcttccctggcgcaggagctcgcgaaaacaatggagaacaagaagtggtggaagctataaactgggtttgtttgtacgtatgtgtgttgttggatgccacccgtcgttgcgaattgggacacataccagcattaccatttttttgtgtccgtattaatcactttggatattctttttgtgttttggtgatgtacgtgtaaagataaaaaagagagaatgaaaggaaccctcttctcctggctatatgagcgagtctcttattcgtc

SEQ ID NO: 67633 - DNA, 3546 bp, Zea Mays
aagcggctcttccacagggcactcggagtaggaagaggaggaggaggaggagcctcagcaccagcggcatcaccagcggatgccatccaaatggacgcgcagatctcgactcactgcggggtgccatacacagcttcactactcgccttcgatcccgtccagcgcctcctcgctgtcgcaactctggatggtaggataaaaatatttggcggtgataacattgaaggcctccttatatcaccgaagagtgtgccgtacaagtttttgcagtttattacaaaccagggacttctggttgcaatttccaatgaaaatgaaatccaggtatggaatcttgagttcaggcaactattttattcgtcacagtgggatgtcaacattactgcttttgcagtcatagagaggacctttatgatgtatcttggagatgagaatggccttctttctgtattgaagtatgatgtagatgatgggaagcttcaaataatgccatacaatgttcatatccattctctaatcgaaagatctggtgtttcgttacaggatcctcaacctattgttggaatactgatccagcctgacacttttgggacaaggttgctaattgcatatgagagagggttgttggttctttgggatgtatctgaggaccgtgcagtttctgtcagaggctatggggatttacgcatgaagggtcaaatcaatggtgctcagggggattctggtgaagatcaactaaatactactattgatgacagtgaagaagaaagagaaatttgctctctttgttgggcttcaagagagggctcaactgttgcggtgggctatataacaggtgacatacttctatgggatatgactacaaaatcctccagacaagagaagcaaagtgatgtttcatctaatgttgttaagctacagctggcctcagggagtcgtaggcttcctgttattgtcttgcattggtctgctgggtcagcagtacattctaataaaggagggcatctttttgtttatggcggcgatgatatgggatctgaagaagttctcacggttcttagcctggaatcaactgctggattagaatcagtgagatgcatgtcacgaactgatctcaaacttgatggatcatttgctgatatgattcttattcctgatactggggttcctgataaaagcagaacttctgcactttttattttgacaaatcctggacagctgaatttttatgatggtggctctctattttctgtgcaaaactcaaaagagggaactcctcttcctgaagcacagaaatttccagtcgcaattcctacccttgatcccaacataacggtcactggtctttattcgctaaccgaaagtgaatttccaaatatttcactgaagaaattttgtgctaggaaaaatgctgggcatttcatatcagagaacatgaaatggcctttgactggtggggttccaaatgagatgtcactggacgaagatcatgctgttgaaagaatatacattgcaggctaccaagatggttctgtgagaatatgggatgcaacatttcctgttctaatgccaatgtttgtcttggatggaaatgttgctgatgttaatttggatggagctaatgcttctgtatcatctctagccttttgttcattaagcatgactttggctgttgggacaacaagtggtctggtgcgcatctataaactccgagaacacactgggggttcaagcttccattttgtgagtgaatttaagcaagaagttcatgttgttcatcatgggaaaggatttcattgttatgttgcctttttgtcagcaaattcctcagtgctatctctattatttatggcttcaggtggcctccttgctgcaggctatcagaatggtggcaatgcttgatccaagtcagttatcaattctattcactgtagatggtgcatcaggaacaaattctcctgttgtttccttgggcatctacagtgttgctgcatctgctgcaaaagcagatcaatcaaagaaagataatcctcaaaatgcaacgttatccagagatgttcttctttccttgacaaaggatgctcgtgttactgtacttgactgtacaacgggtgtgatgataaattcacatatcatacatcagaagcaatcatctgctatttccatgtatgtcatagatgcagagtcagacgagacacaaacccaattatcagaggacaaaattccaagtcaaggtcagacagggaaagatggcaatgatcttgacaaaatacaaacccaaggaattgaaaagcacctgaaaaatgcttcccagctttcgcaaaatggtggttcagattcactccttgtggtgtgctgcgaggatgttttgcttttgttatccctggcgtcattgattcagggaagcagcaagcatctacagaagacgaaacttgcaaaaccttgttgctggtcagcagttttcaaaaacatggatgacaaagtttgtgggctgatattagcttatcagactggcactatagaaatgaggtttgggccagatctggctattgttgctgagacctctttgatgtcattattgcgatggagttacaagacaggcatggaaaaatccacaagctcctcaaatggacaagttactttggtaaatggatctgaatttgcgattatctctcttatggcctcagagaatgacttgaggattccagaatctctgccatgccttcatgacaaagtacttgcagcagctgcggaagcagctatgagtttctcaactgatcagagaagaaagcagaatccagcagcagggattattggtggcttcattaaaggaatgaaaggcaaggctgaagaaaatgcaaaaatgagagaaagtttgacattgcgagctccaagcgaacagttggagtcaattttctcgaaagaaccatttgctgaaccttcaatacccgaccttgatgatccgatggaagaactgtcaatcgatgacatagagattgacgatgaagtagcagtagccctggcacaagcagcatcgtccacatcccaagggaataagagaacagcagtggaggaggagagagcgaagctgtttgaagggtcaaacagtgcggataaaccgagaatgagaacgcagcaggagattctaaccaaatataggtttggcggggacgccgccgccgcagctgctcatgcgaaggataagctgatgcagaggcaggagaaactggagagaattagccaacaaaccgcggagcttcagaatggagcggagaactttgcttccctggcgcaggagctcgcgaaaacaatggagaacaagaagtggtggaagctataaactgggtttgtttgtacgtatgtgtgttgttggatgccacccgtcgttgcgaattgggacacataccagcattaccatttttttgtgtccgtattaatcactttggatattctttttgtgttttggtgatgtacgtgtaaagataaaaaagagagaatgaaaggaaccctcttctcctggctatatgagcgagtctcttattcgtc

SEQ ID NO: 67634 - DNA, 3015 bp, Zea Mays
aagcggctcttccacagggcactcggagtaggaagaggaggaggaggaggagcctcagcaccagcggcatcaccagcggatgccatccaaatggacgcgcagatctcgactcactgcggggtgccatacacagcttcactactcgccttcgatcccgtccagcgcctcctcgctgtcgcaactctggatggtaggataaaaatatttggcggtgataacattgaaggcctccttatatcaccgaagagtgtgccgtacaagtttttgcagtttattacaaaccagggacttctggttgcaatttccaatgaaaatgaaatccaggtatggaatcttgagttcaggcaactattttattcgtcacagtgggatgtcaacattactgcttttgcagtcatagagaggacctttatgatgtatcttggagatgagaatggccttctttctgtattgaagtatgatgtagatgatgggaagcttcaaataatgccatacaatgttcatatccattctctaatcgaaagatctggtgtttcgttacaggatcctcaacctattgttggaatactgatccagcctgacacttttgggacaaggttgctaattgcatatgagagagggttgttggttctttgggatgtatctgaggaccgtgcagtttctgtcagaggctatggggatttacgcatgaagggtcaaatcaatggtgctcagggggattctggtgaagatcaactaaatactactattgatgacagtgaagaagaaagagaaatttgctctctttgttgggcttcaagagagggctcaactgttgcggtgggctatataacaggtgacatacttctatgggatatgactacaaaatcctccagacaagagaagcaaagtgatgtttcatctaatgttgttaagctacagctggcctcagggagtcgtaggcttcctgttattgtcttgcattggtctgctgggtcagcagtacattctaataaaggagggcatctttttgtttatggcggcgatgatatgggatctgaagaagttctcacggttcttagcctggaatcaactgctggattagaatcagtgagatgcatgtcacgaactgatctcaaacttgatggatcatttgctgatatgattcttattcctgatactggggttcctgataaaagcagaacttctgcactttttattttgacaaatcctggacagctgaatttttatgatggtggctctctattttctgtgcaaaactcaaaagagggaactcctcttcctgaagcacagaaatttccagtcgcaattcctacccttgatcccaacataacggtcactggtctttattcgctaaccgaaagtgaatttccaaatatttcactgaagaaattttgtgctaggaaaaatgctgggcatttcatatcagagaacatgaaatggcctttgactggtggggttccaaatgagatgtcactggacgaagatcatgctgttgaaagaatatacattgcaggctaccaagatggttctgtgagaatatgggatgcaacatttcctgttctaatgccaatgtttgtcttggatggaaatgttgctgatgttaatttggatggagctaatgcttctgtatcatctctagccttttgttcattaagcatgactttggctgttgggacaacaagtggtctggtgcgcatctataaactccgagaacacactgggggttcaagcttccattttgtgagtgaatttaagcaagaagttcatgttgttcatcatgggaaaggatttcattgttatgttgcctttttgtcagcaaattcctcagtgctatctctattatttatggcttcaggtggcctccttgctgcaggctatcagaatggtcaggtggcaatgcttgatccaagtcagttatcaattctattcactgtagatggtgcatcaggaacaaattctcctgttgtttccttgggcatctacagtgttgctgcatctgctgcaaaagcagatcaatcaaagaaagataatcctcaaaatgcaacgttatccagagatgttcttctttccttgacaaaggatgctcgtgttactgtacttgactgtacaacgggtgtgatgataaattcacatatcatacatcagaagcaatcatctgctatttccatatgcagagtcagacgagacacaaacccaattatcagaggacaaaattccaagtcaaggtcagacagggaaagatggcaatgatcttgacaaaatacaaacccaaggaattgaaaagcacctgaaaaatgcttcccagctttcgcaaaatggtggttcagattcactccttgtggtgtgctgcgaggatgttttgcttttgttatccctggcgtcattgattcagggaagcagcaagcatctacagaagacgaaacttgcaaaaccttgttgctggtcagcagttttcaaaaacatggatgacaaagtttgtgggctgatattagcttatcagactggcactatagaaatgaggtttgggccagatctggctattgttgctgagacctctttgatgtcattattgcgatggagttacaagacaggcatggaaaaatccacaagctcctcaaatggacaagttactttggacgccgccgccgcagctgctcatgcgaaggataagctgatgcagaggcaggagaaactggagagaattagccaacaaaccgcggagcttcagaatggagcggagaactttgcttccctggcgcaggagctcgcgaaaacaatggagaacaagaagtggtggaagctataaactgggtttgtttgtacgtatgtgtgttgttggatgccacccgtcgttgcgaattgggacacataccagcattaccatttttttgtgtccgtattaatcactttggatattctttttgtgttttggtgatgtacgtgtaaagataaaaaagagagaatgaaaggaaccctcttctcctggctatatgagcgagtctcttattcgtc

SEQ ID NO: 67635 - DNA, 4117 bp, Zea Mays
aagcggctcttccacagggcactcggagtaggaagaggaggaggaggaggagcctcagcaccagcggcatcaccagcggatgccatccaaatggacgcgcagatctcgactcactgcggggtgccatacacagcttcactactcgccttcgatcccgtccagcgcctcctcgctgtcgcaactctggatggtaggataaaaatatttggcggtgataacattgaaggcctccttatatcaccgaagagtgtgccgtacaagtttttgcagtttattacaaaccagggacttctggttgcaatttccaatgaaaatgaaatccaggtatggaatcttgagttcaggcaactattttattcgtcacagtgggatgtcaacattactgcttttgcagtcatagagaggacctttatgatgtatcttggagatgagaatggccttctttctgtattgaagtatgatgtagatgatgggaagcttcaaataatgccatacaatgttcatatccattctctaatcgttccttttttttccacagaaagatctggtgtttcgttacaggatcctcaacctattgttggaatactgatccagcctgacacttttgggacaaggttgctaattgcatatgagagagggttgttggttctttgggatgtatctgaggaccgtgcagtttctgtcagaggctatggggatttacgcatgaagggtcaaatcaatggtgctcagggggattctggtgaagatcaactaaatactactattgatgacagtgaagaagaaagagaaatttgctctctttgttgggcttcaagagagggctcaactgttgcggtgggctatataacaggtgacatacttctatgggatatgactacaaaatcctccagacaagagaagcaaagtgatgtttcatctaatgttgttaagctacagctggcctcagggagtcgtaggcttcctgttattgtcttgcattggtctgctgggtcagcagtacattctaataaaggagggcatctttttgtttatggcggcgatgatatgggatctgaagaagttctcacggtttgcctattttttcttactcattattacaatttcttttgcttgccatcttaaaggctgctgtgcacacactattccttcttaggtttgctgctttacaaatttggtaaagtgaattcctagcttcctgaactgaaatcatggtcacctggctgtgagcctgtgacatgtgtttagtgtagagacacagtactagcttggcatggcgatagggcaacacgggtttgcatgaaacatgatcaaccatgagagtttcctgcaagtataagaactgtttcctcaggcagaacccatcttgtagacccatacaattctgaagatattttttagttcaggtctcagcagccaaataatgtatacatacctatcggaatcacttccctgaacatggaagaacataattgtttcccaaatattgcactgcagaaaactcagcctccatcaatgacaaaatagctcattctcttgcaggttcttagcctggaatcaactgctggattagaatcagtgagatgcatgtcacgaactgatctcaaacttgatggatcatttgctgatatgattcttattcctgatactggggttcctgataaaagcagaacttctgcactttttattttgacaaatcctggacagctgaatttttatgatggtggctctctattttctgtgcaaaactcaaaagagggaactcctcttcctgaagcacagaaatttccagtcgcaattcctacccttgatcccaacataacggtcactggtctttattcgctaaccgaaagtgaatttccaaatatttcactgaagaaattttgtgctaggaaaaatgctgggcatttcatatcagagaacatgaaatggcctttgactggtggggttccaaatgagatgtcactggacgaagatcatgctgttgaaagaatatacattgcaggctaccaagatggttctgtgagaatatgggatgcaacatttcctgttctaatgccaatgtttgtcttggatggaaatgttgctgatgttaatttggatggagctaatgcttctgtatcatctctagccttttgttcattaagcatgactttggctgttgggacaacaagtggtctggtgcgcatctataaactccgagaacacactgggggttcaagcttccattttgtgagtgaatttaagcaagaagttcatgttgttcatcatgggaaaggatttcattgttatgttgcctttttgtcagcaaattcctcagtgctatctctattatttatggcttcaggtggcctccttgctgcaggctatcagaatggtcaggtggcaatgcttgatccaagtcagttatcaattctattcactgtagatggtgcatcaggaacaaattctcctgttgtttccttgggcatctacagtgttgctgcatctgctgcaaaagcagatcaatcaaagaaagataatcctcaaaatgcaacgttatccagagatgttcttctttccttgacaaaggatgctcgtgttactgtacttgactgtacaacgggtgtgatgataaattcacatatcatacatcagaagcaatcatctgctatttccatgtatgtcatagatgcagagtcagacgagacacaaacccaattatcagaggacaaaattccaagtcaaggtcagacagggaaagatggcaatgatcttgacaaaatacaaacccaaggaattgaaaagcacctgaaaaatgcttcccagctttcgcaaaatggtggttcagattcactccttgtggtgtgctgcgaggatgttttgcttttgttatccctggcgtcattgattcagggaagcagcaagcatctacagaagacgaaacttgcaaaaccttgttgctggtcagcagttttcaaaaacatggatgacaaagtttgtgggctgatattagcttatcagactggcactatagaaatgaggtttgggccagatctggctattgttgctgagacctctttgatgtcattattgcgatggagttacaagacaggcatggaaaaatccacaagctcctcaaatggacaagttactttggtaaatggatctgaatttgcgattatctctcttatggcctcagagaatgacttgaggattccagaatctctgccatgccttcatgacaaagtacttgcagcagctgcggaagcagctatgagtttctcaactgatcagagaagaaagcagaatccagcagcagggattattggtggcttcattaaaggaatgaaaggcaaggctgaagaaaatgcaaaaatgagagaaagtttgacattgcgagctccaagcgaacagttggagtcaattttctcgaaagaaccatttgctgaaccttcaatacccgaccttgatgatccgatggaagaactgtcaatcggttctctttctccttccttgtgcatcattttatattgagtgctcccttccctcttgacttgggagtaatgaatgcagatgacatagagattgacgatgaagtagcagtagccctggcacaagcagcatcgtccacatcccaagggaataagagaacagcagtggaggaggagagagcgaagctgtttgaagggtcaaacagtgcggataaaccgagaatgagaacgcagcaggagattctaaccaaatataggtttggcggggacgccgccgccgcagctgctcatgcgaaggataagctgatgcagaggcaggagaaactggagagaattagccaacaaaccgcggagcttcagaatggagcggagaactttgcttccctggcgcaggagctcgcgaaaacaatggagaacaagaagtggtggaagctataaactgggtttgtttgtacgtatgtgtgttgttggatgccacccgtcgttgcgaattgggacacataccagcattaccatttttttgtgtccgtattaatcactttggatattctttttgtgttttggtgatgtacgtgtaaagataaaaaagagagaatgaaaggaaccctcttctcctggctatatgagcgagtctcttattcgtc

SEQ ID NO: 67636 - DNA, 3784 bp, Zea Mays
ctcgctccattccagctttcgatttcatccaactacctgtcgcgtcctttctgctgaaattacacaagcagctcagggagtaggaagaggaggaggaggaggagcctcagcaccagcggcatcaccagcggatgccatccaaatggacgcgcagatctcgactcactgcggggtgccatacacagcttcactactcgccttcgatcccgtccagcgcctcctcgctgtcgcaactctggatggtaggataaaaatatttggcggtgataacattgaaggcctccttatatcaccgaagagtgtgccgtacaagtttttgcagtttattacaaaccagggacttctggttgcaatttccaatgaaaatgaaatccaggtgagctattgacaggcagtgaagtttttatgcattcaaactattcgttttttttttcaaattttgggaccttggtgcctggagctcatatgttaacaacagctatgtggtggtgctcatgtgttggttcatactgcaagtatttttcattatatgctctttgaagacaacctgcgaaaaaaagtggcttgaccaacctaggaggaactacctagcccctgaaatctgtaagaatgttttctattagtgcggtggccattttatatgatatatatctgtcttgtaggtatggaatcttgagttcaggcaactattttattcgtcacagtgggatgtcaacattactgcttttgcagtcatagagaggacctttatgatgtatcttggagatgagaatggccttctttctgtattgaagtatgatgtagatgatgggaagcttcaaataatgccatacaatgttcatatccattctctaatcgaaagatctggtgtttcgttacaggatcctcaacctattgttggaatactgatccagcctgacacttttgggacaaggttgctaattgcatatgagagagggttgttggttctttgggatgtatctgaggaccgtgcagtttctgtcagaggctatggggatttacgcatgaagggtcaaatcaatggtgctcagggggattctggtgaagatcaactaaatactactattgatgacagtgaagaagaaagagaaatttgctctctttgttgggcttcaagagagggctcaactgttgcggtgggctatataacagctggcctcagggagtcgtaggcttcctgttattgtcttgcattggtctgctgggtcagcagtacattctaataaaggagggcatctttttgtttatggcggcgatgatatgggatctgaagaagttctcacggttcttagcctggaatcaactgctggattagaatcagtgagatgcatgtcacgaactgatctcaaacttgatggatcatttgctgatatgattcttattcctgatactggggttcctgataaaagcagaacttctgcactttttattttgacaaatcctggacagctgaatttttatgatggtggctctctattttctgtgcaaaactcaaaagagggaactcctcttcctgaagcacagaaatttccagtcgcaattcctacccttgatcccaacataacggtcactggtctttattcgctaaccgaaagtgaatttccaaatatttcactgaagaaattttgtgctaggaaaaatgctgggcatttcatatcagagaacatgaaatggcctttgactggtggggttccaaatgagatgtcactggacgaagatcatgctgttgaaagaatatacattgcaggctaccaagatggttctgtgagaatatgggatgcaacatttcctgttctaatgccaatgtttgtcttggatggaaatgttgctgatgttaatttggatggagctaatgcttctgtatcatctctagccttttgttcattaagcatgactttggctgttgggacaacaagtggtctggtgcgcatctataaactccgagaacacactgggggttcaagcttccattttgtgagtgaatttaagcaagaagttcatgttgttcatcatgggaaaggatttcattgttatgttgcctttttgtcagcaaattcctcagtgctatctctattatttatggcttcaggtggcctccttgctgcaggctatcagaatggtcaggtggcaatgcttgatccaagtcagttatcaattctattcactgtagatggtgcatcaggaacaaattctcctgttgtttccttgggcatctacagtgttgctgcatctgctgcaaaagcagatcaatcaaagaaagataatcctcaaaatgcaacgttatccagagatgttcttctttccttgacaaaggatgctcgtgttactgtacttgactgtacaacgggtgtgatgataaattcacatatcatacatcagaagcaatcatctgctatttccatatgcagagtcagacgagacacaaacccaattatcagaggacaaaattccaagtcaaggtcagacagggaaagatggcaatgatcttgacaaaatacaaacccaaggaattgaaaagcacctgaaaaatgcttcccagctttcgcaaaatggtggttcagattcactccttgtggtgtgctgcgaggatgttttgcttttgttatccctggcgtcattgattcagggaagcagcaagcatctacagaagacgaaacttgcaaaaccttgttgctggtcagcagttttcaaaaacatggatgacaaagtttgtgggctgatattagcttatcagactggcactatagaaatgaggtttgggccagatctggctattgttgctgagacctctttgatgtcattattgcgatggagttacaagacaggcatggaaaaatccacaagctcctcaaatggacaagttactttggtaaatggatctgaatttgcgattatctctcttatggcctcagagaatgacttgagaatctctgccatgccttcatgacaaagtacttgcagcagctgcggaagcagctatgagtttctcaactgatcagagaagaaagcagaatccagcagcagggattattggtggcttcattaaaggaatgaaaggcaaggctgaagaaaatgcaaaaatgagagaaagtttgacattgcgagctccaagcgaacagttggagtcaattttctcgaaagaaccatttgctgaaccttcaatacccgaccttgatgatccgatggaagaactgtcaatcgatgacatagagattgacgatgaagtagcagtagccctggcacaagcagcatcgtccacatcccaagggaataagagaacagcagtggaggaggagagagcgaagctgtttgaagggtcaaacagtgcggataaaccgagaatgagaacgcagcaggagattctaaccaaatataggtttggcggggacgccgccgccgcagctgctcatgcgaaggataagctgatgcagaggcaggagaaactggagagaattagccaacaaaccgcggagcttcagaatggagcggagaactttgcttccctggcgcaggagctcgcgaaaacaatggagaacaagaagtggtggaagctataaactgggtttgtttgtacgtatgtgtgttgttggatgccacccgtcgttgcgaattgggacacataccagcattaccatttttttgtgtccgtattaatcactttggatattctttttgtgttttggtgatgtacgtgtaaagataaaaaagagagaatgaaaggaaccctcttctcctggctatatgagcgagtctcttattcgtc

SEQ ID NO: 67637 - DNA, 3572 bp, Zea Mays
ctttctgctgaaattacacaagcagctcagggagtaggaagaggaggaggaggaggagcctcagcaccagcggcatcaccagcggatgccatccaaatggacgcgcagatctcgactcactgcggggtgccatacacagcttcactactcgccttcgatcccgtccagcgcctcctcgctgtcgcaactctggatggtaggataaaaatatttggcggtgataacattgaaggcctccttatatcaccgaagagtgtgccgtacaagtttttgcagtttattacaaaccagggacttctggttgcaatttccaatgaaaatgaaatccaggtatggaatcttgagttcaggcaactattttattcgtcacagtgggatgtcaacattactgcttttgcagtcatagagaggacctttatgatgtatcttggagatgagaatggccttctttctgtattgaagtatgatgtagatgatgggaagcttcaaataatgccatacaatgttcatatccattctctaatcggtacctttatgcctttcttgccaaataaagatctggtgtttcgttacaggatcctcaacctattgttggaatactgatccagcctgacacttttgggacaaggttgctaattgcatatgagagagggttgttggttctttgggatgtatctgaggaccgtgcagtttctgtcagaggctatggggatttacgcatgaagggtcaaatcaatggtgctcagggggattctggtgaagatcaactaaatactactattgatgacagtgaagaagaaagagaaatttgctctctttgttgggcttcaagagagggctcaactgttgcggtgggctatataacaggtgacatacttctatgggatatgactacaaaatcctccagacaagagaagcaaagtgatgtttcatctaatgttgttaagctacagctggcctcagggagtcgtaggcttcctgttattgtcttgcattggtctgctgggtcagcagtacattctaataaaggagggcatctttttgtttatggcggcgatgatatgggatctgaagaagttctcacggttcttagcctggaatcaactgctggattagaatcagtgagatgcatgtcacgaactgatctcaaacttgatggatcatttgctgatatgattcttattcctgatactggggttcctgataaaagcagaacttctgcactttttattttgacaaatcctggacagctgaatttttatgatggtggctctctattttctgtgcaaaactcaaaagagggaactcctcttcctgaagcacagaaatttccagtcgcaattcctacccttgatcccaacataacggtcactggtctttattcgctaaccgaaagtgaatttccaaatatttcactgaagaaattttgtgctaggaaaaatgctgggcatttcatatcagagaacatgaaatggcctttgactggtggggttccaaatgagatgtcactggacgaagatcatgctgttgaaagaatatacattgcaggctaccaagatggttctgtgagaatatgggatgcaacatttcctgttctaatgccaatgtttgtcttggatggaaatgttgctgatgttaatttggatggagctaatgcttctgtatcatctctagccttttgttcattaagcatgactttggctgttgggacaacaagtggtctggtgcgcatctataaactccgagaacacactgggggttcaagcttccattttgtgagtgaatttaagcaagaagttcatgttgttcatcatgggaaaggatttcattgttatgttgcctttttgtcagcaaattcctcagtgctatctctattatttatggcttcaggtggcctccttgctgcaggctatcagaatggtcaggtggcaatgcttgatccaagtcagttatcaattctattcactgtagatggtgcatcaggaacaaattctcctgttgtttccttgggcatctacagtgttgctgcatctgctgcaaaagcagatcaatcaaagaaagataatcctcaaaatgcaacgttatccagagatgttcttctttccttgacaaaggatgctcgtgttactgtacttgactgtacaacgggtgtgatgataaattcacatatcatacatcagaagcaatcatctgctatttccatatgcagagtcagacgagacacaaacccaattatcagaggacaaaattccaagtcaaggtcagacagggaaagatggcaatgatcttgacaaaatacaaacccaaggaattgaaaagcacctgaaaaatgcttcccagctttcgcaaaatggtggttcagattcactccttgtggtgtgctgcgaggatgttttgcttttgttatccctggcgtcattgattcagggaagcagcaagcatctacagaagacgaaacttgcaaaaccttgttgctggtcagcagttttcaaaaacatggatgacaaagtttgtgggctgatattagcttatcagactggcactatagaaatgaggtttgggccagatctggctattgttgctgagacctctttgatgtcattattgcgatggagttacaagacaggcatggaaaaatccacaagctcctcaaatggacaagttactttggtaaatggatctgaatttgcgattatctctcttatggcctcagagaatgacttgaggattccagaatctctgccatgccttcatgacaaagtacttgcagcagctgcggaagcagctatgagtttctcaactgatcagagaagaaagcagaatccagcagcagggattattggtggcttcattaaaggaatgaaaggcaaggctgaagaaaatgcaaaaatgagagaaagtttgacattgcgagctccaagcgaacagttggagtcaattttctcgaaagaaccatttgctgaaccttcaatacccgaccttgatgatccgatggaagaactgtcaatcgatgacatagagattgacgatgaagtagcagtagccctggcacaagcagcatcgtccacatcccaagggaataagagaacagcagtggaggaggagagagcgaagctgtttgaagggtcaaacagtgcggataaaccgagaatgagaacgcagcaggagattctaaccaaatataggtttggcggggacgccgccgccgcagctgctcatgcgaaggataagctgatgcagaggcaggagaaactggagagaattagccaacaaaccgcggagcttcagaatggagcggagaactttgcttccctggcgcaggagctcgcgaaaacaatggagaacaagaagtggtggaagctataaactgggtttgtttgtacgtatgtgtgttgttggatgccacccgtcgttgcgaattgggacacataccagcattaccatttttttgtgtccgtattaatcactttggatattctttttgtgttttggtgatgtacgtgtaaagataaaaaagagagaatgaaaggaaccctcttctcctggctatatgagcgagtctcttattcgtc

SEQ ID NO: 67638 - DNA, 1380 bp, Zea Mays
agcaatcatctgctatttccatagtcagacgagacacaaacccaattatcagaggacaaaattccaagtcaaggtcagacagggaaagatggcaatgatcttgacaaaatacaaacccaaggaattgaaaagcacctgaaaaatgcttcccagctttcgcaaaatggtggttcagattcactccttgtggtgtgctgcgaggatgttttgcttttgttatccctggcgtcattgattcagcagcaagcatctacagaagacgaaacttgcaaaaccttgttgctggtcagcagttttcaaaaacatggatgacaaagtttgtgggctgatattagcttatcagactggcactatagaaatgaggtttgggccagatctggctattgttgctgagacctctttgatgtcattattgcgatggagttacaagacaggcatggaaaaatccacaagctcctcaaatggacaagttactttggtaaatggatctgaatttgcgattatctctcttatggcctcagagaatgacttgaggattccagaatctctgccatgccttcatgacaaagtacttgcagcagctgcggaagcagctatgagtttctcaactgatcagagaagaaagcagaatccagcagcagggattattggtggcttcattaaaggaatgaaaggcaaggctgaagaaaatgcaaaaatgagagaaagtttgacattgcgagctccaagcgaacagttggagtcaattttctcgaaagaaccatttgctgaaccttcaatacccgaccttgatgatccgatggaagaactgtcaatcgatgacatagagattgacgatgaagtagcagtagccctggcacaagcagcatcgtccacatcccaagggaataagagaacagcagtggaggaggagagagcgaagctgtttgaagggtcaaacagtgcggataaaccgagaatgagaacgcagcaggagattctaaccaaatataggtttggcggggacgccgccgccgcagctgctcatgcgaaggataagctgatgcagaggcaggagaaactggagagaattagccaacaaaccgcggagcttcagaatggagcggagaactttgcttccctggcgcaggagctcgcgaaaacaatggagaacaagaagtggtggaagctataaactgggtttgtttgtacgtatgtgtgttgttggatgccacccgtcgttgcgaattgggacacataccagcattaccatttttttgtgtccgtattaatcactttggatattctttttgtgttttggtgatgtacgtgtaaagataaaaaagagagaatgaaaggaaccctcttctcctggctatatgagcgagtctcttattcgtc

SEQ ID NO: 67639 - DNA, 1013 bp, Zea Mays
caccaccgacatgattcgacgccttcttttccaggtaaatggatctgaatttgcgattatctctcttatggcctcagagaatgacttgaggattccagaatctctgccatgccttcatgacaaagtacttgcagcagctgcggaagcagctatgagtttctcaactgatcagagaagaaagcagaatccagcagcagggattattggtggcttcattaaaggaatgaaaggcaaggctgaagaaaatgcaaaaatgagagaaagtttgacattgcgagctccaagcgaacagttggagtcaattttctcgaaagaaccatttgctgaaccttcaatacccgaccttgatgatccgatggaagaactgtcaatcggttctctttctccttccttgtgcatcattttatattgagtgctcccttccctcttgacttgggagtaatgaatgcagatgacatagagattgacgatgaagtagcagtagccctggcacaagcagcatcgtccacatcccaagggaataagagaacagcagtggaggaggagagagcgaagctgtttgaagggtcaaacagtgcggataaaccgagaatgagaacgcagcaggagattctaaccaaatataggtttggcggggacgccgccgccgcagctgctcatgcgaaggataagctgatgcagaggcaggagaaactggagagaattagccaacaaaccgcggagcttcagaatggagcggagaactttgcttccctggcgcaggagctcgcgaaaacaatggagaacaagaagtggtggaagctataaactgggtttgtttgtacgtatgtgtgttgttggatgccacccgtcgttgcgaattgggacacataccagcattaccatttttttgtgtccgtattaatcactttggatattctttttgtgttttggtgatgtacgtgtaaagataaaaaagagagaatgaaaggaaccctcttctcctggctatatgagcgagtctcttattcgtc

SEQ ID NO: 67640 - DNA, 5734 bp, Zea Mays
ctctctttccgcttccaatacctgtgtcaagcggtctagtaggaacaaaagcaagcaacagatggttatggctgtgtatgcttgagcaggaataaagggggaacaagcaacaaggaagcactgaccaacagtcatccagtccggggtgcggatggtgcacttgctacgcttcttgagcgcgacagcgagccagagaggcaccttggtgggaatctgggggaagaagggcccgaaatccccctgcacggcggcggcggcggcagcagcagcagcgtgagatgtaagaacaggtgggggatggggagttgaaagagatggaaatgggtggcggcggcagacgcacgcagatcatgttgagggcgtccatgcggatgttggggacgatttcgacaatctcatcctcagccacgaactccacctgcagcacagacaggacaggtccaaacattccctttgacgaagatagtctagtccctgcctgtgattgtggaagggatggggttggttacctcggagggcgagaagatggagaggtgcgggtcggactgccccgccatgaatgccccccactggaacgccgggactcgtgagagagagcaatggaggcgctgctgcgggtcggaggcggcgaggcgagagcgaggtcgacggagagaggaggctacaggtcgctgggactctctaaactacagcccaatctgagtgcccgaaagcccatccaacaacagagcccaacagccgcttcacgcagcttcagttcgatttggtcgggtcgcggcagcgcacggcgggtgaggcagcggcgaggcggggcggcggggcgccgcggttgcctttctcgctgctcctgcagtcctgctcgctcagcgccgggacccgggagaggttattagggtttccttctcatcaactttagccccagcagcaacacagccagcagaagagggcgggcccgatgctggccgcccggaacccccctccgccgccccatgacatcgccgcgcgcctccaccacctgcgcgacctccgcagggtgccgctccccaaccgcgtcgcgcgcatcgccgacctccacaccgatgaggccagccccgtgcgcaagcttgttgccgagatcatcggtgagcttgggtcaaaacacatgaggtatctacctgatatgatcccttgtttgctgcaccttctgaatgatgagacgcctgcagtcgtcaggcaagctgttaagacaggaaccaacttgtttgccaaagtactccaaaagctagctatccagggtttattctccaatggagggattgatgatgcacttaaatcatcatgggaatggctgctcaagttcaaatcaggtgtctcgcacatggcatttcaggccaccggcaatgaaggtgtcaggttactggctattaagtttgttgaaaaaacagttcttatgtacacaccagatcctgatgtcccatctgatccgccaactgaaacaacagaagatatggcattcaatgtagcttggttacgaggaggtcaccctttgcttaatgttggggatctggccatggaagccagccagagtcttggattgttgctagagcagctcaagtctcctaaagtaaagtcactcagtacttccatgatcattgtcttcgttactagtctctcagctattgcccaaagaaggccttcattttatggacgcatattgccagttttactttccttggatccagcaagttctattattaaattgagagtcccgggcgcattccatgccttgaagagtgccttctctgcatgcctgaaatgcacacattcaagtgctgagccgtggcgagcacgcctattggaagctcaaaatattatcaaccaagggggttcaatagaagatgcagcaaatgctgctaagaatttcggggacacttcaaacagggaagaatcgtggcctctgatggagagaagcactgacggtagtaacaagcgtagtctggctgaagacatgaatcatgtgacagaggatgatgtccactccactaaaagagccaggcaatcaattgatgctaatgaacatagtgaagaggcaaacaagacaaattttgagtcgatgtctgttgatatctcatctagccagcccagctctataagaactgggaattcagaagctgtgtatcaattaattggtatgtttgctgcactagctgcacaaggtgacagagcagctggatcactgcaaatcctttcatacagtatcgctagtgacttactagcggaggtggtaatggttaacatgcaacatctcccaatctctcgtcctgaagttgaccaacagcagcttccttctacgagctctggagatggacttccactttcaagtttctcctctctgctggggattctgctgaagggagcgaaccaaattgatcaagatgaagtgtctccagctaaagaacctgcgctggtgtcgtcagttgcagatgacagaatgatacttcctgctaattcacctgttcctagctcagtaaatctacctatcgaagagaacagtaacagtccaacagttccattatgtatagaaacaacagaggccaaagtaaccagtgcaggtggcaatagttcgattgatattccagaatcatcagaagcttcccatgcctcaacagagccccagggaacccaagagcatgctagcacttttgccggtccatttcctgctgataatttctcagttggatttagtttggcacaatcgtcagaaactcgcagcccaagctcttctacattggaagcaaaccactcacagctttcatcccttagttcacaatatgttcttccaaagttggttgtcaataatattgatctcagtgatgaggccaaagatctccttcaaaaagaggcgtttgtgcggattcttgagagtgataagaaagaagcatctggtggttcaattgctcgccttccgttgcttgctcacctgggtgttgagtttcctctggaatttgatccttgggtgattcttcaaaagcacattctctctgattatgcgaataatgaggggcacgagttgactatatgcatcctgaaccggctatatcatgaggcagagcaggatcacgatttcctttcatctagaactgctacatcagtttacgaatcctttcttctaaacatagctgaaaatcttcgagacatgtttccagcttcagataagtcacttggcaaattgctttgtgagataccatacttaccagaaggtgtgctgaaactgcttgaaagtttatgttctcctggaagtaatgagaggcaggacaaggatattcagagtggtgatagggtaactcaaggtctcagtgctgtctggaaccttatcatgctaagaccttcaaatcgggacagatgtctggagattgctttgcagagttcaactcatcatctagaggaggtccgcatgaaggcaatacgtttggtggcaaataagttatttcctatgacaagcatttccaaaaagattgaagattttgcaaatgaaaaacttaattcagtgctggaaatgactccatctggtgattgtgtaactactgaaatggctacacctgaagcacacaaagatattggtttagaaaacttaacagcttcagtaacaggcatgcagactctgatgtctctatactttgcattgtgcaccaagaaacattcccttctcagacatgtatttgcaatatatggtaatctaccgcaagctgccaagcaggcagttcatcaacaagtaccaattctgatacgcactataggctcctcctctgatcttcttggaatcatctcagatccaccagctgactgccgggacctcctcatgcaggttttacaaaccctcactgatgctgcggttccatctaaagatctgatttcttccataaagatcttatattctaaaacaaaggatgttgagttcctttttgcaatcttggttcatctaccaaaagatgaggtcctgcctgtgttccccagtattgttaatcttccaatagacaagtttcaaagtgccatttcccgaatcttgcagggatcacctcggaatggcccttcacttgatccatcagaaattttaattgcaattcatgtaatagctcctgataaggaaggaataccactcaaaaaggttatggatgcatgctcttcttgctttgagcaaagaacaatatttacccagcaagttctggcaaaagcactaaatcaactggttgaacagattcctcttcctttgctattcatgaggactgtcatgcaagcaataggtgtttttcctgcattggtggattttgtgatggagatcatgtcacgccttgtgagcaagcagatttggaaatatcccaagttatgggtaggatttctgaagtgtgctatcttgacaaaacctcagtcatatggtgtgttgctgcagttaccagctcctcaacttgagaatgccttgagtaagaacccgacactgaagacgcccttggctgagcatgccgagcagccaaatattcggtcgacacttccaaggtctactttggtggttctgggtcttgctgaagatcaaccacagcaaccagcagtaacacaggtgcagagcagccaaaaccaggctgcggaaaccagtagctctgctgctgatacggctacagaagtaactcaggaatcttctggtgctagctaacatcttttatgccgaaatgggctaatgcttgcaggttgtgtaccatatgtctcttgagggtctaagatgtgtttttctgtgtgatgcgtctcattggacgggtgttagctgctgcatctggacgcctaaatgagaactaagttatttagttgctgggggtaattctaattttcggtggtgcacagggaccattgtaaagtaaagaggttaacattatatatcatccttaaataggaaaagggcaaacaagtgtttgttgaagctgtagctcaaacagtccctacttattccatgagttgtttcaggctaccaagggggctggctatgtcaagcaaccaatgcaatgattcgaaaattttagtggagcagtaaggaagggaagagattctaaatttaggggactacgttttcttgatgtagccctatgaattagaccgccacaaatgtggagagctatacttgatggacttgacgttcttcagcaaccccaagggatggagctttatggccaacccccccagatgtgttagtgaattaatagaagatggtatatctatgaaatggcgacttgacgtgattcaaaagtacttatataatatggatgctaagatatattcctttatatatgtcggcaagatgattttttttttgcacgacatcgtaaaagatgtggtatattctctgttgaatctgattacagaatgcttgtttataatcagaatcaaatacaggattggctggatggcagagtagatacttcagataatgaagccggtgaagttcttaaagaaaggtcaatgagtcgatgaaagtgggttcaatataggccaatttgatgaacacaggcattgaattatactagattaggctgctgaatagcgtaatacctacatccatttaggtgtgttttcttgttagcgtgctattgtaatgtctatattgtaatgggtctcgacccaccaaactttgttatattaatgcactcccaatcttgattaggattagggttttcaatatgttataaagctagattctctcttccccctttca

SEQ ID NO: 67641 - DNA, 4792 bp, Zea Mays
cggcagcagcagcagcgtgagatgtaagaacaggtgggggatggggagttgaaagagatggaaatgggtggcggcggcagacgcacgcagatcatgttgagggcgtccatgcggatgttggggacgatttcgacaatctcatcctcagccacgaactccacctgcagcacagacaggacaggtccaaacattccctttgacgaagatagtctagtccctgcctgtgattgtggaagggatggggttggttacctcggagggcgagaagatggagaggtgcgggtcggactgccccgccatgaatgccccccactggaacgccgggactcgtgagagagagcaatggaggcgctgctgcgggtcggaggcggcgaggcgagagcgaggtcgacggagagaggaggctacaggtcgctgggactctctaaactacagcccaatctgagtgcccgaaagcccatccaacaacagagcccaacagccgcttcacgcagcttcagttcgatttggtcgggtcgcggcagcgcacggcgggtgaggcagcggcgaggcggggcggcggggcgccgcggttgcctttctcgctgctcctgcagtcctgctcgctcagcgccgggacccgggagaggttattagggtttccttctcatcaactttagccccagcagcaacacagccagcagaagagggcgggcccgatgctggccgcccggaacccccctccgccgccccatgacatcgccgcgcgcctccaccacctgcgcgacctccgcagggtgccgctccccaaccgcgtcgcgcgcatcgccgacctccacaccgatgaggccagccccgtgcgcaagcttgttgccgagatcatcggtgagcttgggtcaaaacacatgaggtatctacctgatatgatcccttgtttgctgcaccttctgaatgatgagacgcctgcagtcgtcaggcaagctgttaagacaggaaccaacttgtttgccaaagtactccaaaagctagctatccagggtttattctccaatggagggattgatgatgcacttaaatcatcatgggaatggctgctcaagttcaaatcaggtgtctcgcacatggcatttcaggccaccggcaatgaaggtgtcaggttactggctattaagtttgttgaaaaaacagttcttatgtacacaccagatcctgatgtcccatctgatccgccaactgaaacaacagaagatatggcattcaatgtagcttggttacgaggaggtcaccctttgcttaatgttggggatctggccatggaagccagccagagtcttggattgttgctagagcagctcaagtctcctaaagtaaagtcactcagtacttccatgatcattgtcttcgttactagtctctcagctattgcccaaagaaggccttcattttatggacgcatattgccagttttactttccttggatccagcaagttctattattaaattgagagtcccgggcgcattccatgccttgaagagtgccttctctgcatgcctgaaatgcacacattcaagtgctgagccgtggcgagcacgcctattggaagctcaaaatattatcaaccaagggggttcaatagaagatgcagcaaatgctgctaagaatttcggggacacttcaaacagggaagaatcgtggcctctgatggagagaagcactgacggtagtaacaagcgtagtctggctgaagacatgaatcatgtgacagaggatgatgtccactccactaaaagagccaggcaatcaattgatgctaatgaacatagtgaagaggcaaacaagacaaattttgagtcgatgtctgttgatatctcatctagccagcccagctctataagaactgggaattcagaagctgtgtatcaattaattggtatgtttgctgcactagctgcacaaggtgacagagcagctggatcactgcaaatcctttcatacagtatcgctagtgacttactagcggaggtggtaatggttaacatgcaacatctcccaatctctcgtcctgaagttgaccaacagcagcttccttctacgagctctggagatggacttccactttcaagtttctcctctctgctggggattctgctgaagggagcgaaccaaattgatcaagatgaagtgtctccagctaaagaacctgcgctggtgtcgtcagttgcagatgacagaatgatacttcctgctaattcacctgttcctagctcagtaaatctacctatcgaagagaacagtaacagtccaacagttccattatgtatagaaacaacagaggccaaagtaaccagtgcaggtggcaatagttcgattgatattccagaatcatcagaagcttcccatgcctcaacagagccccagggaacccaagagcatgctagcacttttgccggtccatttcctgctgataatttctcagttggatttagtttggcacaatcgtcagaaactcgcagcccaagctcttctacattggaagcaaaccactcacagctttcatcccttagttcacaatatgttcttccaaagttggttgtcaataatattgatctcagtgatgaggccaaagatctccttcaaaaagaggcgtttgtgcggattcttgagagtgataagaaagaagcatctggtggttcaattgctcgccttccgttgcttgctcacctgggtgttgagtttcctctggaatttgatccttgggtgattcttcaaaagcacattctctctgattatgcgaataatgaggggcacgagttgactatatgcatcctgaaccggctatatcatgaggcagagcaggatcacgatttcctttcatctagaactgctacatcagtttacgaatcctttcttctaaacatagctgaaaatcttcgagacatgtttccagcttcagataagtcacttggcaaattgctttgtgagataccatacttaccagaaggtgtgctgaaactgcttgaaagtttatgttctcctggaagtaatgagaggcaggacaaggatattcagagtggtgatagggtaactcaaggtctcagtgctgtctggaaccttatcatgctaagaccttcaaatcgggacagatgtctggagattgctttgcagagttcaactcatcatctagaggaggtccgcatgaaggcaatacgtttggtggcaaataagttatttcctatgacaagcatttccaaaaagattgaagattttgcaaatgaaaaacttaattcagtgctggaaatgactccatctggtgattgtgtaactactgaaatggctacacctgaagcacacaaagatattggtttagaaaacttaacagcttcagtaacaggcatgcagactctgatgtctctatactttgcattgtgcaccaagaaacattcccttctcagacatgtatttgcaatatatggtaatctaccgcaagctgccaagcaggcagttcatcaacaagtaccaattctgatacgcactataggctcctcctctgatcttcttggaatcatctcagatccaccagctgactgccgggacctcctcatgcaggttttacaaaccctcactgatgctgcggttccatctaaagatctgatttcttccataaagatcttatattctaaaacaaaggatgttgagttcctttttgcaatcttggttcatctaccaaaagatgaggtcctgcctgtgttccccagtattgttaatcttccaatagacaagtttcaaagtgccatttcccgaatcttgcagggatcacctcggaatggcccttcacttgatccatcagaaattttaattgcaattcatgtaatagctcctgataaggaaggaataccactcaaaaaggttatggatgcatgctcttcttgctttgagcaaagaacaatatttacccagcaagttctggcaaaagcactaaatcaactggttgaacagattcctcttcctttgctattcatgaggactgtcatgcaagcaataggtgtttttcctgcattggtggattttgtgatggagatcatgtcacgccttgtgagcaagcagatttggaaatatcccaagttatgggtaggatttctgaagtgtgctatcttgacaaaacctcagtcatatggtgtgttgctgcagttaccagctcctcaacttgagaatgccttgagtaagaacccgacactgaagacgcccttggctgagcatgccgagcagccaaatattcggtcgacacttccaaggtctactttggtggttctgggtcttgctgaagatcaaccacagcaaccagcagtaacacaggtgcagagcagccaaaaccaggctgcggaaaccagtagctctgctgctgatacggctacagaagtaactcaggaatcttctggtgctagctaacatcttttatgccgaaatgggctaatgcttgcagaatcaaatacaggattggctggatggcagagtagatacttcagataatgaagccggtgaagttcttaaagaaaggtcaatgagtcgatgaaagtgggttcaatataggccaatttgatgaacacaggcattgaattatactagattaggctgctgaatagcgtaatacctacatccatttaggtgtgttttcttgttagcgtgctattgtaatgtctatattgtaatgggtctcgacccaccaaactttgttatattaatgcactcccaatcttgattaggattagggttttcaatatgttataaagctagattctctcttccccctttca

SEQ ID NO: 67642 - DNA, 5467 bp, Zea Mays
cagcagcagcgtgagatgtaagaacaggtgggggatggggagttgaaagagatggaaatgggtggcggcggcagacgcacgcagatcatgttgagggcgtccatgcggatgttggggacgatttcgacaatctcatcctcagccacgaactccacctgcagcacagacaggacaggtccaaacattccctttgacgaagatagtctagtccctgcctgtgattgtggaagggatggggttggttacctcggagggcgagaagatggagaggtgcgggtcggactgccccgccatgaatgccccccactggaacgccgggactcgtgagagagagcaatggaggcgctgctgcgggtcggaggcggcgaggcgagagcgaggtcgacggagagaggaggctacaggtcgctgggactctctaaactacagcccaatctgagtgcccgaaagcccatccaacaacagagcccaacagccgcttcacgcagcttcagttcgatttggtcgggtcgcggcagcgcacggcgggtgaggcagcggcgaggcggggcggcggggcgccgcggttgcctttctcgctgctcctgcagtcctgctcgctcagcgccgggacccgggagaggttattagggtttccttctcatcaactttagccccagcagcaacacagccagcagaagagggcgggcccgatgctggccgcccggaacccccctccgccgccccatgacatcgccgcgcgcctccaccacctgcgcgacctccgcagggtgccgctccccaaccgcgtcgcgcgcatcgccgacctccacaccgatgaggccagccccgtgcgcaagcttgttgccgagatcatcggtgagcttgggtcaaaacacatgaggtatctacctgatatgatcccttgtttgctgcaccttctgaatgatgagacgcctgcagtcgtcaggcaagctgttaagacaggaaccaacttgtttgccaaagtactccaaaagctagctatccagggtttattctccaatggagggattgatgatgcacttaaatcatcatgggaatggctgctcaagttcaaatcaggtgtctcgcacatggcatttcaggccaccggcaatgaaggtgtcaggttactggctattaagtttgttgaaaaaacagttcttatgtacacaccagatcctgatgtcccatctgatccgccaactgaaacaacagaagatatggcattcaatgtagcttggttacgaggaggtcaccctttgcttaatgttggggatctggccatggaagccagccagagtcttggattgttgctagagcagctcaagtctcctaaagtaaagtcactcagtacttccatgatcattgtcttcgttactagtctctcagctattgcccaaagaaggccttcattttatggacgcatattgccagttttactttccttggatccagcaagttctattattaaattgagagtcccgggcgcattccatgccttgaagagtgccttctctgcatgcctgaaatgcacacattcaagtgctgagccgtggcgagcacgcctattggaagctcaaaatattatcaaccaagggggttcaatagaagatgcagcaaatgctgctaagaatttcggggacacttcaaacagggaagaatcgtggcctctgatggagagaagcactgacggtagtaacaagcgtagtctggctgaagacatgaatcatgtgacagaggatgatgtccactccactaaaagagccaggcaatcaattgatgctaatgaacatagtgaagaggcaaacaagacaaattttgagtcgatgtctgttgatatctcatctagccagcccagctctataagaactgggaattcagaagctgtgtatcaattaattggtatgtttgctgcactagctgcacaaggtgacagagcagctggatcactgcaaatcctttcatacagtatcgctagtgacttactagcggaggtggtaatggttaacatgcaacatctcccaatctctcgtcctgaagttgaccaacagcagcttccttctacgagctctggagatggacttccactttcaagtttctcctctctgctggggattctgctgaagggagcgaaccaaattgatcaagatgaagtgtctccagctaaagaacctgcgctggtgtcgtcagttgcagatgacagaatgatacttcctgctaattcacctgttcctagctcagtaaatctacctatcgaagagaacagtaacagtccaacagttccattatgtatagaaacaacagaggccaaagtaaccagtgcaggtggcaatagttcgattgatattccagaatcatcagaagcttcccatgcctcaacagagccccagggaacccaagagcatgctagcacttttgccggtccatttcctgctgataatttctcagttggatttagtttggcacaatcgtcagaaactcgcagcccaagctcttctacattggaagcaaaccactcacagctttcatcccttagttcacaatatgttcttccaaagttggttgtcaataatattgatctcagtgatgaggccaaagatctccttcaaaaagaggcgtttgtgcggattcttgagagtgataagaaagaagcatctggtggttcaattgctcgccttccgttgcttgctcacctgggtgttgagtttcctctggaatttgatccttgggtgattcttcaaaagcacattctctctgattatgcgaataatgaggggcacgagttgactatatgcatcctgaaccggctatatcatgaggcagagcaggatcacgatttcctttcatctagaactgctacatcagtttacgaatcctttcttctaaacatagctgaaaatcttcgagacatgtttccagcttcagataagtcacttggcaaattgctttgtgagataccatacttaccagaaggtgtgctgaaactgcttgaaagtttatgttctcctggaagtaatgagaggcaggacaaggatattcagagtggtgatagggtaactcaaggtctcagtgctgtctggaaccttatcatgctaagaccttcaaatcgggacagatgtctggagattgctttgcagagttcaactcatcatctagaggaggtccgcatgaaggcaatacgtttggtggcaaataagttatttcctatgacaagcatttccaaaaagattgaagattttgcaaatgaaaaacttaattcagtgctggaaatgactccatctggtgattgtgtaactactgaaatggctacacctgaagcacacaaagatattggtttagaaaacttaacagcttcagtaacaggcatgcagactctgatgtctctatactttgcattgtgcaccaagaaacattcccttctcagacatgtatttgcaatatatggtaatctaccgcaagctgccaagcagttcatcaacaagtaccaattctgatacgcactataggctcctcctctgatcttcttggaatcatctcagatccaccagctgactgccgggacctcctcatgcaggttttacaaaccctcactgatgctgcggttccatctaaagatctgatttcttccataaagatcttatattctaaaacaaaggatgttgagttcctttttgcaatcttggttcatctaccaaaagatgaggtcctgcctgtgttccccagtattgttaatcttccaatagacaagtttcaaagtgccatttcccgaatcttgcagggatcacctcggaatggcccttcacttgatccatcagaaattttaattgcaattcatgtaatagctcctgataaggaaggaataccactcaaaaaggttatggatgcatgctcttcttgctttgagcaaagaacaatatttacccagcaagttctggcaaaagcactaaatcaactggttgaacagattcctcttcctttgctattcatgaggactgtcatgcaagcaataggtgtttttcctgcattggtggattttgtgatggagatcatgtcacgccttgtgagcaagcagatttggaaatatcccaagttatgggtaggatttctgaagtgtgctatcttgacaaaacctcagtcatatggtgtgttgctgcagttaccagctcctcaacttgagaatgccttgagtaagaacccgacactgaagacgcccttggctgagcatgccgagcagccaaatattcggtcgacacttccaaggtctactttggtggttctgggtcttgctgaagatcaaccacagcaaccagcagtaacacaggtgcagagcagccaaaaccaggctgcggaaaccagtagctctgctgctgatacggctacagaagtaactcaggaatcttctggtgctagctaacatcttttatgccgaaatgggctaatgcttgcaggttgtgtaccatatgtctcttgagggtctaagatgtgtttttctgtgtgatgcgtctcattggacgggtgttagctgctgcatctggacgcctaaatgagaactaagttatttagttgctgggggtaattctaattttcggtggtgcacagggaccattgtaaagtaaagaggttaacattatatatcatccttaaataggaaaagggcaaacaagtgtttgttgaagctgtagctcaaacagtccctacttattccatgagttgtttcaggctaccaagggggctggctatgtcaagcaaccaatgcaatgattcgaaaattttagtggagcagtaaggaagggaagagattctaaatttaggggactacgttttcttgatgtagccctatgaattagaccgccacaaatgtggagagctatacttgatggacttgacgttcttcagcaaccccaagggatggagctttatggccaacccccccagatgtgttagtgaattaatagaagatggtatatctatgaaatggcgacttgacgtgattcaaaagtacttatataatatggatgctaagatatattcctttatatatgtcggcaagatgattttttttttgcacgacatcgtaaaagatgtggtatattctctgttgaatctgattacagaatgcttgtttataatcagaatcaaatacaggattggctggatggcagagtagatacttcagataatgaagccggtgaagttcttaaagaaaggtcaatgagtcgatgaaagtgggttcaatataggccaatttgatgaacacaggcattgaattatactagattaggctgctgaatagcgtaatacctacatccatttaggtgtgttttcttgttagcgtgctattgtaatgtctatattgtaatgggtctcgacccaccaaactttgttatattaatgcactcccaatcttgattaggattagggttttcaatatgttataaagctagattctctcttccccctttca

SEQ ID NO: 67643 - DNA, 4732 bp, Zea Mays
ttgaaagagatggaaatgggtggcggcggcagacgcacgcagatcatgttgagggcgtccatgcggatgttggggacgatttcgacaatctcatcctcagccacgaactccacctgcagcacagacaggacaggtccaaacattccctttgacgaagatagtctagtccctgcctgtgattgtggaagggatggggttggttacctcggagggcgagaagatggagaggtgcgggtcggactgccccgccatgaatgccccccactggaacgccgggactcgtgagagagagcaatggaggcgctgctgcgggtcggaggcggcgaggcgagagcgaggtcgacggagagaggaggctacaggtcgctgggactctctaaactacagcccaatctgagtgcccgaaagcccatccaacaacagagcccaacagccgcttcacgcagcttcagttcgatttggtcgggtcgcggcagcgcacggcgggtgaggcagcggcgaggcggggcggcggggcgccgcggttgcctttctcgctgctcctgcagtcctgctcgctcagcgccgggacccgggagaggttattagggtttccttctcatcaactttagccccagcagcaacacagccagcagaagagggcgggcccgatgctggccgcccggaacccccctccgccgccccatgacatcgccgcgcgcctccaccacctgcgcgacctccgcagggtgccgctccccaaccgcgtcgcgcgcatcgccgacctccacaccgatgaggccagccccgtgcgcaagcttgttgccgagatcatcggtgagcttgggtcaaaacacatgaggtatctacctgatatgatcccttgtttgctgcaccttctgaatgatgagacgcctgcagtcgtcaggcaagctgttaagacaggaaccaacttgtttgccaaagtactccaaaagctagctatccagggtttattctccaatggagggattgatgatgcacttaaatcatcatgggaatggctgctcaagttcaaatcaggtgtctcgcacatggcatttcaggccaccggcaatgaaggtgtcaggttactggctattaagtttgttgaaaaaacagttcttatgtacacaccagatcctgatgtcccatctgatccgccaactgaaacaacagaagatatggcattcaatgtagcttggttacgaggaggtcaccctttgcttaatgttggggatctggccatggaagccagccagagtcttggattgttgctagagcagctcaagtctcctaaagtaaagtcactcagtacttccatgatcattgtcttcgttactagtctctcagctattgcccaaagaaggccttcattttatggacgcatattgccagttttactttccttggatccagcaagttctattattaaattgagagtcccgggcgcattccatgccttgaagagtgccttctctgcatgcctgaaatgcacacattcaagtgctgagccgtggcgagcacgcctattggaagctcaaaatattatcaaccaagggggttcaatagaagatgcagcaaatgctgctaagaatttcggggacacttcaaacagggaagaatcgtggcctctgatggagagaagcactgacggtagtaacaagcgtagtctggctgaagacatgaatcatgtgacagaggatgatgtccactccactaaaagagccaggcaatcaattgatgctaatgaacatagtgaagaggcaaacaagacaaattttgagtcgatgtctgttgatatctcatctagccagcccagctctataagaactgggaattcagaagctgtgtatcaattaattggtatgtttgctgcactagctgcacaaggtgacagagcagctggatcactgcaaatcctttcatacagtatcgctagtgacttactagcggaggtggtaatggttaacatgcaacatctcccaatctctcgtcctgaagttgaccaacagcagcttccttctacgagctctggagatggacttccactttcaagtttctcctctctgctggggattctgctgaagggagcgaaccaaattgatcaagatgaagtgtctccagctaaagaacctgcgctggtgtcgtcagttgcagatgacagaatgatacttcctgctaattcacctgttcctagctcagtaaatctacctatcgaagagaacagtaacagtccaacagttccattatgtatagaaacaacagaggccaaagtaaccagtgcaggtggcaatagttcgattgatattccagaatcatcagaagcttcccatgcctcaacagagccccagggaacccaagagcatgctagcacttttgccggtccatttcctgctgataatttctcagttggatttagtttggcacaatcgtcagaaactcgcagcccaagctcttctacattggaagcaaaccactcacagctttcatcccttagttcacaatatgttcttccaaagttggttgtcaataatattgatctcagtgatgaggccaaagatctccttcaaaaagaggcgtttgtgcggattcttgagagtgataagaaagaagcatctggtggttcaattgctcgccttccgttgcttgctcacctgggtgttgagtttcctctggaatttgatccttgggtgattcttcaaaagcacattctctctgattatgcgaataatgaggggcacgagttgactatatgcatcctgaaccggctatatcatgaggcagagcaggatcacgatttcctttcatctagaactgctacatcagtttacgaatcctttcttctaaacatagctgaaaatcttcgagacatgtttccagcttcagataagtcacttggcaaattgctttgtgagataccatacttaccagaaggtgtgctgaaactgcttgaaagtttatgttctcctggaagtaatgagaggcaggacaaggatattcagagtggtgatagggtaactcaaggtctcagtgctgtctggaaccttatcatgctaagaccttcaaatcgggacagatgtctggagattgctttgcagagttcaactcatcatctagaggaggtccgcatgaaggcaatacgtttggtggcaaataagttatttcctatgacaagcatttccaaaaagattgaagattttgcaaatgaaaaacttaattcagtgctggaaatgactccatctggtgattgtgtaactactgaaatggctacacctgaagcacacaaagatattggtttagaaaacttaacagcttcagtaacaggcatgcagactctgatgtctctatactttgcattgtgcaccaagaaacattcccttctcagacatgtatttgcaatatatggtaatctaccgcaagctgccaagcaggcagttcatcaacaagtaccaattctgatacgcactataggctcctcctctgatcttcttggaatcatctcagatccaccagctgactgccgggacctcctcatgcaggttttacaaaccctcactgatgctgcggttccatctaaagatctgatttcttccataaagatcttatattctaaaacaaaggatgttgagttcctttttgcaatcttggttcatctaccaaaagatgaggtcctgcctgtgttccccagtattgttaatcttccaatagacaagtttcaaagtgccatttcccgaatcttgcagggatcacctcggaatggcccttcacttgatccatcagaaattttaattgcaattcatgtaatagctcctgataaggaaggaataccactcaaaaaggttatggatgcatgctcttcttgctttgagcaaagaacaatatttacccagcaagttctggcaaaagcactaaatcaactggttgaacagattcctcttcctttgctattcatgaggactgtcatgcaagcaataggtgtttttcctgcattggtggattttgtgatggagatcatgtcacgccttgtgagcaagcagatttggaaatatcccaagttatgggtaggatttctgaagtgtgctatcttgacaaaacctcagtcatatggtgtgttgctgcagttaccagctcctcaacttgagaatgccttgagtaagaacccgacactgaagacgcccttggctgagcatgccgagcagccaaatattcggtcgacacttccaaggtctactttggtggttctgggtcttgctgaagatcaaccacagcaaccagcagtaacacaggtgcagagcagccaaaaccaggctgcggaaaccagtagctctgctgctgatacggctacagaagtaactcaggaatcttctggtgctagctaacatcttttatgccgaaatgggctaatgcttgcaggattggctggatggcagagtagatacttcagataatgaagccggtgaagttcttaaagaaaggtcaatgagtcgatgaaagtgggttcaatataggccaatttgatgaacacaggcattgaattatactagattaggctgctgaatagcgtaatacctacatccatttaggtgtgttttcttgttagcgtgctattgtaatgtctatattgtaatgggtctcgacccaccaaactttgttatattaatgcactcccaatcttgattaggattagggttttcaatatgttataaagctagattctctcttccccctttca

SEQ ID NO: 67644 - DNA, 4540 bp, Zea Mays
gcagatcatgttgagggcgtccatgcggatgttggggacgatttcgacaatctcatcctcagccacgaactccacctgcagcacagacaggacaggtccaaacattccctttgacgaagatagtctagtccctgcctgtgattgtggaagggatggggttggttacctcggagggcgagaagatggagaggtgcgggtcggactgccccgccatgaatgccccccactggaacgccgggactcgtgagagagagcaatggaggcgctgctgcgggtcggaggcggcgaggcgagagcgaggtcgacggagagaggaggctacaggtcgctgggactctctaaactacagcccaatctgagtgcccgaaagcccatccaacaacagagcccaacagccgcttcacgcagcttcagttcgatttggtcgggtcgcggcagcgcacggcgggtgaggcagcggcgaggcggggcggcggggcgccgcggttgcctttctcgctgctcctgcagtcctgctcgctcagcgccgggacccgggagaggttattagggtttccttctcatcaactttagccccagcagcaacacagccagcagaagagggcgggcccgatgctggccgcccggaacccccctccgccgccccatgacatcgccgcgcgcctccaccacctgcgcgacctccgcagggtgccgctccccaaccgcgtcgcgcgcatcgccgacctccacaccgatgaggccagccccgtgcgcaagcttgttgccgagatcatcggtgagcttgggtcaaaacacatgaggtatctacctgatatgatcccttgtttgctgcaccttctgaatgatgagacgcctgcagtcgtcaggcaagctgttaagacaggaaccaacttgtttgccaaagtactccaaaagctagctatccagggtttattctccaatggagggattgatgatgcacttaaatcatcatgggaatggctgctcaagttcaaatcaggtgtctcgcacatggcatttcaggccaccggcaatgaaggtgtcaggttactggctattaagtttgttgaaaaaacagttcttatgtacacaccagatcctgatgtcccatctgatccgccaactgaaacaacagaagatatggcattcaatgtagcttggttacgaggaggtcaccctttgcttaatgttggggatctggccatggaagccagccagagtcttggattgttgctagagcagctcaagtctcctaaagtaaagtcactcagtacttccatgatcattgtcttcgttactagtctctcagctattgcccaaagaaggccttcattttatggacgcatattgccagttttactttccttggatccagcaagttctattattaaattgagagtcccgggcgcattccatgccttgaagagtgccttctctgcatgcctgaaatgcacacattcaagtgctgagccgtggcgagcacgcctattggaagctcaaaatattatcaaccaagggggttcaatagaagatgcagcaaatgctgctaagaatttcggggacacttcaaacagggaagaatcgtggcctctgatggagagaagcactgacggtagtaacaagcgtagtctggctgaagacatgaatcatgtgacagaggatgatgtccactccactaaaagagccaggcaatcaattgatgctaatgaacatagtgaagaggcaaacaagacaaattttgagtcgatgtctgttgatatctcatctagccagcccagctctataagaactgggaattcagaagctgtgtatcaattaattggtatgtttgctgcactagctgcacaaggtgacagagcagctggatcactgcaaatcctttcatacagtatcgctagtgacttactagcggaggtggtaatggttaacatgcaacatctcccaatctctcgtcctgaagttgaccaacagcagcttccttctacgagctctggagatggacttccactttcaagtttctcctctctgctggggattctgctgaagggagcgaaccaaattgatcaagatgaagtgtctccagctaaagaacctgcgctggtgtcgtcagttgcagatgacagaatgatacttcctgctaattcacctgttcctagctcagtaaatctacctatcgaagagaacagtaacagtccaacagttccattatgtatagaaacaacagaggccaaagtaaccagtgcaggtggcaatagttcgattgatattccagaatcatcagaagcttcccatgcctcaacagagccccagggaacccaagagcatgctagcacttttgccggtccatttcctgctgataatttctcagttggatttagtttggcacaatcgtcagaaactcgcagcccaagctcttctacattggaagcaaaccactcacagctttcatcccttagttcacaatatgttcttccaaagttggttgtcaataatattgatctcagtgatgaggccaaagatctccttcaaaaagaggcgtttgtgcggattcttgagagtgataagaaagaagcatctggtggttcaattgctcgccttccgttgcttgctcacctgggtgttgagtttcctctggaatttgatccttgggtgattcttcaaaagcacattctctctgattatgcgaataatgaggggcacgagttgactatatgcatcctgaaccggctatatcatgaggcagagcaggatcacgatttcctttcatctagaactgctacatcagtttacgaatcctttcttctaaacatagctgaaaatcttcgagacatgtttccagcttcagataagtcacttggcaaattgctttgtgagataccatacttaccagaaggtgtgctgaaactgcttgaaagtttatgttctcctggaagtaatgagaggcaggacaaggatattcagagtggtgatagggtaactcaaggtctcagtgctgtctggaaccttatcatgctaagaccttcaaatcgggacagatgtctggagattgctttgcagagttcaactcatcatctagaggaggtccgcatgaaggcaatacgtttggtggcaaataagttatttcctatgacaagcatttccaaaaagattgaagattttgcaaatgaaaaacttaattcagtgctggaaatgactccatctggtgattgtgtaactactgaaatggctacacctgaagcacacaaagcatgcagactctgatgtctctatactttgcattgtgcaccaagaaacattcccttctcagacatgtatttgcaatatatggtaatctaccgcaagctgccaagcaggcagttcatcaacaagtaccaattctgatacgcactataggctcctcctctgatcttcttggaatcatctcagatccaccagctgactgccgggacctcctcatgcaggtcctgcctgtgttccccagtattgttaatcttccaatagacaagtttcaaagtgccatttcccgaatcttgcagggatcacctcggaatggcccttcacttgatccatcagaaattttaattgcaattcatgtaatagctcctgataaggaaggaataccactcaaaaaggttatggatgcatgctcttcttgctttgagcaaagaacaatatttacccagcaagttctggcaaaagcactaaatcaactggttgaacagattcctcttcctttgctattcatgaggactgtcatgcaagcaataggtgtttttcctgcattggtggattttgtgatggagatcatgtcacgccttgtgagcaagcagatttggaaatatcccaagttatgggtaggatttctgaagtgtgctatcttgacaaaacctcagtcatatggtgtgttgctgcagttaccagctcctcaacttgagaatgccttgagtaagaacccgacactgaagacgcccttggctgagcatgccgagcagccaaatattcggtcgacacttccaaggtctactttggtggttctgggtcttgctgaagatcaaccacagcaaccagcagtaacacaggtgcagagcagccaaaaccaggctgcggaaaccagtagctctgctgctgatacggctacagaagtaactcaggaatcttctggtgctagctaacatcttttatgccgaaatgggctaatgcttgcagaatcaaatacaggattggctggatggcagagtagatacttcagataatgaagccggtgaagttcttaaagaaaggtcaatgagtcgatgaaagtgggttcaatataggccaatttgatgaacacaggcattgaattatactagattaggctgctgaatagcgtaatacctacatccatttaggtgtgttttcttgttagcgtgctattgtaatgtctatattgtaatgggtctcgacccaccaaactttgttatattaatgcactcccaatcttgattaggattagggttttcaatatgttataaagctagattctctcttccccctttca

SEQ ID NO: 67645 - DNA, 4689 bp, Zea Mays
gcagatcatgttgagggcgtccatgcggatgttggggacgatttcgacaatctcatcctcagccacgaactccacctgcagcacagacaggacaggtccaaacattccctttgacgaagatagtctagtccctgcctgtgattgtggaagggatggggttggttacctcggagggcgagaagatggagaggtgcgggtcggactgccccgccatgaatgccccccactggaacgccgggactcgtgagagagagcaatggaggcgctgctgcgggtcggaggcggcgaggcgagagcgaggtcgacggagagaggaggctacaggtcgctgggactctctaaactacagcccaatctgagtgcccgaaagcccatccaacaacagagcccaacagccgcttcacgcagcttcagttcgatttggtcgggtcgcggcagcgcacggcgggtgaggcagcggcgaggcggggcggcggggcgccgcggttgcctttctcgctgctcctgcagtcctgctcgctcagcgccgggacccgggagaggttattagggtttccttctcatcaactttagccccagcagcaacacagccagcagaagagggcgggcccgatgctggccgcccggaacccccctccgccgccccatgacatcgccgcgcgcctccaccacctgcgcgacctccgcagggtgccgctccccaaccgcgtcgcgcgcatcgccgacctccacaccgatgaggccagccccgtgcgcaagcttgttgccgagatcatcggtgagcttgggtcaaaacacatgaggtatctacctgatatgatcccttgtttgctgcaccttctgaatgatgagacgcctgcagtcgtcaggcaagctgttaagacaggaaccaacttgtttgccaaagtactccaaaagctagctatccagggtttattctccaatggagggattgatgatgcacttaaatcatcatgggaatggctgctcaagttcaaatcaggtgtctcgcacatggcatttcaggccaccggcaatgaaggtgtcaggttactggctattaagtttgttgaaaaaacagttcttatgtacacaccagatcctgatgtcccatctgatccgccaactgaaacaacagaagatatggcattcaatgtagcttggttacgaggaggtcaccctttgcttaatgttggggatctggccatggaagccagccagagtcttggattgttgctagagcagctcaagtctcctaaagtaaagtcactcagtacttccatgatcattgtcttcgttactagtctctcagctattgcccaaagaaggccttcattttatggacgcatattgccagttttactttccttggatccagcaagttctattattaaattgagagtcccgggcgcattccatgccttgaagagtgccttctctgcatgcctgaaatgcacacattcaagtgctgagccgtggcgagcacgcctattggaagctcaaaatattatcaaccaagggggttcaatagaagatgcagcaaatgctgctaagaatttcggggacacttcaaacagggaagaatcgtggcctctgatggagagaagcactgacggtagtaacaagcgtagtctggctgaagacatgaatcatgtgacagaggatgatgtccactccactaaaagagccaggcaatcaattgatgctaatgaacatagtgaagaggcaaacaagacaaattttgagtcgatgtctgttgatatctcatctagccagcccagctctataagaactgggaattcagaagctgtgtatcaattaattggtatgtttgctgcactagctgcacaaggtgacagagcagctggatcactgcaaatcctttcatacagtatcgctagtgacttactagcggaggtggtaatggttaacatgcaacatctcccaatctctcgtcctgaagttgaccaacagcagcttccttctacgagctctggagatggacttccactttcaagtttctcctctctgctggggattctgctgaagggagcgaaccaaattgatcaagatgaagtgtctccagctaaagaacctgcgctggtgtcgtcagttgcagatgacagaatgatacttcctgctaattcacctgttcctagctcagtaaatctacctatcgaagagaacagtaacagtccaacagttccattatgtatagaaacaacagaggccaaagtaaccagtgcaggtggcaatagttcgattgatattccagaatcatcagaagcttcccatgcctcaacagagccccagggaacccaagagcatgctagcacttttgccggtccatttcctgctgataatttctcagttggatttagtttggcacaatcgtcagaaactcgcagcccaagctcttctacattggaagcaaaccactcacagctttcatcccttagttcacaatatgttcttccaaagttggttgtcaataatattgatctcagtgatgaggccaaagatctccttcaaaaagaggcgtttgtgcggattcttgagagtgataagaaagaagcatctggtggttcaattgctcgccttccgttgcttgctcacctgggtgttgagtttcctctggaatttgatccttgggtgattcttcaaaagcacattctctctgattatgcgaataatgaggggcacgagttgactatatgcatcctgaaccggctatatcatgaggcagagcaggatcacgatttcctttcatctagaactgctacatcagtttacgaatcctttcttctaaacatagctgaaaatcttcgagacatgtttccagcttcagataagtcacttggcaaattgctttgtgagataccatacttaccagaaggtgtgctgaaactgcttgaaagtttatgttctcctggaagtaatgagaggcaggacaaggatattcagagtggtgatagggtaactcaaggtctcagtgctgtctggaaccttatcatgctaagaccttcaaatcgggacagatgtctggagattgctttgcagagttcaactcatcatctagaggaggtccgcatgaaggcaatacgtttggtggcaaataagttatttcctatgacaagcatttccaaaaagattgaagattttgcaaatgaaaaacttaattcagtgctggaaatgactccatctggtgattgtgtaactactgaaatggctacacctgaagcacacaaagatattggtttagaaaacttaacagcttcagtaacaggcatgcagactctgatgtctctatactttgcattgtgcaccaagacatgtatttgcaatatatggtaatctaccgcaagctgccaagcaggcagttcatcaacaagtaccaattctgatacgcactataggctcctcctctgatcttcttggaatcatctcagatccaccagctgactgccgggacctcctcatgcaggttttacaaaccctcactgatgctgcggttccatctaaagatctgatttcttccataaagatcttatattctaaaacaaaggatgttgagttcctttttgcaatcttggttcatctaccaaaagatgaggtcctgcctgtgttccccagtattgttaatcttccaatagacaagtttcaaagtgccatttcccgaatcttgcagggatcacctcggaatggcccttcacttgatccatcagaaattttaattgcaattcatgtaatagctcctgataaggaaggaataccactcaaaaaggttatggatgcatgctcttcttgctttgagcaaagaacaatatttacccagcaagttctggcaaaagcactaaatcaactggttgaacagattcctcttcctttgctattcatgaggactgtcatgcaagcaataggtgtttttcctgcattggtggattttgtgatggagatcatgtcacgccttgtgagcaagcagatttggaaatatcccaagttatgggtaggatttctgaagtgtgctatcttgacaaaacctcagtcatatggtgtgttgctgcagttaccagctcctcaacttgagaatgccttgagtaagaacccgacactgaagacgcccttggctgagcatgccgagcagccaaatattcggtcgacacttccaaggtctactttggtggttctgggtcttgctgaagatcaaccacagcaaccagcagtaacacaggtgcagagcagccaaaaccaggctgcggaaaccagtagctctgctgctgatacggctacagaagtaactcaggaatcttctggtgctagctaacatcttttatgccgaaatgggctaatgcttgcagaatcaaatacaggattggctggatggcagagtagatacttcagataatgaagccggtgaagttcttaaagaaaggtcaatgagtcgatgaaagtgggttcaatataggccaatttgatgaacacaggcattgaattatactagattaggctgctgaatagcgtaatacctacatccatttaggtgtgttttcttgttagcgtgctattgtaatgtctatattgtaatgggtctcgacccaccaaactttgttatattaatgcactcccaatcttgattaggattagggttttcaatatgttataaagctagattctctcttccccctttca

SEQ ID NO: 67646 - DNA, 4697 bp, Zea Mays
gcagatcatgttgagggcgtccatgcggatgttggggacgatttcgacaatctcatcctcagccacgaactccacctgcagcacagacaggacaggtccaaacattccctttgacgaagatagtctagtccctgcctgtgattgtggaagggatggggttggttacctcggagggcgagaagatggagaggtgcgggtcggactgccccgccatgaatgccccccactggaacgccgggactcgtgagagagagcaatggaggcgctgctgcgggtcggaggcggcgaggcgagagcgaggtcgacggagagaggaggctacaggtcgctgggactctctaaactacagcccaatctgagtgcccgaaagcccatccaacaacagagcccaacagccgcttcacgcagcttcagttcgatttggtcgggtcgcggcagcgcacggcgggtgaggcagcggcgaggcggggcggcggggcgccgcggttgcctttctcgctgctcctgcagtcctgctcgctcagcgccgggacccgggagaggttattagggtttccttctcatcaactttagccccagcagcaacacagccagcagaagagggcgggcccgatgctggccgcccggaacccccctccgccgccccatgacatcgccgcgcgcctccaccacctgcgcgacctccgcagggtgccgctccccaaccgcgtcgcgcgcatcgccgacctccacaccgatgaggccagccccgtgcgcaagcttgttgccgagatcatcggtgagcttgggtcaaaacacatgaggtatctacctgatatgatcccttgtttgctgcaccttctgaatgatgagacgcctgcagtcgtcaggcaagctgttaagacaggaaccaacttgtttgccaaagtactccaaaagctagctatccagggtttattctccaatggagggattgatgatgcacttaaatcatcatgggaatggctgctcaagttcaaatcaggtgtctcgcacatggcatttcaggccaccggcaatgaaggtgtcaggttactggctattaagtttgttgaaaaaacagttcttatgtacacaccagatcctgatgtcccatctgatccgccaactgaaacaacagaagatatggcattcaatgtagcttggttacgaggaggtcaccctttgcttaatgttggggatctggccatggaagccagccagagtcttggattgttgctagagcagctcaagtctcctaaagtaaagtcactcagtacttccatgatcattgtcttcgttactagtctctcagctattgcccaaagaaggccttcattttatggacgcatattgccagttttactttccttggatccagcaagttctattattaaattgagagtcccgggcgcattccatgccttgaagagtgccttctctgcatgcctgaaatgcacacattcaagtgctgagccgtggcgagcacgcctattggaagctcaaaatattatcaaccaagggggttcaatagaagatgcagcaaatgctgctaagaatttcggggacacttcaaacagggaagaatcgtggcctctgatggagagaagcactgacggtagtaacaagcgtagtctggctgaagacatgaatcatgtgacagaggatgatgtccactccactaaaagagccaggcaatcaattgatgctaatgaacatagtgaagaggcaaacaagacaaattttgagtcgatgtctgttgatatctcatctagccagcccagctctataagaactgggaattcagaagctgtgtatcaattaattggtatgtttgctgcactagctgcacaaggtgacagagcagctggatcactgcaaatcctttcatacagtatcgctagtgacttactagcggaggtggtaatggttaacatgcaacatctcccaatctctcgtcctgaagttgaccaacagcagcttccttctacgagctctggagatggacttccactttcaagtttctcctctctgctggggattctgctgaagggagcgaaccaaattgatcaagatgaagtgtctccagctaaagaacctgcgctggtgtcgtcagttgcagatgacagaatgatacttcctgctaattcacctgttcctagctcagtaaatctacctatcgaagagaacagtaacagtccaacagttccattatgtatagaaacaacagaggccaaagtaaccagtgcaggtggcaatagttcgattgatattccagaatcatcagaagcttcccatgcctcaacagagccccagggaacccaagagcatgctagcacttttgccggtccatttcctgctgataatttctcagttggatttagtttggcacaatcgtcagaaactcgcagcccaagctcttctacattggaagcaaaccactcacagctttcatcccttagttcacaatatgttcttccaaagttggttgtcaataatattgatctcagtgatgaggccaaagatctccttcaaaaagaggcgtttgtgcggattcttgagagtgataagaaagaagcatctggtggttcaattgctcgccttccgttgcttgctcacctgggtgttgagtttcctctggaatttgatccttgggtgattcttcaaaagcacattctctctgattatgcgaataatgaggggcacgagttgactatatgcatcctgaaccggctatatcatgaggcagagcaggatcacgatttcctttcatctagaactgctacatcagtttacgaatcctttcttctaaacatagctgaaaatcttcgagacatgtttccagcttcagataagtcacttggcaaattgctttgtgagataccatacttaccagaaggtgtgctgaaactgcttgaaagtttatgttctcctggaagtaatgagaggcaggacaaggatattcagagtggtgatagggtaactcaaggtctcagtgctgtctggaaccttatcatgctaagaccttcaaatcgggacagatgtctggagattgctttgcagagttcaactcatcatctagaggaggtccgcatgaaggcaatacgtttggtggcaaataagttatttcctatgacaagcatttccaaaaagattgaagattttgcaaatgaaaaacttaattcagtgctggaaatgactccatctggtgattgtgtaactactgaaatggctacacctgaagcacacaaagatattggtttagaaaacttaacagcttcagtaacaggcatgcagactctgatgtctctatactttgcattgtgcaccaagaaacattcccttctcagacatgtatttgcaatatatggtaatctaccgcaagctgccaagcaggcagttcatcaacaagtaccaattctgatacgcactataggctcctcctctgatcttcttggaatcatctcagatccaccagctgactgccgggacctcctcatgcaggttttacaaaccctcactgatgctgcggttccatctaaagatctgatttcttccataaagatcttatattctaaaacaaaggatgttgagttcctttttgcaatcttggttcatctaccaaaagatgaggtcctgcctgtgttccccagtattgttaatcttccaatagacaagtttcaaagtgccatttcccgaatcttgcagggatcacctcggaatggcccttcacttgatccatcagaaattttaattgcaattcatgtaatagctcctgataaggaaggaataccactcaaaaaggttatggatgcatgctcttcttgctttgagcaaagaacaatatttacccagcaagttctggcaaaagcactaaatcaactgattcctcttcctttgctattcatgaggactgtcatgcaagcaataggtgtttttcctgcattggtggattttgtgatggagatcatgtcacgccttgtgagcaagcagatttggaaatatcccaagttatgggtaggatttctgaagtgtgctatcttgacaaaacctcagtcatatggtgtgttgctgcagttaccagctcctcaacttgagaatgccttgagtaagaacccgacactgaagacgcccttggctgagcatgccgagcagccaaatattcggtcgacacttccaaggtctactttggtggttctgggtcttgctgaagatcaaccacagcaaccagcagtaacacaggtgcagagcagccaaaaccaggctgcggaaaccagtagctctgctgctgatacggctacagaagtaactcaggaatcttctggtgctagctaacatcttttatgccgaaatgggctaatgcttgcagaatcaaatacaggattggctggatggcagagtagatacttcagataatgaagccggtgaagttcttaaagaaaggtcaatgagtcgatgaaagtgggttcaatataggccaatttgatgaacacaggcattgaattatactagattaggctgctgaatagcgtaatacctacatccatttaggtgtgttttcttgttagcgtgctattgtaatgtctatattgtaatgggtctcgacccaccaaactttgttatattaatgcactcccaatcttgattaggattagggttttcaatatgttataaagctagattctctcttccccctttca

SEQ ID NO: 67647 - DNA, 4003 bp, Zea Mays
caattttgtattgactgtggcgagcacgcctattggaagctcaaaatattatcaaccaagggggttcaatagaagatgcagcaaatgctgctaagaatttcggggacacttcaaacagggaagaatcgtggcctctgatggagagaagcactgacggtagtaacaagcgtagtctggctgaagacatgaatcatgtgacagaggatgatgtccactccactaaaagagccaggcaatcaattgatgctaatgaacatagtgaagaggcaaacaagacaaattttgagtcgatgtctgttgatatctcatctagccagcccagctctataagaactgggaattcagaagctgtgtatcaattaattggtatgtttgctgcactagctgcacaaggtgacagagcagctggatcactgcaaatcctttcatacagtatcgctagtgacttactagcggaggtggtaatggttaacatgcaacatctcccaatctctcgtcctgaagttgaccaacagcagcttccttctacgagctctggagatggacttccactttcaagtttctcctctctgctggggattctgctgaaggtttgtttctttagctgtcatcttttgattcgttagattctcttcggttttgtttgttgatattttacatttcagggagcgaaccaaattgatcaagatgaagtgtctccagctaaagaacctgcgctggtgtcgtcagttgcagatgacagaatgatacttcctgctaattcacctgttcctagctcagtaaatctacctatcgaagagaacagtaacagtccaacagttccattatgtatagaaacaacagaggccaaagtaaccagtgcaggtggcaatagttcgattgatattccagaatcatcagaagcttcccatgcctcaacagagccccagggaacccaagagcatgctagcacttttgccggtccatttcctgctgataatttctcagttggatttagtttggcacaatcgtcagaaactcgcagcccaagctcttctacattggaagcaaaccactcacagctttcatcccttagttcacaatatgttcttccaaagttggttgtcaataatattgatctcagtgatgaggccaaagatctccttcaaaaagaggcgtttgtgcggattcttgagagtgataagaaagaagcatctggtggttcaattgctcgccttccgttgcttgctcacctgggtgttgagtttcctctggaatttgatccttgggtgattcttcaaaagcacattctctctgattatgcgaataatgaggggcacgagttgactatatgcatcctgaaccggctatatcatgaggcagagcaggatcacgatttcctttcatctagaactgctacatcagtttacgaatcctttcttctaaacatagctgaaaatcttcgagacatgtttccagcttcagataagtcacttggcaaattgctttgtgagataccatacttaccagaaggtgtgctgaaactgcttgaaagtttatgttctcctggaagtaatgagaggcaggacaaggatattcagagtggtgatagggtaactcaaggtctcagtgctgtctggaaccttatcatgctaagaccttcaaatcgggacagatgtctggagattgctttgcagagttcaactcatcatctagaggaggtccgcatgaaggcaatacgtttggtggcaaataagttatttcctatgacaagcatttccaaaaagattgaagattttgcaaatgaaaaacttaattcagtgctggaaatgactccatctggtgattgtgtaactactgaaatggctacacctgaagcacacaaagatattggtttagaaaacttaacagcttcagtaacaggcatgcagactctgatgtctctatactttgcattgtgcaccaagaaacattcccttctcagacatgtatttgcaatatatggtaatctaccgcaagctgccaagcagttcatcaacaagtaccaattctgatacgcactataggctcctcctctgatcttcttggaatcatctcagatccaccagctgactgccgggacctcctcatgcaggttttacaaaccctcactgatgctgcggttccatctaaagatctgatttcttccataaagatcttatattctaaaacaaaggatgttgagttcctttttgcaatcttggttcatctaccaaaagatgaggtcctgcctgtgttccccagtattgttaatcttccaatagacaagtttcaaagtgccatttcccgaatcttgcagggatcacctcggaatggcccttcacttgatccatcagaaattttaattgcaattcatgtaatagctcctgataaggaaggaataccactcaaaaaggttatggatgcatgctcttcttgctttgagcaaagaacaatatttacccagcaagttctggcaaaagcactaaatcaactggttgaacagattcctcttcctttgctattcatgaggactgtcatgcaagcaataggtgtttttcctgcattggtggattttgtgatggagatcatgtcacgccttgtgagcaagcagatttggaaatatcccaagttatgggtaggatttctgaagtgtgctatcttgacaaaacctcagtcatatggtgtgttgctgcagttaccagctcctcaacttgagaatgccttgagtaagaacccgacactgaagacgcccttggctgagcatgccgagcagccaaatattcggtcgacacttccaaggtctactttggtggttctgggtcttgctgaagatcaaccacagcaaccagcagtaacacaggtgcagagcagccaaaaccaggctgcggaaaccagtagctctgctgctgatacggctacagaagtaactcaggaatcttctggtgctagctaacatcttttatgccgaaatgggctaatgcttgcaggttgtgtaccatatgtctcttgagggtctaagatgtgtttttctgtgtgatgcgtctcattggacgggtgttagctgctgcatctggacgcctaaatgagaactaagttatttagttgctgggggtaattctaattttcggtggtgcacagggaccattgtaaagtaaagaggttaacattatatatcatccttaaataggaaaagggcaaacaagtgtttgttgaagctgtagctcaaacagtccctacttattccatgagttgtttcaggctaccaagggggctggctatgtcaagcaaccaatgcaatgattcgaaaattttagtggagcagtaaggaagggaagagattctaaatttaggggactacgttttcttgatgtagccctatgaattagaccgccacaaatgtggagagctatacttgatggacttgacgttcttcagcaaccccaagggatggagctttatggccaacccccccagatgtgttagtgaattaatagaagatggtatatctatgaaatggcgacttgacgtgattcaaaagtacttatataatatggatgctaagatatattcctttatatatgtcggcaagatgattttttttttgcacgacatcgtaaaagatgtggtatattctctgttgaatctgattacagaatgcttgtttataatcagaatcaaatacaggattggctggatggcagagtagatacttcagataatgaagccggtgaagttcttaaagaaaggtcaatgagtcgatgaaagtgggttcaatataggccaatttgatgaacacaggcattgaattatactagattaggctgctgaatagcgtaatacctacatccatttaggtgtgttttcttgttagcgtgctattgtaatgtctatattgtaatgggtctcgacccaccaaactttgttatattaatgcactcccaatcttgattaggattagggttttcaatatgttataaagctagattctctcttccccctttca

SEQ ID NO: 67648 - DNA, 292 bp, Zea Mays
tatgtctgaggaattaatttataaggagtatagaggtcgaatcggatccagtctctagtacgtatgtttctttacaaatcgaggttgtgccaacggcagcagggcatcacagaatccacggtcaaaacatatgcatctcgtgttcaggatggaacaaagccctacatctgctcctgtattatgttataaacagatatcaagatctcaacactgatcaggatgatgataagccattccagaaaatccgacttcctgttctgaaggatctcctgaagaaacctgatgttgtgct

SEQ ID NO: 67649 - DNA, 3497 bp, Zea Mays
aacctccttttgctccacctcactcgccacctcctggcctggcttccttcgcctccctcccttgggaccggtatatctactacctctgttccttcacctctccttcgccgccgcttccctcctcctcctcctccacctccgccctcgatccgaccgcgggccctaaagcacttttcgcctttttcggaggccacgggtcaccaccgacctccattccattcatttgccgattcacctacacagacacacacagaaactttggatgcaaacgaggagggagcccttgaaggcaaaccaatgcgcaccgccgcttattcattaaccaaagacttgcatccaaccaatcccaccacttgtgtctacctcttcgagtcaggctgatgggaggtgcctgtcagcaactctccgtggacggagatgcgaggacgcctgcgaatgaccgcgatccggccggcctgctccagcatgatgatacggaaaaccagcagcagcagcaggcctgctgggagcgcttcctcctcaaggagactctcaacgtcttgcttgtggagagtgatgattcaaccaggcaggtcgtcagtgccctgcttcgttgctgcatgtaccaagttatctctgccgaaaatggccagcaagcatgggcttatcttgaagataagagaaacaacatagatcttgttttgactgaggtttttatgcccggtgtatctggtatttctctgctgagtagaatcatgagccacaatatttgcaagaacattccagtgattatgatgtcttcgagtgatgctatgagtacagtctttaaatgtttgtcaaaaggtgctgttgactttttagtcaagcctatacgtaagaatgaacttaagaacctttggcagcatgtgtggagacaacggtgtcacagtaactcatggactaagcttgctgtggagatcgacagtccacaagctatgtctctggaccagttagccgatccagccaatagcacctgtgcacaagtaatccactcaaagtcagagatatgtagccacagatggctaccaggtagcagcaacagaaactgcaagaagcaaaaatacactaatgatgactttaagggaaaagacttggagatagatggtcctggaaatctatatatggatcaccaatcttccccaaatgagagacccatcaaagcagcagatcatgaaaacaattccaaggagtcaatgatgggaaatttaggggatgcaactgttcgagctgctgacctaattggttcaatggccaaaaacatggatgcccaacaggcagcaagagctgcagatacccctaatttctcttctgaagtgccagaagggaaagatgactttaagggaaaggacttggagataggtggccctagaaatttatatatggatcaccaatcttccccaaatgagagacccatcaaagcagcagatcatgaaaacaactccaaggagtcaatgatagaaaatttagaggagccaactgttcgagctgctgacctaattggttcaatggccaaaaacatggatacccaacaggcagcaagagctgcagaagatacccctaatttctcttccaaagtgccagaagggaaagtcaatgacgatgaacagcggaatagtgcattaaggcgatcgaatctctcggcttttacaaggtaccatacatctgcggcttccaatcaaggtgggacaggattggtaggtagctgttcgccgcatgataacagctcggaggctgtgaaaacggattctacttacaacatgaagtcaaattcagatgctgccgcaataaaacaaggctccaacggcagtagcaataacaatgacatgggttccactacaaaggatgttgtgacaaaacccagcacaaataacgagagggtgatgttgccctctgctattaaggctaatggatacacgtcaacattccatcctgtgcagcagtggatggttccagataatgcgacagcagggaaagcgaaggctgatgaagtggccaacaatgcaggcagaaatagtcatcctggtgacgtgcagagcaacctgacgcaacaacatcgtccaacccttcattacgtccattttgagaatagtggatcaggtgccctgcaatgtggttcctccaatgtatttgatcccccacttgaaggccaggctaccaataactatggtgtgaaagccgggagcaactcaggcagcaacaaggggcagaataatgggagtacagctggtgcgagcacggctgctgcaaatgctggacggacagatacagagatacgggctatcgataaaagtggacctggaggtggcagtgggagtggcaatgacacatatgtcagacggcttgctgcgagcatgacaccacgacaagaacagctaaagaaatatagagagaaaaagaaagatcggaactttgggaaaaaggtgcggtaccagagcagaaagaggctagccgaccagcggccaagggttcgtggacagttcgtgaagcaagctgtgcaaaatcaagagggagatggagagagatgacccccccccccctctggcttcagctcatggttgttagacgtggcggttgatgattcttccttctctggtgtgatctgatatgatcgacaacacaccatccttccttttcttcattggtttcttcacatctagaatttactgcctgaccgggaaaaaataagctaggaacttctatacatgtgtatgcatttctaatcatgtagaagaataagtgtgtcttgactctagataattttaggtagagtcatgctcgctctcctacattatgtgatgtaactgaagtgttgttgtgttgtcatgtatggtcttggatcactttctgtcaatatattactagcccacaactactattaatttgatgagatgtatataattaaaaatattgtaatagtccttcctttggtaggtagacaacaaacaatcttgaattcagtgcatacataaatcactgtatagatatatacacgttggggtctgctttagatgaaggtcctcaaaacattaactaatcagttattttttgagtctgtttcaagtgtaacagggtaaatgctaaaggacaccttcgttcgaagatgatgcgcggtgatcacggttgccaagacgaagctacaaacttcagaccgcggcgcatgcacgtgatgaggtaggtggcaagagaagggccaaatcccagagacttgtttatcaagattactaaggcaaaagacgacaatacccttaatcatctttgtagctcatgcgtataggcttgagggcatgaatgtaatttttatgaagctatacatcttgattataagcaattgaataggttgcaaaaactgatttctagttaccacatcataaataatggaatgtaaactctatgtacattgtttgccagtacttgttggactaacaaatatagaaagtgaaatgtccaacataatgtcacatggtttatacctttctgct

SEQ ID NO: 67650 - DNA, 3734 bp, Zea Mays
ctcactcgccacctcctggcctggcttccttcgcctccctcccttgggaccggtatatctactacctctgttccttcacctctccttcgccgccgcttccctcctcctcctcctccacctccgccctcgatccgaccgcgggccctaaagcacttttcgcctttttcggaggccacgggtcaccaccgacctccattccattcatttgccgattcacctacacagacacacacagaaactttggatgcaaacgaggagggagcccttgaaggcaaaccaatgcgcaccgccgcttattcattaaccaaagacttgcatccaaccaatcccaccacttgtgtctacctcttcgagtcaggctgatgggaggtgcctgtcagcaactctccgtggacggagatgcgaggacgcctgcgaatgaccgcgatccggccggcctgctccagcatgatgatacggaaaaccagcagcagcagcaggcctgctgggagcgcttcctcctcaaggagactctcaacgtcttgcttgtggagagtgatgattcaaccaggcaggtcgtcagtgccctgcttcgttgctgcatgtaccaagttatctctgccgaaaatggccagcaagcatgggcttatcttgaagataagagaaacaacatagatcttgttttgactgaggtttttatgcccggtgtatctggtatttctctgctgagtagaatcatgagccacaatatttgcaagaacattccagtgattatgatgtcttcgagtgatgctatgagtacagtctttaaatgtttgtcaaaaggtgctgttgactttttagtcaagcctatacgtaagaatgaacttaagaacctttggcagcatgtgtggagacaacggtgtcacagttccagtggtagtggaagtgaaagtggcattcagacgcagaagtgtaccaagtcaaaaggtgccaatgaatccggtaacaacagtggtagcaacgacgatgaagctggcatgggacttaatgcaagggatgacagtgataatggcagtggcactcaagcacagaactcatggactaagcttgctgtggagatcgacagtccacaagctatgtctctggaccagttagccgatccagccaatagcacctgtgcacaagtaatccactcaaagtcagagatatgtagccacagatggctaccaggtagcagcaacagaaactgcaagaagcaaaaatacactaatgatgactttaagggaaaagacttggagatagatggtcctggaaatctatatatggatcaccaatcttccccaaatgagagacccatcaaagcagcagatcatgaaaacaattccaaggagtcaatgatgggaaatttaggggatgcaactgttcgagctgctgacctaattggttcaatggccaaaaacatggatgcccaacaggcagcaagagctgcagatacccctaatttctcttctgaagtgccagaagggaaagatgactttaagggaaaggacttggagataggtggccctagaaatttatatatggatcaccaatcttccccaaatgagagacccatcaaagcagcagatcatgaaaacaactccaaggagtcaatgatagaaaatttagaggagccaactgttcgagctgctgacctaattggttcaatggccaaaaacatggatacccaacaggcagcaagagctgcagaagatacccctaatttctcttccaaagtgccagaagggaaaggtaagaatgaccagcatgataattatgttttgccatcacttgagctgagtttgaagaggtcgagatcatgtggagatggtgccaacgatacagtcaatgacgatgaacagcggaatagtgcattaaggcgatcgaatctctcggcttttacaaggtaccatacatctgcggcttccaatcaaggtgggacaggattggtaggtagctgttcgccgcatgataacagctcggaggctgtgaaaacggattctacttacaacatgaagtcaaattcagatgctgccgcaataaaacaaggctccaacggcagtagcaataacaatgacatgggttccactacaaaggatgttgtgacaaaacccagcacaaataacgagagggtgatgttgccctctgctattaaggctaatggatacacgtcaacattccatcctgtgcagcagtggatggttccagataatgcgacagcagggaaagcgaaggctgatgaagtggccaacaatgcaggcagaaatagtcatcctggtgacgtgcagagcaacctgacgcaacaacatcgtccaacccttcattacgtccattttgagaatagtggatcaggtgccctgcaatgtggttcctccaatgtatttgatcccccacttgaaggccaggctaccaataactatggtgtgaaagccgggagcaactcaggcagcaacaaggggcagaataatgggagtacagctggtgcgagcacggctgctgcaaatgctggacggacagatacagagatacgggctatcgataaaagtggacctggaggtggcagtgggagtggcaatgacacatatgtcagacggcttgctgcgagcatgacaccacgacaagaacagctaaagaaatatagagagaaaaagaaagatcggaactttgggaaaaaggtgcggtaccagagcagaaagaggctagccgaccagcggccaagggttcgtggacagttcgtgaagcaagctgtgcaaaatcaagagggagatggagagagatgacccccccccccctctggcttcagctcatggttgttagacgtggcggttgatgattcttccttctctggtgtgatctgatatgatcgacaacacaccatccttccttttcttcattggtttcttcacatctagaatttactgcctgaccgggaaaaaataagctaggaacttctatacatgtgtatgcatttctaatcatgtagaagaataagtgtgtcttgactctagataattttaggtagagtcatgctcgctctcctacattatgtgatgtaactgaagtgttgttgtgttgtcatgtatggtcttggatcactttctgtcaatatattactagcccacaactactattaatttgatgagatgtatataattaaaaatattgtaatagtccttcctttggtaggtagacaacaaacaatcttgaattcagtgcatacataaatcactgtatagatatatacacgttggggtctgctttagatgaaggtcctcaaaacattaactaatcagttattttttgagtctgtttcaagtgtaacagggtaaatgctaaaggacaccttcgttcgaagatgatgcgcggtgatcacggttgccaagacgaagctacaaacttcagaccgcggcgcatgcacgtgatgaggtaggtggcaagagaagggccaaatcccagagacttgtttatcaagattactaaggcaaaagacgacaatacccttaatcatctttgtagctcatgcgtataggcttgagggcatgaatgtaatttttatgaagctatacatcttgattataagcaattgaataggttgcaaaaactgatttctagttaccacatcataaataatggaatgtaaactctatgtacattgtttgccagtacttgttggactaacaaatatagaaagtgaaatgtccaacataatgtcacatggtttatacctttctgct

SEQ ID NO: 67651 - DNA, 3779 bp, Zea Mays
gccacctcctggcctggcttccttcgcctccctcccttgggaccggtatatctactacctctgttccttcacctctccttcgccgccgcttccctcctcctcctcctccacctccgccctcgatccgaccgcgggccctaaagcacttttcgcctttttcggaggccacgggtcaccaccgacctccattccattcatttgccgattcacctacacagacacacacagaaactttggatgcaaacgaggagggagcccttgaaggcaaaccaatgcgcaccgccgcttattcattaaccaaagacttgcatccaaccaatcccaccacttgtgtctacctcttcgagtcaggctgatgggaggtgcctgtcagcaactctccgtggacggagatgcgaggacgcctgcgaatgaccgcgatccggccggcctgctccagcatgatgatacggaaaaccagcagcagcagcaggcctgctgggagcgcttcctcctcaaggagactctcaacgtcttgcttgtggagagtgatgattcaaccaggcaggtcgtcagtgccctgcttcgttgctgcatgtaccaagttatctctgccgaaaatggccagcaagcatgggcttatcttgaagataagagaaacaacatagatcttgttttgactgaggtttttatgcccggtgtatctggtatttctctgctgagtagaatcatgagccacaatatttgcaagaacattccagtgattatgatgtcttcgagtgatgctatgagtacagtctttaaatgtttgtcaaaaggtgctgttgactttttagtcaagcctatacgtaagaatgaacttaagaacctttggcagcatgtgtggagacaacggtgtcacagtctctcctgcgtgttcgaaaaaaaaaaaagtttacttatttggaactcagtccagtggtagtggaagtgaaagtggcattcagacgcagaagtgtaccaagtcaaaaggtgccaatgaatccggtaacaacagtggtagcaacgacgatgaagctggcatgggacttaatgcaagggatgacagtgataatggcagtggcactcaaaactcatggactaagcttgctgtggagatcgacagtccacaagctatgtctctggaccagttagccgatccagccaatagcacctgtgcacaagtaatccactcaaagtcagagatatgtagccacagatggctaccaggtagcagcaacagaaactgcaagaagcaaaaatacactaatgatgactttaagggaaaagacttggagatagatggtcctggaaatctatatatggatcaccaatcttccccaaatgagagacccatcaaagcagcagatcatgaaaacaattccaaggagtcaatgatgggaaatttaggggatgcaactgttcgagctgctgacctaattggttcaatggccaaaaacatggatgcccaacaggcagcaagagctgcagatacccctaatttctcttctgaagtgccagaagggaaaggtaagaatgatgactttaagggaaaggacttggagataggtggccctagaaatttatatatggatcaccaatcttccccaaatgagagacccatcaaagcagcagatcatgaaaacaactccaaggagtcaatgatagaaaatttagaggagccaactgttcgagctgctgacctaattggttcaatggccaaaaacatggatacccaacaggcagcaagagctgcagaagatacccctaatttctcttccaaagtgccagaagggaaaggtaagaatgaccagcatgataattatgttttgccatcacttgagctgagtttgaagaggtcgagatcatgtggagatggtgccaacgatacagtcaatgacgatgaacagcggaatagtgcattaaggcgatcgaatctctcggcttttacaaggtaccatacatctgcggcttccaatcaaggtgggacaggattggtaggtagctgttcgccgcatgataacagctcggaggctgtgaaaacggattctacttacaacatgaagtcaaattcagatgctgccgcaataaaacaaggctccaacggcagtagcaataacaatgacatgggttccactacaaaggatgttgtgacaaaacccagcacaaataacgagagggtgatgttgccctctgctattaaggctaatggatacacgtcaacattccatcctgtgcagcagtggatggttccagataatgcgacagcagggaaagcgaaggctgatgaagtggccaacaatgcaggcagaaatagtcatcctggtgacgtgcagagcaacctgacgcaacaacatcgtccaacccttcattacgtccattttgagaatagtggatcaggtgccctgcaatgtggttcctccaatgtatttgatcccccacttgaaggccaggctaccaataactatggtgtgaaagccgggagcaactcaggcagcaacaaggggcagaataatgggagtacagctggtgcgagcacggctgctgcaaatgctggacggacagatacagagatacgggctatcgataaaagtggacctggaggtggcagtgggagtggcaatgacacatatgtcagacggcttgctgcgagcatgacaccacgacaagaacagctaaagaaatatagagagaaaaagaaagatcggaactttgggaaaaaggtgcggtaccagagcagaaagaggctagccgaccagcggccaagggttcgtggacagttcgtgaagcaagctgtgcaaaatcaagagggagatggagagagatgacccccccccccctctggcttcagctcatggttgttagacgtggcggttgatgattcttccttctctggtgtgatctgatatgatcgacaacacaccatccttccttttcttcattggtttcttcacatctagaatttactgcctgaccgggaaaaaataagctaggaacttctatacatgtgtatgcatttctaatcatgtagaagaataagtgtgtcttgactctagataattttaggtagagtcatgctcgctctcctacattatgtgatgtaactgaagtgttgttgtgttgtcatgtatggtcttggatcactttctgtcaatatattactagcccacaactactattaatttgatgagatgtatataattaaaaatattgtaatagtccttcctttggtaggtagacaacaaacaatcttgaattcagtgcatacataaatcactgtatagatatatacacgttggggtctgctttagatgaaggtcctcaaaacattaactaatcagttattttttgagtctgtttcaagtgtaacagggtaaatgctaaaggacaccttcgttcgaagatgatgcgcggtgatcacggttgccaagacgaagctacaaacttcagaccgcggcgcatgcacgtgatgaggtaggtggcaagagaagggccaaatcccagagacttgtttatcaagattactaaggcaaaagacgacaatacccttaatcatctttgtagctcatgcgtataggcttgagggcatgaatgtaatttttatgaagctatacatcttgattataagcaattgaataggttgcaaaaactgatttctagttaccacatcataaataatggaatgtaaactctatgtacattgtttgccagtacttgttggactaacaaatatagaaagtgaaatgtccaacataatgtcacatggtttatacctttctgct

SEQ ID NO: 67652 - DNA, 3673 bp, Zea Mays
gccacctcctggcctggcttccttcgcctccctcccttgggaccggtatatctactacctctgttccttcacctctccttcgccgccgcttccctcctcctcctcctccacctccgccctcgatccgaccgcgggccctaaagctcttgcagcacttttcgcctttttcggaggccacgggtcaccaccgacctccattccattcatttgccgattcacctacacagacacacacagaaactttggatgcaaacgaggagggagcccttgaaggcaaaccaatgcgcaccgccgcttattcattaaccaaagacttgcatccaaccaatcccaccacttgtgtctacctcttcgagtcaggctgatgggaggtgcctgtcagcaactctccgtggacggagatgcgaggacgcctgcgaatgaccgcgatccggccggcctgctccagcatgatgatacggaaaaccagcagcagcagcaggcctgctgggagcgcttcctcctcaaggagactctcaacgtcttgcttgtggagagtgatgattcaaccaggcaggtcgtcagtgccctgcttcgttgctgcatgtaccaagttatctctgccgaaaatggccagcaagcatgggcttatcttgaagataagagaaacaacatagatcttgttttgactgaggtttttatgcccggtgtatctggtatttctctgctgagtagaatcatgagccacaatatttgcaagaacattccagtgattatgatgtcttcgagtgatgctatgagtacagtctttaaatgtttgtcaaaaggtgctgttgactttttagtcaagcctatacgtaagaatgaacttaagaacctttggcagcatgtgtggagacaacggtgtcacagtgcacagaactcatggactaagcttgctgtggagatcgacagtccacaagctatgtctctggaccagttagccgatccagccaatagcacctgtgcacaagtaatccactcaaagtcagagatatgtagccacagatggctaccaggtagcagcaacagaaactgcaagaagcaaaaatacactaatgatgactttaagggaaaagacttggagatagatggtcctggaaatctatatatggatcaccaatcttccccaaatgagagacccatcaaagcagcagatcatgaaaacaattccaaggagtcaatgatgggaaatttaggggatgcaactgttcgagctgctgacctaattggttcaatggccaaaaacatggatgcccaacaggcagcaagagctgcagatacccctaatttctcttctgaagtgccagaagggaaaggtaagaatgatgactttaagggaaaggacttggagataggtggccctagaaatttatatatggatcaccaatcttccccaaatgagagacccatcaaagcagcagatcatgaaaacaactccaaggagtcaatgatagaaaatttagaggagccaactgttcgagctgctgacctaattggttcaatggccaaaaacatggatacccaacaggcagcaagagctgcagaagatacccctaatttctcttccaaagtgccagaagggaaaggtaagaatgaccagcatgataattatgttttgccatcacttgagctgagtttgaagaggtcgagatcatgtggagatggtgccaacgatacagtcaatgacgatgaacagcggaatagtgcattaaggcgatcgaatctctcggcttttacaaggtgcaaaacataatatcagtgtcattagtgagttatgaaagcaacagtatgttgggtactaacagttaccacttttattgcaaggtaccatacatctgcggcttccaatcaaggtgggacaggattggtaggtagctgttcgccgcatgataacagctcggaggctgtgaaaacggattctacttacaacatgaagtcaaattcagatgctgccgcaataaaacaaggctccaacggcagtagcaataacaatgacatgggttccactacaaaggatgttgtgacaaaacccagcacaaataacgagagggtgatgttgccctctgctattaaggctaatggatacacgtcaacattccatcctgtgcagcagtggatggttccagataatgcgacagcagggaaagcgaaggctgatgaagtggccaacaatgcaggcagaaatagtcatcctggtgacgtgcagagcaacctgacgcaacaacatcgtccaacccttcattacgtccattttgagaatagtggatcaggtgccctgcaatgtggttcctccaatgtatttgatcccccacttgaaggccaggctaccaataactatggtgtgaaagccgggagcaactcaggcagcaacaaggggcagaataatgggagtacagctggtgcgagcacggctgctgcaaatgctggacggacagatacagagatacgggctatcgataaaagtggacctggaggtggcagtgggagtggcaatgacacatatgtcagacggcttgctgcgagcatgacaccacgacaagaacagctaaagaaatatagagagaaaaagaaagatcggaactttgggaaaaaggtgcggtaccagagcagaaagaggctagccgaccagcggccaagggttcgtggacagttcgtgaagcaagctgtgcaaaatcaagagggagatggagagagatgacccccccccccctctggcttcagctcatggttgttagacgtggcggttgatgattcttccttctctggtgtgatctgatatgatcgacaacacaccatccttccttttcttcattggtttcttcacatctagaatttactgcctgaccgggaaaaaataagctaggaacttctatacatgtgtatgcatttctaatcatgtagaagaataagtgtgtcttgactctagataattttaggtagagtcatgctcgctctcctacattatgtgatgtaactgaagtgttgttgtgttgtcatgtatggtcttggatcactttctgtcaatatattactagcccacaactactattaatttgatgagatgtatataattaaaaatattgtaatagtccttcctttggtaggtagacaacaaacaatcttgaattcagtgcatacataaatcactgtatagatatatacacgttggggtctgctttagatgaaggtcctcaaaacattaactaatcagttattttttgagtctgtttcaagtgtaacagggtaaatgctaaaggacaccttcgttcgaagatgatgcgcggtgatcacggttgccaagacgaagctacaaacttcagaccgcggcgcatgcacgtgatgaggtaggtggcaagagaagggccaaatcccagagacttgtttatcaagattactaaggcaaaagacgacaatacccttaatcatctttgtagctcatgcgtataggcttgagggcatgaatgtaatttttatgaagctatacatcttgattataagcaattgaataggttgcaaaaactgatttctagttaccacatcataaataatggaatgtaaactctatgtacattgtttgccagtacttgttggactaacaaatatagaaagtgaaatgtccaacataatgtcacatggtttatacctttctgct

SEQ ID NO: 67653 - DNA, 3014 bp, Zea Mays
gccacctcctggcctggcttccttcgcctccctcccttgggaccggtatatctactacctctgttccttcacctctccttcgccgccgcttccctcctcctcctcctccacctccgccctcgatccgaccgcgggccctaaagcacttttcgcctttttcggaggccacgggtcaccaccgacctccattccattcatttgccgattcacctacacagacacacacagaaactttggatgcaaacgaggagggagcccttgaaggcaaaccaatgcgcaccgccgcttattcattaaccaaagacttgcatccaaccaatcccaccacttgtgtctacctcttcgagtcaggctgatgggaggtgcctgtcagcaactctccgtggacggagatgcgaggacgcctgcgaatgaccgcgatccggccggcctgctccagcatgatgatacggaaaaccagcagcagcagcaggcctgctgggagcgcttcctcctcaaggagactctcaacgtcttgcttgtggagagtgatgattcaaccaggcaggtcgtcagtgccctgcttcgttgctgcatgtaccaaggcacagaactcatggactaagcttgctgtggagatcgacagtccacaagctatgtctctggaccagttagccgatccagccaatagcacctgtgcacaagtaatccactcaaagtcagagatatgtagccacagatggctaccaggtagcagcaacagaaactgcaagaagcaaaaatacactaatgatgactttaagggaaaggacttggagataggtggccctagaaatttatatatggatcaccaatcttccccaaatgagagacccatcaaagcagcagatcatgaaaacaactccaaggagtcaatgatagaaaatttagaggagccaactgttcgagctgctgacctaattggttcaatggccaaaaacatggatacccaacaggcagcaagagctgcagaagatacccctaatttctcttccaaagtgccagaagggaaaggtaagaatgaccagcatgataattatgttttgccatcacttgagctgagtttgaagaggtcgagatcatgtggagatggtgccaacgatacagtcaatgacgatgaacagcggaatagtgcattaaggcgatcgaatctctcggcttttacaaggtaccatacatctgcggcttccaatcaaggtgggacaggattggtaggtagctgttcgccgcatgataacagctcggaggctgtgaaaacggattctacttacaacatgaagtcaaattcagatgctgccgcaataaaacaaggctccaacggcagtagcaataacaatgacatgggttccactacaaaggatgttgtgacaaaacccagcacaaataacgagagggtgatgttgccctctgctattaaggctaatggatacacgtcaacattccatcctgtgcagcagtggatggttccagataatgcgacagcagggaaagcgaaggctgatgaagtggccaacaatgcaggcagaaatagtcatcctggtgacgtgcagagcaacctgacgcaacaacatcgtccaacccttcattacgtccattttgagaatagtggatcaggtgccctgcaatgtggttcctccaatgtatttgatcccccacttgaaggccaggctaccaataactatggtgtgaaagccgggagcaactcaggcagcaacaaggggcagaataatgggagtacagctggtgcgagcacggctgctgcaaatgctggacggacagatacagagatacgggctatcgataaaagtggacctggaggtggcagtgggagtggcaatgacacatatgtcagacggcttgctgcgagcatgacaccacgacaagaacagctaaagaaatatagagagaaaaagaaagatcggaactttgggaaaaaggtgcggtaccagagcagaaagaggctagccgaccagcggccaagggttcgtggacagttcgtgaagcaagctgtgcaaaatcaagagggagatggagagagatgacccccccccccctctggcttcagctcatggttgttagacgtggcggttgatgattcttccttctctggtgtgatctgatatgatcgacaacacaccatccttccttttcttcattggtttcttcacatctagaatttactgcctgaccgggaaaaaataagctaggaacttctatacatgtgtatgcatttctaatcatgtagaagaataagtgtgtcttgactctagataattttaggtagagtcatgctcgctctcctacattatgtgatgtaactgaagtgttgttgtgttgtcatgtatggtcttggatcactttctgtcaatatattactagcccacaactactattaatttgatgagatgtatataattaaaaatattgtaatagtccttcctttggtaggtagacaacaaacaatcttgaattcagtgcatacataaatcactgtatagatatatacacgttggggtctgctttagatgaaggtcctcaaaacattaactaatcagttattttttgagtctgtttcaagtgtaacagggtaaatgctaaaggacaccttcgttcgaagatgatgcgcggtgatcacggttgccaagacgaagctacaaacttcagaccgcggcgcatgcacgtgatgaggtaggtggcaagagaagggccaaatcccagagacttgtttatcaagattactaaggcaaaagacgacaatacccttaatcatctttgtagctcatgcgtataggcttgagggcatgaatgtaatttttatgaagctatacatcttgattataagcaattgaataggttgcaaaaactgatttctagttaccacatcataaataatggaatgtaaactctatgtacattgtttgccagtacttgttggactaacaaatatagaaagtgaaatgtccaacataatgtcacatggtttatacctttctgct

SEQ ID NO: 67654 - DNA, 3273 bp, Zea Mays
cacctcctggcctggcttccttcgcctccctcccttgggaccggtatatctactacctctgttccttcacctctccttcgccgccgcttccctcctcctcctcctccacctccgccctcgatccgaccgcgggccctaaagcacttttcgcctttttcggaggccacgggtcaccaccgacctccattccattcatttgccgattcacctacacagacacacacagaaactttggatgcaaacgaggagggagcccttgaaggcaaaccaatgcgcaccgccgcttattcattaaccaaagacttgcatccaaccaatcccaccacttgtgtctacctcttcgagtcaggctgatgggaggtgcctgtcagcaactctccgtggacggagatgcgaggacgcctgcgaatgaccgcgatccggccggcctgctccagcatgatgatacggaaaaccagcagcagcagcaggcctgctgggagcgcttcctcctcaaggagactctcaacgtcttgcttgtggagagtgatgattcaaccaggcaggtcgtcagtgccctgcttcgttgctgcatgtaccaagaactcatggactaagcttgctgtggagatcgacagtccacaagctatgtctctggaccagttagccgatccagccaatagcacctgtgcacaagtaatccactcaaagtcagagatatgtagccacagatggctaccaggtagcagcaacagaaactgcaagaagcaaaaatacactaatgatgactttaagggaaaagacttggagatagatggtcctggaaatctatatatggatcaccaatcttccccaaatgagagacccatcaaagcagcagatcatgaaaacaattccaaggagtcaatgatgggaaatttaggggatgcaactgttcgagctgctgacctaattggttcaatggccaaaaacatggatgcccaacaggcagcaagagctgcagatacccctaatttctcttctgaagtgccagaagggaaaggtaagaatgatgactttaagggaaaggacttggagataggtggccctagaaatttatatatggatcaccaatcttccccaaatgagagacccatcaaagcagcagatcatgaaaacaactccaaggagtcaatgatagaaaatttagaggagccaactgttcgagctgctgacctaattggttcaatggccaaaaacatggatacccaacaggcagcaagagctgcagaagatacccctaatttctcttccaaagtgccagaagggaaaggtaagaatgaccagcatgataattatgttttgccatcacttgagctgagtttgaagaggtcgagatcatgtggagatggtgccaacgatacagtcaatgacgatgaacagcggaatagtgcattaaggcgatcgaatctctcggcttttacaaggtaccatacatctgcggcttccaatcaaggtgggacaggattggtaggtagctgttcgccgcatgataacagctcggaggctgtgaaaacggattctacttacaacatgaagtcaaattcagatgctgccgcaataaaacaaggctccaacggcagtagcaataacaatgacatgggttccactacaaaggatgttgtgacaaaacccagcacaaataacgagagggtgatgttgccctctgctattaaggctaatggatacacgtcaacattccatcctgtgcagcagtggatggttccagataatgcgacagcagggaaagcgaaggctgatgaagtggccaacaatgcaggcagaaatagtcatcctggtgacgtgcagagcaacctgacgcaacaacatcgtccaacccttcattacgtccattttgagaatagtggatcaggtgccctgcaatgtggttcctccaatgtatttgatcccccacttgaaggccaggctaccaataactatggtgtgaaagccgggagcaactcaggcagcaacaaggggcagaataatgggagtacagctggtgcgagcacggctgctgcaaatgctggacggacagatacagagatacgggctatcgataaaagtggacctggaggtggcagtgggagtggcaatgacacatatgtcagacggcttgctgcgagcatgacaccacgacaagaacagctaaagaaatatagagagaaaaagaaagatcggaactttgggaaaaaggtgcggtaccagagcagaaagaggctagccgaccagcggccaagggttcgtggacagttcgtgaagcaagctgtgcaaaatcaagagggagatggagagagatgacccccccccccctctggcttcagctcatggttgttagacgtggcggttgatgattcttccttctctggtgtgatctgatatgatcgacaacacaccatccttccttttcttcattggtttcttcacatctagaatttactgcctgaccgggaaaaaataagctaggaacttctatacatgtgtatgcatttctaatcatgtagaagaataagtgtgtcttgactctagataattttaggtagagtcatgctcgctctcctacattatgtgatgtaactgaagtgttgttgtgttgtcatgtatggtcttggatcactttctgtcaatatattactagcccacaactactattaatttgatgagatgtatataattaaaaatattgtaatagtccttcctttggtaggtagacaacaaacaatcttgaattcagtgcatacataaatcactgtatagatatatacacgttggggtctgctttagatgaaggtcctcaaaacattaactaatcagttattttttgagtctgtttcaagtgtaacagggtaaatgctaaaggacaccttcgttcgaagatgatgcgcggtgatcacggttgccaagacgaagctacaaacttcagaccgcggcgcatgcacgtgatgaggtaggtggcaagagaagggccaaatcccagagacttgtttatcaagattactaaggcaaaagacgacaatacccttaatcatctttgtagctcatgcgtataggcttgagggcatgaatgtaatttttatgaagctatacatcttgattataagcaattgaataggttgcaaaaactgatttctagttaccacatcataaataatggaatgtaaactctatgtacattgtttgccagtacttgttggactaacaaatatagaaagtgaaatgtccaacataatgtcacatggtttatacctttctgct

SEQ ID NO: 67655 - DNA, 3513 bp, Zea Mays
ctcctggcctggcttccttcgcctccctcccttgggaccggtatatctactacctctgttccttcacctctccttcgccgccgcttccctcctcctcctcctccacctccgccctcgatccgaccgcgggccctaaagcacttttcgcctttttcggaggccacgggtcaccaccgacctccattccattcatttgccgattcacctacacagacacacacagaaactttggatgcaaacgaggagggagcccttgaaggcaaaccaatgcgcaccgccgcttattcattaaccaaagacttgcatccaaccaatcccaccacttgtgtctacctcttcgagtcaggctgatgggaggtgcctgtcagcaactctccgtggacggagatgcgaggacgcctgcgaatgaccgcgatccggccggcctgctccagcatgatgatacggaaaaccagcagcagcagcaggcctgctgggagcgcttcctcctcaaggagactctcaacgtcttgcttgtggagagtgatgattcaaccaggcaggtcgtcagtgccctgcttcgttgctgcatgtaccaagttatctctgccgaaaatggccagcaagcatgggcttatcttgaagataagagaaacaacatagatcttgttttgactgaggtttttatgcccggtgtatctggtatttctctgctgagtagaatcatgagccacaatatttgcaagaacattccagtgattatgatgtcttcgagtgatgctatgagtacagtctttaaatgtttgtcaaaaggtgctgttgactttttagtcaagcctatacgtaagaatgaacttaagaacctttggcagcatgtgtggagacaacggtgtcacagtctctcctgcgtgttcgaaaaaaaaaaaagtttacttatttggaactcagtccagtggtagtggaagtgaaagtggcattcagacgcagaagtgtaccaagtcaaaaggtgccaatgaatccggtaacaacagtggtagcaacgacgatgaagctggcatgggacttaatgcaagggatgacagtgataatggcagtggcactcaagcacagaactcatggactaagcttgctgtggagatcgacagtccacaagctatgtctctggaccagttagccgatccagccaatagcacctgtgcacaagtaatccactcaaagtcagagatatgtagccacagatggctaccaggtagcagcaacagaaactgcaagaagcaaaaatacactaatgatgactttaagggaaaggacttggagataggtggccctagaaatttatatatggatcaccaatcttccccaaatgagagacccatcaaagcagcagatcatgaaaacaactccaaggagtcaatgatagaaaatttagaggagccaactgttcgagctgctgacctaattggttcaatggccaaaaacatggatacccaacaggcagcaagagctgcagaagatacccctaatttctcttccaaagtgccagaagggaaaggtaagaatgaccagcatgataattatgttttgccatcacttgagctgagtttgaagaggtcgagatcatgtggagatggtgccaacgatacagtcaatgacgatgaacagcggaatagtgcattaaggcgatcgaatctctcggcttttacaaggtaccatacatctgcggcttccaatcaaggtgggacaggattggtaggtagctgttcgccgcatgataacagctcggaggctgtgaaaacggattctacttacaacatgaagtcaaattcagatgctgccgcaataaaacaaggctccaacggcagtagcaataacaatgacatgggttccactacaaaggatgttgtgacaaaacccagcacaaataacgagagggtgatgttgccctctgctattaaggctaatggatacacgtcaacattccatcctgtgcagcagtggatggttccagataatgcgacagcagggaaagcgaaggctgatgaagtggccaacaatgcaggcagaaatagtcatcctggtgacgtgcagagcaacctgacgcaacaacatcgtccaacccttcattacgtccattttgagaatagtggatcaggtgccctgcaatgtggttcctccaatgtatttgatcccccacttgaaggccaggctaccaataactatggtgtgaaagccgggagcaactcaggcagcaacaaggggcagaataatgggagtacagctggtgcgagcacggctgctgcaaatgctggacggacagatacagagatacgggctatcgataaaagtggacctggaggtggcagtgggagtggcaatgacacatatgtcagacggcttgctgcgagcatgacaccacgacaagaacagctaaagaaatatagagagaaaaagaaagatcggaactttgggaaaaaggtgcggtaccagagcagaaagaggctagccgaccagcggccaagggttcgtggacagttcgtgaagcaagctgtgcaaaatcaagagggagatggagagagatgacccccccccccctctggcttcagctcatggttgttagacgtggcggttgatgattcttccttctctggtgtgatctgatatgatcgacaacacaccatccttccttttcttcattggtttcttcacatctagaatttactgcctgaccgggaaaaaataagctaggaacttctatacatgtgtatgcatttctaatcatgtagaagaataagtgtgtcttgactctagataattttaggtagagtcatgctcgctctcctacattatgtgatgtaactgaagtgttgttgtgttgtcatgtatggtcttggatcactttctgtcaatatattactagcccacaactactattaatttgatgagatgtatataattaaaaatattgtaatagtccttcctttggtaggtagacaacaaacaatcttgaattcagtgcatacataaatcactgtatagatatatacacgttggggtctgctttagatgaaggtcctcaaaacattaactaatcagttattttttgagtctgtttcaagtgtaacagggtaaatgctaaaggacaccttcgttcgaagatgatgcgcggtgatcacggttgccaagacgaagctacaaacttcagaccgcggcgcatgcacgtgatgaggtaggtggcaagagaagggccaaatcccagagacttgtttatcaagattactaaggcaaaagacgacaatacccttaatcatctttgtagctcatgcgtataggcttgagggcatgaatgtaatttttatgaagctatacatcttgattataagcaattgaataggttgcaaaaactgatttctagttaccacatcataaataatggaatgtaaactctatgtacattgtttgccagtacttgttggactaacaaatatagaaagtgaaatgtccaacataatgtcacatggtttatacctttctgct

SEQ ID NO: 67656 - DNA, 3832 bp, Zea Mays
ccttcgcctccctcccttgggaccggtatatctactacctctgttccttcacctctccttcgccgccgcttccctcctcctcctcctccacctccgccctcgatccgaccgcgggccctaaagctcttgcagcacttttcgcctttttcggaggccacgggtcaccaccgacctccattccattcatttgccgattcacctacacagacacacacagaaactttggatgcaaacgaggagggagcccttgaaggcaaaccaatgcgcaccgccgcttattcattaaccaaagacttgcatccaaccaatcccaccacttgtgtctacctcttcgagtcaggctgatgggaggtgcctgtcagcaactctccgtggacggagatgcgaggacgcctgcgaatgaccgcgatccggccggcctgctccagcatgatgatacggaaaaccagcagcagcagcaggcctgctgggagcgcttcctcctcaaggagactctcaacgtcttgcttgtggagagtgatgattcaaccaggcaggtcgtcagtgccctgcttcgttgctgcatgtaccaagttatctctgccgaaaatggccagcaagcatgggcttatcttgaagataagagaaacaacatagatcttgttttgactgaggtttttatgcccggtgtatctggtatttctctgctgagtagaatcatgagccacaatatttgcaagaacattccagtgattagtaagtaactttcatctctacagtgtagttcatatcatgattaaaatgttgctttcatcatttatttagtcccaatgcttttagctgctacactgatgttgtttgtgtgcagtgatgtcttcgagtgatgctatgagtacagtctttaaatgtttgtcaaaaggtgctgttgactttttagtcaagcctatacgtaagaatgaacttaagaacctttggcagcatgtgtggagacaacggtgtcacagttggtagtggaagtgaaagtggcattcagacgcagaagtgtaccaagtcaaaaggtgccaatgaatccggtaacaacagtggtagcaacgacgatgaagctggcatgggacttaatgcaagggatgacagtgataatggcagtggcactcaagcacagaactcatggactaagcttgctgtggagatcgacagtccacaagctatgtctctggaccagttagccgatccagccaatagcacctgtgcacaagtaatccactcaaagtcagagatatgtagccacagatggctaccaggtagcagcaacagaaactgcaagaagcaaaaatacactaatgatgactttaagggaaaagacttggagatagatggtcctggaaatctatatatggatcaccaatcttccccaaatgagagacccatcaaagcagcagatcatgaaaacaattccaaggagtcaatgatgggaaatttaggggatgcaactgttcgagctgctgacctaattggttcaatggccaaaaacatggatgcccaacaggcagcaagagctgcagatacccctaatttctcttctgaagtgccagaagggaaaggtaagaatgatgactttaagggaaaggacttggagataggtggccctagaaatttatatatggatcaccaatcttccccaaatgagagacccatcaaagcagcagatcatgaaaacaactccaaggagtcaatgatagaaaatttagaggagccaactgttcgagctgctgacctaattggttcaatggccaaaaacatggatacccaacaggcagcaagagctgcagaagatacccctaatttctcttccaaagtgccagaagggaaaggtaagaatgaccagcatgataattatgttttgccatcacttgagctgagtttgaagaggtcgagatcatgtggagatggtgccaacgatacagtcaatgacgatgaacagcggaatagtgcattaaggcgatcgaatctctcggcttttacaaggtaccatacatctgcggcttccaatcaaggtgggacaggattggtaggtagctgttcgccgcatgataacagctcggaggctgtgaaaacggattctacttacaacatgaagtcaaattcagatgctgccgcaataaaacaaggctccaacggcagtagcaataacaatgacatgggttccactacaaaggatgttgtgacaaaacccagcacaaataacgagagggtgatgttgccctctgctattaaggctaatggatacacgtcaacattccatcctgtgcagcagtggatggttccagataatgcgacagcagggaaagcgaaggctgatgaagtggccaacaatgcaggcagaaatagtcatcctggtgacgtgcagagcaacctgacgcaacaacatcgtccaacccttcattacgtccattttgagaatagtggatcaggtgccctgcaatgtggttcctccaatgtatttgatcccccacttgaaggccaggctaccaataactatggtgtgaaagccgggagcaactcaggcagcaacaaggggcagaataatgggagtacagctggtgcgagcacggctgctgcaaatgctggacggacagatacagagatacgggctatcgataaaagtggacctggaggtggcagtgggagtggcaatgacacatatgtcagacggcttgctgcgagcatgacaccacgacaagaacagctaaagaaatatagagagaaaaagaaagatcggaactttgggaaaaaggtgcggtaccagagcagaaagaggctagccgaccagcggccaagggttcgtggacagttcgtgaagcaagctgtgcaaaatcaagagggagatggagagagatgacccccccccccctctggcttcagctcatggttgttagacgtggcggttgatgattcttccttctctggtgtgatctgatatgatcgacaacacaccatccttccttttcttcattggtttcttcacatctagaatttactgcctgaccgggaaaaaataagctaggaacttctatacatgtgtatgcatttctaatcatgtagaagaataagtgtgtcttgactctagataattttaggtagagtcatgctcgctctcctacattatgtgatgtaactgaagtgttgttgtgttgtcatgtatggtcttggatcactttctgtcaatatattactagcccacaactactattaatttgatgagatgtatataattaaaaatattgtaatagtccttcctttggtaggtagacaacaaacaatcttgaattcagtgcatacataaatcactgtatagatatatacacgttggggtctgctttagatgaaggtcctcaaaacattaactaatcagttattttttgagtctgtttcaagtgtaacagggtaaatgctaaaggacaccttcgttcgaagatgatgcgcggtgatcacggttgccaagacgaagctacaaacttcagaccgcggcgcatgcacgtgatgaggtaggtggcaagagaagggccaaatcccagagacttgtttatcaagattactaaggcaaaagacgacaatacccttaatcatctttgtagctcatgcgtataggcttgagggcatgaatgtaatttttatgaagctatacatcttgattataagcaattgaataggttgcaaaaactgatttctagttaccacatcataaataatggaatgtaaactctatgtacattgtttgccagtacttgttggactaacaaatatagaaagtgaaatgtccaacataatgtcacatggtttatacctttctgct

SEQ ID NO: 67657 - DNA, 3480 bp, Zea Mays
cctccctcccttgggaccggtatatctactacctctgttccttcacctctccttcgccgccgcttccctcctcctcctcctccacctccgccctcgatccgaccgcgggccctaaagcacttttcgcctttttcggaggccacgggtcaccaccgacctccattccattcatttgccgattcacctacacagacacacacagaaactttggatgcaaacgaggagggagcccttgaaggcaaaccaatgcgcaccgccgcttattcattaaccaaagacttgcatccaaccaatcccaccacttgtgtctacctcttcgagtcaggctgatgggaggtgcctgtcagcaactctccgtggacggagatgcgaggacgcctgcgaatgaccgcgatccggccggcctgctccagcatgatgatacggaaaaccagcagcagcagcaggcctgctgggagcgcttcctcctcaaggagactctcaacgtcttgcttgtggagagtgatgattcaaccaggcaggtcgtcagtgccctgcttcgttgctgcatgtaccaagttatctctgccgaaaatggccagcaagcatgggcttatcttgaagataagagaaacaacatagatcttgttttgactgaggtttttatgcccggtgtatctggtatttctctgctgagtagaatcatgagccacaatatttgcaagaacattccagtgattagtaagtaactttcatctctacagtgtagttcatatcatgattaaaatgttgctttcatcatttatttagtcccaatgcttttagctgctacactgatgttgtttgtgtgcagtgatgtcttcgagtgatgctatgagtacagtctttaaatgtttgtcaaaaggtgctgttgactttttagtcaagcctatacgtaagaatgaacttaagaacctttggcagcatgtgtggagacaacggtgtcacagttccagtggtagtggaagtgaaagtggcattcagacgcagaagtgtaccaagtcaaaaggtgccaatgaatccggtaacaacagtggtagcaacgacgatgaagctggcatgggacttaatgcaagggatgacagtgataatggcagtggcactcaagcacagaactcatggactaagcttgctgtggagatcgacagtccacaagctatgtctctggaccagttagccgatccagccaatagcacctgtgcacaagtaatccactcaaagtcagagatatgtagccacagatggctaccaggtagcagcaacagaaactgcaagaagcaaaaatacactaatgatgactttaagggaaaggacttggagataggtggccctagaaatttatatatggatcaccaatcttccccaaatgagagacccatcaaagcagcagatcatgaaaacaactccaaggagtcaatgatagaaaatttagaggagccaactgttcgagctgctgacctaattggttcaatggccaaaaacatggatacccaacaggcagcaagagctgcagaagatacccctaatttctcttccaaagtgccagaagggaaagatggtgccaacgatacagtcaatgacgatgaacagcggaatagtgcattaaggcgatcgaatctctcggcttttacaaggtaccatacatctgcggcttccaatcaaggtgggacaggattggtaggtagctgttcgccgcatgataacagctcggaggctgtgaaaacggattctacttacaacatgaagtcaaattcagatgctgccgcaataaaacaaggctccaacggcagtagcaataacaatgacatgggttccactacaaaggatgttgtgacaaaacccagcacaaataacgagagggtgatgttgccctctgctattaaggctaatggatacacgtcaacattccatcctgtgcagcagtggatggttccagataatgcgacagcagggaaagcgaaggctgatgaagtggccaacaatgcaggcagaaatagtcatcctggtgacgtgcagagcaacctgacgcaacaacatcgtccaacccttcattacgtccattttgagaatagtggatcaggtgccctgcaatgtggttcctccaatgtatttgatcccccacttgaaggccaggctaccaataactatggtgtgaaagccgggagcaactcaggcagcaacaaggggcagaataatgggagtacagctggtgcgagcacggctgctgcaaatgctggacggacagatacagagatacgggctatcgataaaagtggacctggaggtggcagtgggagtggcaatgacacatatgtcagacggcttgctgcgagcatgacaccacgacaagaacagctaaagaaatatagagagaaaaagaaagatcggaactttgggaaaaaggtgcggtaccagagcagaaagaggctagccgaccagcggccaagggttcgtggacagttcgtgaagcaagctgtgcaaaatcaagagggagatggagagagatgacccccccccccctctggcttcagctcatggttgttagacgtggcggttgatgattcttccttctctggtgtgatctgatatgatcgacaacacaccatccttccttttcttcattggtttcttcacatctagaatttactgcctgaccgggaaaaaataagctaggaacttctatacatgtgtatgcatttctaatcatgtagaagaataagtgtgtcttgactctagataattttaggtagagtcatgctcgctctcctacattatgtgatgtaactgaagtgttgttgtgttgtcatgtatggtcttggatcactttctgtcaatatattactagcccacaactactattaatttgatgagatgtatataattaaaaatattgtaatagtccttcctttggtaggtagacaacaaacaatcttgaattcagtgcatacataaatcactgtatagatatatacacgttggggtctgctttagatgaaggtcctcaaaacattaactaatcagttattttttgagtctgtttcaagtgtaacagggtaaatgctaaaggacaccttcgttcgaagatgatgcgcggtgatcacggttgccaagacgaagctacaaacttcagaccgcggcgcatgcacgtgatgaggtaggtggcaagagaagggccaaatcccagagacttgtttatcaagattactaaggcaaaagacgacaatacccttaatcatctttgtagctcatgcgtataggcttgagggcatgaatgtaatttttatgaagctatacatcttgattataagcaattgaataggttgcaaaaactgatttctagttaccacatcataaataatggaatgtaaactctatgtacattgtttgccagtacttgttggactaacaaatatagaaagtgaaatgtccaacataatgtcacatggtttatacctttctgct

SEQ ID NO: 67658 - DNA, 3703 bp, Zea Mays
ctccctcccttgggaccggtatatctactacctctgttccttcacctctccttcgccgccgcttccctcctcctcctcctccacctccgccctcgatccgaccgcgggccctaaagcacttttcgcctttttcggaggccacgggtcaccaccgacctccattccattcatttgccgattcacctacacagacacacacagaaactttggatgcaaacgaggagggagcccttgaaggcaaaccaatgcgcaccgccgcttattcattaaccaaagacttgcatccaaccaatcccaccacttgtgtctacctcttcgagtcaggctgatgggaggtgcctgtcagcaactctccgtggacggagatgcgaggacgcctgcgaatgaccgcgatccggccggcctgctccagcatgatgatacggaaaaccagcagcagcagcaggcctgctgggagcgcttcctcctcaaggagactctcaacgtcttgcttgtggagagtgatgattcaaccaggcaggtcgtcagtgccctgcttcgttgctgcatgtaccaagttatctctgccgaaaatggccagcaagcatgggcttatcttgaagataagagaaacaacatagatcttgttttgactgaggtttttatgcccggtgtatctggtatttctctgctgagtagaatcatgagccacaatatttgcaagaacattccagtgattatgatgtcttcgagtgatgctatgagtacagtctttaaatgtttgtcaaaaggtgctgttgactttttagtcaagcctatacgtaagaatgaacttaagaacctttggcagcatgtgtggagacaacggtgtcacagttccagtggtagtggaagtgaaagtggcattcagacgcagaagtgtaccaagtcaaaaggtgccaatgaatccggtaacaacagtggtagcaacgacgatgaagctggcatgggacttaatgcaagggatgacagtgataatggcagtggcactcaaaactcatggactaagcttgctgtggagatcgacagtccacaagctatgtctctggaccagttagccgatccagccaatagcacctgtgcacaagtaatccactcaaagtcagagatatgtagccacagatggctaccaggtagcagcaacagaaactgcaagaagcaaaaatacactaatgatgactttaagggaaaagacttggagatagatggtcctggaaatctatatatggatcaccaatcttccccaaatgagagacccatcaaagcagcagatcatgaaaacaattccaaggagtcaatgatgggaaatttaggggatgcaactgttcgagctgctgacctaattggttcaatggccaaaaacatggatgcccaacaggcagcaagagctgcagatacccctaatttctcttctgaagtgccagaagggaaaggtaagaatgatgactttaagggaaaggacttggagataggtggccctagaaatttatatatggatcaccaatcttccccaaatgagagacccatcaaagcagcagatcatgaaaacaactccaaggagtcaatgatagaaaatttagaggagccaactgttcgagctgctgacctaattggttcaatggccaaaaacatggatacccaacaggcagcaagagctgcagaagatacccctaatttctcttccaaagtgccagaagggaaaggtaagaatgaccagcatgataattatgttttgccatcacttgagctgagtttgaagaggtcgagatcatgtggagatggtgccaacgatacagtcaatgacgatgaacagcggaatagtgcattaaggcgatcgaatctctcggcttttacaaggtaccatacatctgcggcttccaatcaaggtgggacaggattggtaggtagctgttcgccgcatgataacagctcggaggctgtgaaaacggattctacttacaacatgaagtcaaattcagatgctgccgcaataaaacaaggctccaacggcagtagcaataacaatgacatgggttccactacaaaggatgttgtgacaaaacccagcacaaataacgagagggtgatgttgccctctgctattaaggctaatggatacacgtcaacattccatcctgtgcagcagtggatggttccagataatgcgacagcagggaaagcgaaggctgatgaagtggccaacaatgcaggcagaaatagtcatcctggtgacgtgcagagcaacctgacgcaacaacatcgtccaacccttcattacgtccattttgagaatagtggatcaggtgccctgcaatgtggttcctccaatgtatttgatcccccacttgaaggccaggctaccaataactatggtgtgaaagccgggagcaactcaggcagcaacaaggggcagaataatgggagtacagctggtgcgagcacggctgctgcaaatgctggacggacagatacagagatacgggctatcgataaaagtggacctggaggtggcagtgggagtggcaatgacacatatgtcagacggcttgctgcgagcatgacaccacgacaagaacagctaaagaaatatagagagaaaaagaaagatcggaactttgggaaaaaggtgcggtaccagagcagaaagaggctagccgaccagcggccaagggttcgtggacagttcgtgaagcaagctgtgcaaaatcaagagggagatggagagagatgacccccccccccctctggcttcagctcatggttgttagacgtggcggttgatgattcttccttctctggtgtgatctgatatgatcgacaacacaccatccttccttttcttcattggtttcttcacatctagaatttactgcctgaccgggaaaaaataagctaggaacttctatacatgtgtatgcatttctaatcatgtagaagaataagtgtgtcttgactctagataattttaggtagagtcatgctcgctctcctacattatgtgatgtaactgaagtgttgttgtgttgtcatgtatggtcttggatcactttctgtcaatatattactagcccacaactactattaatttgatgagatgtatataattaaaaatattgtaatagtccttcctttggtaggtagacaacaaacaatcttgaattcagtgcatacataaatcactgtatagatatatacacgttggggtctgctttagatgaaggtcctcaaaacattaactaatcagttattttttgagtctgtttcaagtgtaacagggtaaatgctaaaggacaccttcgttcgaagatgatgcgcggtgatcacggttgccaagacgaagctacaaacttcagaccgcggcgcatgcacgtgatgaggtaggtggcaagagaagggccaaatcccagagacttgtttatcaagattactaaggcaaaagacgacaatacccttaatcatctttgtagctcatgcgtataggcttgagggcatgaatgtaatttttatgaagctatacatcttgattataagcaattgaataggttgcaaaaactgatttctagttaccacatcataaataatggaatgtaaactctatgtacattgtttgccagtacttgttggactaacaaatatagaaagtgaaatgtccaacataatgtcacatggtttatacctttctgct

SEQ ID NO: 67659 - DNA, 3822 bp, Zea Mays
cttgggaccggtatatctactacctctgttccttcacctctccttcgccgccgcttccctcctcctcctcctccacctccgccctcgatccgaccgcgggccctaaagctcttgcagcacttttcgcctttttcggaggccacgggtcaccaccgacctccattccattcatttgccgattcacctacacagacacacacagaaactttggatgcaaacgaggagggagcccttgaaggcaaaccaatgcgcaccgccgcttattcattaaccaaagacttgcatccaaccaatcccaccacttgtgtctacctcttcgagtcaggctgatgggaggtgcctgtcagcaactctccgtggacggagatgcgaggacgcctgcgaatgaccgcgatccggccggcctgctccagcatgatgatacggaaaaccagcagcagcagcaggcctgctgggagcgcttcctcctcaaggagactctcaacgtcttgcttgtggagagtgatgattcaaccaggcaggtcgtcagtgccctgcttcgttgctgcatgtaccaagttatctctgccgaaaatggccagcaagcatgggcttatcttgaagataagagaaacaacatagatcttgttttgactgaggtttttatgcccggtgtatctggtatttctctgctgagtagaatcatgagccacaatatttgcaagaacattccagtgattagtaagtaactttcatctctacagtgtagttcatatcatgattaaaatgttgctttcatcatttatttagtcccaatgcttttagctgctacactgatgttgtttgtgtgcagtgatgtcttcgagtgatgctatgagtacagtctttaaatgtttgtcaaaaggtgctgttgactttttagtcaagcctatacgtaagaatgaacttaagaacctttggcagcatgtgtggagacaacggtgtcacagttccagtggtagtggaagtgaaagtggcattcagacgcagaagtgtaccaagtcaaaaggtgccaatgaatccggtaacaacagtggtagcaacgacgatgaagctggcatgggacttaatgcaagggatgacagtgataatggcagtggcactcaagcacagaactcatggactaagcttgctgtggagatcgacagtccacaagctatgtctctggaccagttagccgatccagccaatagcacctgtgcacaagtaatccactcaaagtcagagatatgtagccacagatggctaccaggtagcagcaacagaaactgcaagaagcaaaaatacactaatgatgactttaagggaaaagacttggagatagatggtcctggaaatctatatatggatcaccaatcttccccaaatgagagacccatcaaagcagcagatcatgaaaacaattccaaggagtcaatgatgggaaatttaggggatgcaactgttcgagctgctgacctaattggttcaatggccaaaaacatggatgcccaacaggcagcaagagctgcagatacccctaatttctcttctgaagtgccagaagggaaaggtaagaatgatgactttaagggaaaggacttggagataggtggccctagaaatttatatatggatcaccaatcttccccaaatgagagacccatcaaagcagcagatcatgaaaacaactccaaggagtcaatgatagaaaatttagaggagccaactgttcgagctgctgacctaattggttcaatggccaaaaacatggatacccaacaggcagcaagagctgcagaagatacccctaatttctcttccaaagtgccagaagggaaaggtaagaatgaccagcatgataattatgttttgccatcacttgagctgagtttgaagaggtcgagatcatgtggagatggtgccaacgatacagtcaatgacgatgaacagcggaatagtgcattaaggcgatcgaatctctcggcttttacaaggtaccatacatctgcggcttccaatcaaggtgggacaggattggtaggtagctgttcgccgcatgataacagctcggaggctgtgaaaacggattctacttacaacatgaagtcaaattcagatgctgccgcaataaaacaaggctccaacggcagtagcaataacaatgacatgggttccactacaaaggatgttgtgacaaaacccagcacaaataacgagagggtgatgttgccctctgctattaaggctaatggatacacgtcaacattccatcctgtgcagcagtggatggttccagataatgcgacagcagggaaagcgaaggctgatgaagtggccaacaatgcaggcagaaatagtcatcctggtgacgtgcagagcaacctgacgcaacaacatcgtccaacccttcattacgtccattttgagaatagtggatcaggtgccctgcaatgtggttcctccaatgtatttgatcccccacttgaaggccaggctaccaataactatggtgtgaaagccgggagcaactcaggcagcaacaaggggcagaataatgggagtacagctggtgcgagcacggctgctgcaaatgctggacggacagatacagagatacgggctatcgataaaagtggacctggaggtggcagtgggagtggcaatgacacatatgtcagacggcttgctgcgagcatgacaccacgacaagaacagctaaagaaatatagagagaaaaagaaagatcggaactttgggaaaaaggtgcggtaccagagcagaaagaggctagccgaccagcggccaagggttcgtggacagttcgtgaagcaagctgtgcaaaatcaagagggagatggagagagatgacccccccccccctctggcttcagctcatggttgttagacgtggcggttgatgattcttccttctctggtgtgatctgatatgatcgacaacacaccatccttccttttcttcattggtttcttcacatctagaatttactgcctgaccgggaaaaaataagctaggaacttctatacatgtgtatgcatttctaatcatgtagaagaataagtgtgtcttgactctagataattttaggtagagtcatgctcgctctcctacattatgtgatgtaactgaagtgttgttgtgttgtcatgtatggtcttggatcactttctgtcaatatattactagcccacaactactattaatttgatgagatgtatataattaaaaatattgtaatagtccttcctttggtaggtagacaacaaacaatcttgaattcagtgcatacataaatcactgtatagatatatacacgttggggtctgctttagatgaaggtcctcaaaacattaactaatcagttattttttgagtctgtttcaagtgtaacagggtaaatgctaaaggacaccttcgttcgaagatgatgcgcggtgatcacggttgccaagacgaagctacaaacttcagaccgcggcgcatgcacgtgatgaggtaggtggcaagagaagggccaaatcccagagacttgtttatcaagattactaaggcaaaagacgacaatacccttaatcatctttgtagctcatgcgtataggcttgagggcatgaatgtaatttttatgaagctatacatcttgattataagcaattgaataggttgcaaaaactgatttctagttaccacatcataaataatggaatgtaaactctatgtacattgtttgccagtacttgttggactaacaaatatagaaagtgaaatgtccaacataatgtcacatggtttatacctttctgct

SEQ ID NO: 67660 - DNA, 3246 bp, Zea Mays
cttgggaccggtatatctactacctctgttccttcacctctccttcgccgccgcttccctcctcctcctcctccacctccgccctcgatccgaccgcgggccctaaagcacttttcgcctttttcggaggccacgggtcaccaccgacctccattccattcatttgccgattcacctacacagacacacacagaaactttggatgcaaacgaggagggagcccttgaaggcaaaccaatgcgcaccgccgcttattcattaaccaaagacttgcatccaaccaatcccaccacttgtgtctacctcttcgagtcaggctgatgggaggtgcctgtcagcaactctccgtggacggagatgcgaggacgcctgcgaatgaccgcgatccggccggcctgctccagcatgatgatacggaaaaccagcagcagcagcaggcctgctgggagcgcttcctcctcaaggagactctcaacgtcttgcttgtggagagtgatgattcaaccaggcaggtcgtcagtgccctgcttcgttgctgcatgtaccaaggcacagaactcatggactaagcttgctgtggagatcgacagtccacaagctatgtctctggaccagttagccgatccagccaatagcacctgtgcacaagtaatccactcaaagtcagagatatgtagccacagatggctaccaggtagcagcaacagaaactgcaagaagcaaaaatacactaatgatgactttaagggaaaagacttggagatagatggtcctggaaatctatatatggatcaccaatcttccccaaatgagagacccatcaaagcagcagatcatgaaaacaattccaaggagtcaatgatgggaaatttaggggatgcaactgttcgagctgctgacctaattggttcaatggccaaaaacatggatgcccaacaggcagcaagagctgcagatacccctaatttctcttctgaagtgccagaagggaaaggtaagaatgatgactttaagggaaaggacttggagataggtggccctagaaatttatatatggatcaccaatcttccccaaatgagagacccatcaaagcagcagatcatgaaaacaactccaaggagtcaatgatagaaaatttagaggagccaactgttcgagctgctgacctaattggttcaatggccaaaaacatggatacccaacaggcagcaagagctgcagaagatacccctaatttctcttccaaagtgccagaagggaaaggtaagaatgaccagcatgataattatgttttgccatcacttgagctgagtttgaagaggtcgagatcatgtggagatggtgccaacgatacagtcaatgacgatgaacagcggaatagtgcattaaggcgatcgaatctctcggcttttacaaggtaccatacatctgcggcttccaatcaaggtgggacaggattggtaggtagctgttcgccgcatgataacagctcggaggctgtgaaaacggattctacttacaacatgaagtcaaattcagatgctgccgcaataaaacaaggctccaacggcagtagcaataacaatgacatgggttccactacaaaggatgttgtgacaaaacccagcacaaataacgagagggtgatgttgccctctgctattaaggctaatggatacacgtcaacattccatcctgtgcagcagtggatggttccagataatgcgacagcagggaaagcgaaggctgatgaagtggccaacaatgcaggcagaaatagtcatcctggtgacgtgcagagcaacctgacgcaacaacatcgtccaacccttcattacgtccattttgagaatagtggatcaggtgccctgcaatgtggttcctccaatgtatttgatcccccacttgaaggccaggctaccaataactatggtgtgaaagccgggagcaactcaggcagcaacaaggggcagaataatgggagtacagctggtgcgagcacggctgctgcaaatgctggacggacagatacagagatacgggctatcgataaaagtggacctggaggtggcagtgggagtggcaatgacacatatgtcagacggcttgctgcgagcatgacaccacgacaagaacagctaaagaaatatagagagaaaaagaaagatcggaactttgggaaaaaggtgcggtaccagagcagaaagaggctagccgaccagcggccaagggttcgtggacagttcgtgaagcaagctgtgcaaaatcaagagggagatggagagagatgacccccccccccctctggcttcagctcatggttgttagacgtggcggttgatgattcttccttctctggtgtgatctgatatgatcgacaacacaccatccttccttttcttcattggtttcttcacatctagaatttactgcctgaccgggaaaaaataagctaggaacttctatacatgtgtatgcatttctaatcatgtagaagaataagtgtgtcttgactctagataattttaggtagagtcatgctcgctctcctacattatgtgatgtaactgaagtgttgttgtgttgtcatgtatggtcttggatcactttctgtcaatatattactagcccacaactactattaatttgatgagatgtatataattaaaaatattgtaatagtccttcctttggtaggtagacaacaaacaatcttgaattcagtgcatacataaatcactgtatagatatatacacgttggggtctgctttagatgaaggtcctcaaaacattaactaatcagttattttttgagtctgtttcaagtgtaacagggtaaatgctaaaggacaccttcgttcgaagatgatgcgcggtgatcacggttgccaagacgaagctacaaacttcagaccgcggcgcatgcacgtgatgaggtaggtggcaagagaagggccaaatcccagagacttgtttatcaagattactaaggcaaaagacgacaatacccttaatcatctttgtagctcatgcgtataggcttgagggcatgaatgtaatttttatgaagctatacatcttgattataagcaattgaataggttgcaaaaactgatttctagttaccacatcataaataatggaatgtaaactctatgtacattgtttgccagtacttgttggactaacaaatatagaaagtgaaatgtccaacataatgtcacatggtttatacctttctgct

SEQ ID NO: 67661 - DNA, 3346 bp, Zea Mays
tcgccgccgcttccctcctcctcctcctccacctccgccctcgatccgaccgcgggccctaaagcacttttcgcctttttcggaggccacgggtcaccaccgacctccattccattcatttgccgattcacctacacagacacacacagaaactttggatgcaaacgaggagggagcccttgaaggcaaaccaatgcgcaccgccgcttattcattaaccaaagacttgcatccaaccaatcccaccacttgtgtctacctcttcgagtcaggctgatgggaggtgcctgtcagcaactctccgtggacggagatgcgaggacgcctgcgaatgaccgcgatccggccggcctgctccagcatgatgatacggaaaaccagcagcagcagcaggcctgctgggagcgcttcctcctcaaggagactctcaacgtcttgcttgtggagagtgatgattcaaccaggcaggtcgtcagtgccctgcttcgttgctgcatgtaccaagttatctctgccgaaaatggccagcaagcatgggcttatcttgaagataagagaaacaacatagatcttgttttgactgaggtttttatgcccggtgtatctggtatttctctgctgagtagaatcatgagccacaatatttgcaagaacattccagtgattagtaagtaactttcatctctacagtgtagttcatatcatgattaaaatgttgctttcatcatttatttagtcccaatgcttttagctgctacactgatgttgtttgtgtgcagtgatgtcttcgagtgatgctatgagtacagtctttaaatgtttgtcaaaaggtgctgttgactttttagtcaagcctatacgtaagaatgaacttaagaacctttggcagcatgtgtggagacaacggtgtcacagtgcacagaactcatggactaagcttgctgtggagatcgacagtccacaagctatgtctctggaccagttagccgatccagccaatagcacctgtgcacaagtaatccactcaaagtcagagatatgtagccacagatggctaccaggtagcagcaacagaaactgcaagaagcaaaaatacactaatgatgactttaagggaaaggacttggagataggtggccctagaaatttatatatggatcaccaatcttccccaaatgagagacccatcaaagcagcagatcatgaaaacaactccaaggagtcaatgatagaaaatttagaggagccaactgttcgagctgctgacctaattggttcaatggccaaaaacatggatacccaacaggcagcaagagctgcagaagatacccctaatttctcttccaaagtgccagaagggaaaggtaagaatgaccagcatgataattatgttttgccatcacttgagctgagtttgaagaggtcgagatcatgtggagatggtgccaacgatacagtcaatgacgatgaacagcggaatagtgcattaaggcgatcgaatctctcggcttttacaaggtaccatacatctgcggcttccaatcaaggtgggacaggattggtaggtagctgttcgccgcatgataacagctcggaggctgtgaaaacggattctacttacaacatgaagtcaaattcagatgctgccgcaataaaacaaggctccaacggcagtagcaataacaatgacatgggttccactacaaaggatgttgtgacaaaacccagcacaaataacgagagggtgatgttgccctctgctattaaggctaatggatacacgtcaacattccatcctgtgcagcagtggatggttccagataatgcgacagcagggaaagcgaaggctgatgaagtggccaacaatgcaggcagaaatagtcatcctggtgacgtgcagagcaacctgacgcaacaacatcgtccaacccttcattacgtccattttgagaatagtggatcaggtgccctgcaatgtggttcctccaatgtatttgatcccccacttgaaggccaggctaccaataactatggtgtgaaagccgggagcaactcaggcagcaacaaggggcagaataatgggagtacagctggtgcgagcacggctgctgcaaatgctggacggacagatacagagatacgggctatcgataaaagtggacctggaggtggcagtgggagtggcaatgacacatatgtcagacggcttgctgcgagcatgacaccacgacaagaacagctaaagaaatatagagagaaaaagaaagatcggaactttgggaaaaaggtgcggtaccagagcagaaagaggctagccgaccagcggccaagggttcgtggacagttcgtgaagcaagctgtgcaaaatcaagagggagatggagagagatgacccccccccccctctggcttcagctcatggttgttagacgtggcggttgatgattcttccttctctggtgtgatctgatatgatcgacaacacaccatccttccttttcttcattggtttcttcacatctagaatttactgcctgaccgggaaaaaataagctaggaacttctatacatgtgtatgcatttctaatcatgtagaagaataagtgtgtcttgactctagataattttaggtagagtcatgctcgctctcctacattatgtgatgtaactgaagtgttgttgtgttgtcatgtatggtcttggatcactttctgtcaatatattactagcccacaactactattaatttgatgagatgtatataattaaaaatattgtaatagtccttcctttggtaggtagacaacaaacaatcttgaattcagtgcatacataaatcactgtatagatatatacacgttggggtctgctttagatgaaggtcctcaaaacattaactaatcagttattttttgagtctgtttcaagtgtaacagggtaaatgctaaaggacaccttcgttcgaagatgatgcgcggtgatcacggttgccaagacgaagctacaaacttcagaccgcggcgcatgcacgtgatgaggtaggtggcaagagaagggccaaatcccagagacttgtttatcaagattactaaggcaaaagacgacaatacccttaatcatctttgtagctcatgcgtataggcttgagggcatgaatgtaatttttatgaagctatacatcttgattataagcaattgaataggttgcaaaaactgatttctagttaccacatcataaataatggaatgtaaactctatgtacattgtttgccagtacttgttggactaacaaatatagaaagtgaaatgtccaacataatgtcacatggtttatacctttctgct

SEQ ID NO: 67662 - DNA, 3791 bp, Zea Mays
cctcctcctccacctccgccctcgatccgaccgcgggccctaaaggcacttttcgcctttttcggaggccacgggtcaccaccgacctccattccattcatttgccgattcacctacacagacacacacagaaactttggatgcaaacgaggagggagcccttgaaggcaaaccaatgcgcaccgccgcttattcattaaccaaagacttgcatccaaccaatcccaccacttgtgtctacctcttcgagtcaggctgatgggaggtgcctgtcagcaactctccgtggacggagatgcgaggacgcctgcgaatgaccgcgatccggccggcctgctccagcatgatgatacggaaaaccagcagcagcagcaggcctgctgggagcgcttcctcctcaaggagactctcaacgtcttgcttgtggagagtgatgattcaaccaggcaggtcgtcagtgccctgcttcgttgctgcatgtaccaagttatctctgccgaaaatggccagcaagcatgggcttatcttgaagataagagaaacaacatagatcttgttttgactgaggtttttatgcccggtgtatctggtatttctctgctgagtagaatcatgagccacaatatttgcaagaacattccagtgattagtaagtaactttcatctctacagtgtagttcatatcatgattaaaatgttgctttcatcatttatttagtcccaatgcttttagctgctacactgatgttgtttgtgtgcagtgatgtcttcgagtgatgctatgagtacagtctttaaatgtttgtcaaaaggtgctgttgactttttagtcaagcctatacgtaagaatgaacttaagaacctttggcagcatgtgtggagacaacggtgtcacagtctctcctgcgtgttcgaaaaaaaaaaaagtttacttatttggaactcagtccagtggtagtggaagtgaaagtggcattcagacgcagaagtgtaccaagtcaaaaggtgccaatgaatccggtaacaacagtggtagcaacgacgatgaagctggcatgggacttaatgcaagggatgacagtgataatggcagtggcactcaagcacagaactcatggactaagcttgctgtggagatcgacagtccacaagctatgtctctggaccagttagccgatccagccaatagcacctgtgcacaagtaatccactcaaagtcagagatatgtagccacagatggctaccaggtagcagcaacagaaactgcaagaagcaaaaatacactaatgatgactttaagggaaaagacttggagatagatggtcctggaaatctatatatggatcaccaatcttccccaaatgagagacccatcaaagcagcagatcatgaaaacaattccaaggagtcaatgatgggaaatttaggggatgcaactgttcgagctgctgacctaattggttcaatggccaaaaacatggatgcccaacaggcagcaagagctgcagatacccctaatttctcttctgaagtgccagaagggaaagatgactttaagggaaaggacttggagataggtggccctagaaatttatatatggatcaccaatcttccccaaatgagagacccatcaaagcagcagatcatgaaaacaactccaaggagtcaatgatagaaaatttagaggagccaactgttcgagctgctgacctaattggttcaatggccaaaaacatggatacccaacaggcagcaagagctgcagaagatacccctaatttctcttccaaagtgccagaagggaaaggtaagaatgaccagcatgataattatgttttgccatcacttgagctgagtttgaagaggtcgagatcatgtggagatggtgccaacgatacagtcaatgacgatgaacagcggaatagtgcattaaggcgatcgaatctctcggcttttacaaggtaccatacatctgcggcttccaatcaaggtgggacaggattggtaggtagctgttcgccgcatgataacagctcggaggctgtgaaaacggattctacttacaacatgaagtcaaattcagatgctgccgcaataaaacaaggctccaacggcagtagcaataacaatgacatgggttccactacaaaggatgttgtgacaaaacccagcacaaataacgagagggtgatgttgccctctgctattaaggctaatggatacacgtcaacattccatcctgtgcagcagtggatggttccagataatgcgacagcagggaaagcgaaggctgatgaagtggccaacaatgcaggcagaaatagtcatcctggtgacgtgcagagcaacctgacgcaacaacatcgtccaacccttcattacgtccattttgagaatagtggatcaggtgccctgcaatgtggttcctccaatgtatttgatcccccacttgaaggccaggctaccaataactatggtgtgaaagccgggagcaactcaggcagcaacaaggggcagaataatgggagtacagctggtgcgagcacggctgctgcaaatgctggacggacagatacagagatacgggctatcgataaaagtggacctggaggtggcagtgggagtggcaatgacacatatgtcagacggcttgctgcgagcatgacaccacgacaagaacagctaaagaaatatagagagaaaaagaaagatcggaactttgggaaaaaggtgcggtaccagagcagaaagaggctagccgaccagcggccaagggttcgtggacagttcgtgaagcaagctgtgcaaaatcaagagggagatggagagagatgacccccccccccctctggcttcagctcatggttgttagacgtggcggttgatgattcttccttctctggtgtgatctgatatgatcgacaacacaccatccttccttttcttcattggtttcttcacatctagaatttactgcctgaccgggaaaaaataagctaggaacttctatacatgtgtatgcatttctaatcatgtagaagaataagtgtgtcttgactctagataattttaggtagagtcatgctcgctctcctacattatgtgatgtaactgaagtgttgttgtgttgtcatgtatggtcttggatcactttctgtcaatatattactagcccacaactactattaatttgatgagatgtatataattaaaaatattgtaatagtccttcctttggtaggtagacaacaaacaatcttgaattcagtgcatacataaatcactgtatagatatatacacgttggggtctgctttagatgaaggtcctcaaaacattaactaatcagttattttttgagtctgtttcaagtgtaacagggtaaatgctaaaggacaccttcgttcgaagatgatgcgcggtgatcacggttgccaagacgaagctacaaacttcagaccgcggcgcatgcacgtgatgaggtaggtggcaagagaagggccaaatcccagagacttgtttatcaagattactaaggcaaaagacgacaatacccttaatcatctttgtagctcatgcgtataggcttgagggcatgaatgtaatttttatgaagctatacatcttgattataagcaattgaataggttgcaaaaactgatttctagttaccacatcataaataatggaatgtaaactctatgtacattgtttgccagtacttgttggactaacaaatatagaaagtgaaatgtccaacataatgtcacatggtttatacctttctgct

SEQ ID NO: 67663 - DNA, 3206 bp, Zea Mays
cctcctccacctccgccctcgatccgaccgcgggccctaaagcacttttcgcctttttcggaggccacgggtcaccaccgacctccattccattcatttgccgattcacctacacagacacacacagaaactttggatgcaaacgaggagggagcccttgaaggcaaaccaatgcgcaccgccgcttattcattaaccaaagacttgcatccaaccaatcccaccacttgtgtctacctcttcgagtcaggctgatgggaggtgcctgtcagcaactctccgtggacggagatgcgaggacgcctgcgaatgaccgcgatccggccggcctgctccagcatgatgatacggaaaaccagcagcagcagcaggcctgctgggagcgcttcctcctcaaggagactctcaacgtcttgcttgtggagagtgatgattcaaccaggcaggtcgtcagtgccctgcttcgttgctgcatgtaccaagttatctctgccgaaaatggccagcaagcatgggcttatcttgaagataagagaaacaacatagatcttgttttgactgaggtttttatgcccggtgtatctggtatttctctgctgagtagaatcatgagccacaatatttgcaagaacattccagtgattatgatgtcttcgagtgatgctatgagtacagtctttaaatgtttgtcaaaaggtgctgttgactttttagtcaagcctatacgtaagaatgaacttaagaacctttggcagcatgtgtggagacaacggtgtcacagtaactcatggactaagcttgctgtggagatcgacagtccacaagctatgtctctggaccagttagccgatccagccaatagcacctgtgcacaagtaatccactcaaagtcagagatatgtagccacagatggctaccaggtagcagcaacagaaactgcaagaagcaaaaatacactaatgatgactttaagggaaaggacttggagataggtggccctagaaatttatatatggatcaccaatcttccccaaatgagagacccatcaaagcagcagatcatgaaaacaactccaaggagtcaatgatagaaaatttagaggagccaactgttcgagctgctgacctaattggttcaatggccaaaaacatggatacccaacaggcagcaagagctgcagaagatacccctaatttctcttccaaagtgccagaagggaaaggtaagaatgaccagcatgataattatgttttgccatcacttgagctgagtttgaagaggtcgagatcatgtggagatggtgccaacgatacagtcaatgacgatgaacagcggaatagtgcattaaggcgatcgaatctctcggcttttacaaggtaccatacatctgcggcttccaatcaaggtgggacaggattggtaggtagctgttcgccgcatgataacagctcggaggctgtgaaaacggattctacttacaacatgaagtcaaattcagatgctgccgcaataaaacaaggctccaacggcagtagcaataacaatgacatgggttccactacaaaggatgttgtgacaaaacccagcacaaataacgagagggtgatgttgccctctgctattaaggctaatggatacacgtcaacattccatcctgtgcagcagtggatggttccagataatgcgacagcagggaaagcgaaggctgatgaagtggccaacaatgcaggcagaaatagtcatcctggtgacgtgcagagcaacctgacgcaacaacatcgtccaacccttcattacgtccattttgagaatagtggatcaggtgccctgcaatgtggttcctccaatgtatttgatcccccacttgaaggccaggctaccaataactatggtgtgaaagccgggagcaactcaggcagcaacaaggggcagaataatgggagtacagctggtgcgagcacggctgctgcaaatgctggacggacagatacagagatacgggctatcgataaaagtggacctggaggtggcagtgggagtggcaatgacacatatgtcagacggcttgctgcgagcatgacaccacgacaagaacagctaaagaaatatagagagaaaaagaaagatcggaactttgggaaaaaggtgcggtaccagagcagaaagaggctagccgaccagcggccaagggttcgtggacagttcgtgaagcaagctgtgcaaaatcaagagggagatggagagagatgacccccccccccctctggcttcagctcatggttgttagacgtggcggttgatgattcttccttctctggtgtgatctgatatgatcgacaacacaccatccttccttttcttcattggtttcttcacatctagaatttactgcctgaccgggaaaaaataagctaggaacttctatacatgtgtatgcatttctaatcatgtagaagaataagtgtgtcttgactctagataattttaggtagagtcatgctcgctctcctacattatgtgatgtaactgaagtgttgttgtgttgtcatgtatggtcttggatcactttctgtcaatatattactagcccacaactactattaatttgatgagatgtatataattaaaaatattgtaatagtccttcctttggtaggtagacaacaaacaatcttgaattcagtgcatacataaatcactgtatagatatatacacgttggggtctgctttagatgaaggtcctcaaaacattaactaatcagttattttttgagtctgtttcaagtgtaacagggtaaatgctaaaggacaccttcgttcgaagatgatgcgcggtgatcacggttgccaagacgaagctacaaacttcagaccgcggcgcatgcacgtgatgaggtaggtggcaagagaagggccaaatcccagagacttgtttatcaagattactaaggcaaaagacgacaatacccttaatcatctttgtagctcatgcgtataggcttgagggcatgaatgtaatttttatgaagctatacatcttgattataagcaattgaataggttgcaaaaactgatttctagttaccacatcataaataatggaatgtaaactctatgtacattgtttgccagtacttgttggactaacaaatatagaaagtgaaatgtccaacataatgtcacatggtttatacctttctgct

SEQ ID NO: 67664 - DNA, 3463 bp, Zea Mays
cgatccgaccgcgggccctaaagctcttgcagcacttttcgcctttttcggaggccacgggtcaccaccgacctccattccattcatttgccgattcacctacacagacacacacagaaactttggatgcaaacgaggagggagcccttgaaggcaaaccaatgcgcaccgccgcttattcattaaccaaagacttgcatccaaccaatcccaccacttgtgtctacctcttcgagtcaggctgatgggaggtgcctgtcagcaactctccgtggacggagatgcgaggacgcctgcgaatgaccgcgatccggccggcctgctccagcatgatgatacggaaaaccagcagcagcagcaggcctgctgggagcgcttcctcctcaaggagactctcaacgtcttgcttgtggagagtgatgattcaaccaggcaggtcgtcagtgccctgcttcgttgctgcatgtaccaagttatctctgccgaaaatggccagcaagcatgggcttatcttgaagataagagaaacaacatagatcttgttttgactgaggtttttatgcccggtgtatctggtatttctctgctgagtagaatcatgagccacaatatttgcaagaacattccagtgattatgatgtcttcgagtgatgctatgagtacagtctttaaatgtttgtcaaaaggtgctgttgactttttagtcaagcctatacgtaagaatgaacttaagaacctttggcagcatgtgtggagacaacggtgtcacagtaactcatggactaagcttgctgtggagatcgacagtccacaagctatgtctctggaccagttagccgatccagccaatagcacctgtgcacaagtaatccactcaaagtcagagatatgtagccacagatggctaccaggtagcagcaacagaaactgcaagaagcaaaaatacactaatgatgactttaagggaaaagacttggagatagatggtcctggaaatctatatatggatcaccaatcttccccaaatgagagacccatcaaagcagcagatcatgaaaacaattccaaggagtcaatgatgggaaatttaggggatgcaactgttcgagctgctgacctaattggttcaatggccaaaaacatggatgcccaacaggcagcaagagctgcagatacccctaatttctcttctgaagtgccagaagggaaaggtaagaatgatgactttaagggaaaggacttggagataggtggccctagaaatttatatatggatcaccaatcttccccaaatgagagacccatcaaagcagcagatcatgaaaacaactccaaggagtcaatgatagaaaatttagaggagccaactgttcgagctgctgacctaattggttcaatggccaaaaacatggatacccaacaggcagcaagagctgcagaagatacccctaatttctcttccaaagtgccagaagggaaaggtaagaatgaccagcatgataattatgttttgccatcacttgagctgagtttgaagaggtcgagatcatgtggagatggtgccaacgatacagtcaatgacgatgaacagcggaatagtgcattaaggcgatcgaatctctcggcttttacaaggtaccatacatctgcggcttccaatcaaggtgggacaggattggtaggtagctgttcgccgcatgataacagctcggaggctgtgaaaacggattctacttacaacatgaagtcaaattcagatgctgccgcaataaaacaaggctccaacggcagtagcaataacaatgacatgggttccactacaaaggatgttgtgacaaaacccagcacaaataacgagagggtgatgttgccctctgctattaaggctaatggatacacgtcaacattccatcctgtgcagcagtggatggttccagataatgcgacagcagggaaagcgaaggctgatgaagtggccaacaatgcaggcagaaatagtcatcctggtgacgtgcagagcaacctgacgcaacaacatcgtccaacccttcattacgtccattttgagaatagtggatcaggtgccctgcaatgtggttcctccaatgtatttgatcccccacttgaaggccaggctaccaataactatggtgtgaaagccgggagcaactcaggcagcaacaaggggcagaataatgggagtacagctggtgcgagcacggctgctgcaaatgctggacggacagatacagagatacgggctatcgataaaagtggacctggaggtggcagtgggagtggcaatgacacatatgtcagacggcttgctgcgagcatgacaccacgacaagaacagctaaagaaatatagagagaaaaagaaagatcggaactttgggaaaaaggtgcggtaccagagcagaaagaggctagccgaccagcggccaagggttcgtggacagttcgtgaagcaagctgtgcaaaatcaagagggagatggagagagatgacccccccccccctctggcttcagctcatggttgttagacgtggcggttgatgattcttccttctctggtgtgatctgatatgatcgacaacacaccatccttccttttcttcattggtttcttcacatctagaatttactgcctgaccgggaaaaaataagctaggaacttctatacatgtgtatgcatttctaatcatgtagaagaataagtgtgtcttgactctagataattttaggtagagtcatgctcgctctcctacattatgtgatgtaactgaagtgttgttgtgttgtcatgtatggtcttggatcactttctgtcaatatattactagcccacaactactattaatttgatgagatgtatataattaaaaatattgtaatagtccttcctttggtaggtagacaacaaacaatcttgaattcagtgcatacataaatcactgtatagatatatacacgttggggtctgctttagatgaaggtcctcaaaacattaactaatcagttattttttgagtctgtttcaagtgtaacagggtaaatgctaaaggacaccttcgttcgaagatgatgcgcggtgatcacggttgccaagacgaagctacaaacttcagaccgcggcgcatgcacgtgatgaggtaggtggcaagagaagggccaaatcccagagacttgtttatcaagattactaaggcaaaagacgacaatacccttaatcatctttgtagctcatgcgtataggcttgagggcatgaatgtaatttttatgaagctatacatcttgattataagcaattgaataggttgcaaaaactgatttctagttaccacatcataaataatggaatgtaaactctatgtacattgtttgccagtacttgttggactaacaaatatagaaagtgaaatgtccaacataatgtcacatggtttatacctttctgct

SEQ ID NO: 67665 - DNA, 2696 bp, Zea Mays
caccgtccgaccgtgcttaggtgccaaatatggtgctcaacggatctagtagggttgggtggtgttcagagaatgcacagaactcatggactaagcttgctgtggagatcgacagtccacaagctatgtctctggaccagttagccgatccagccaatagcacctgtgcacaagtaatccactcaaagtcagagatatgtagccacagatggctaccaggtagcagcaacagaaactgcaagaagcaaaaatacactaatgatgactttaagggaaaagacttggagatagatggtcctggaaatctatatatggatcaccaatcttccccaaatgagagacccatcaaagcagcagatcatgaaaacaattccaaggagtcaatgatgggaaatttaggggatgcaactgttcgagctgctgacctaattggttcaatggccaaaaacatggatgcccaacaggcagcaagagctgcagatacccctaatttctcttctgaagtgccagaagggaaaggtaagaatgatgactttaagggaaaggacttggagataggtggccctagaaatttatatatggatcaccaatcttccccaaatgagagacccatcaaagcagcagatcatgaaaacaactccaaggagtcaatgatagaaaatttagaggagccaactgttcgagctgctgacctaattggttcaatggccaaaaacatggatacccaacaggcagcaagagctgcagaagatacccctaatttctcttccaaagtgccagaagggaaagatggtgccaacgatacagtcaatgacgatgaacagcggaatagtgcattaaggcgatcgaatctctcggcttttacaaggtaccatacatctgcggcttccaatcaaggtgggacaggattggtaggtagctgttcgccgcatgataacagctcggaggctgtgaaaacggattctacttacaacatgaagtcaaattcagatgctgccgcaataaaacaaggctccaacggcagtagcaataacaatgacatgggttccactacaaaggatgttgtgacaaaacccagcacaaataacgagagggtgatgttgccctctgctattaaggctaatggatacacgtcaacattccatcctgtgcagcagtggatggttccagataatgcgacagcagggaaagcgaaggctgatgaagtggccaacaatgcaggcagaaatagtcatcctggtgacgtgcagagcaacctgacgcaacaacatcgtccaacccttcattacgtccattttgagaatagtggatcaggtgccctgcaatgtggttcctccaatgtatttgatcccccacttgaaggccaggctaccaataactatggtgtgaaagccgggagcaactcaggcagcaacaaggggcagaataatgggagtacagctggtgcgagcacggctgctgcaaatgctggacggacagatacagagatacgggctatcgataaaagtggacctggaggtggcagtgggagtggcaatgacacatatgtcagacggcttgctgcgagcatgacaccacgacaagaacagctaaagaaatatagagagaaaaagaaagatcggaactttgggaaaaaggtgcggtaccagagcagaaagaggctagccgaccagcggccaagggttcgtggacagttcgtgaagcaagctgtgcaaaatcaagagggagatggagagagatgacccccccccccctctggcttcagctcatggttgttagacgtggcggttgatgattcttccttctctggtgtgatctgatatgatcgacaacacaccatccttccttttcttcattggtttcttcacatctagaatttactgcctgaccgggaaaaaataagctaggaacttctatacatgtgtatgcatttctaatcatgtagaagaataagtgtgtcttgactctagataattttaggtagagtcatgctcgctctcctacattatgtgatgtaactgaagtgttgttgtgttgtcatgtatggtcttggatcactttctgtcaatatattactagcccacaactactattaatttgatgagatgtatataattaaaaatattgtaatagtccttcctttggtaggtagacaacaaacaatcttgaattcagtgcatacataaatcactgtatagatatatacacgttggggtctgctttagatgaaggtcctcaaaacattaactaatcagttattttttgagtctgtttcaagtgtaacagggtaaatgctaaaggacaccttcgttcgaagatgatgcgcggtgatcacggttgccaagacgaagctacaaacttcagaccgcggcgcatgcacgtgatgaggtaggtggcaagagaagggccaaatcccagagacttgtttatcaagattactaaggcaaaagacgacaatacccttaatcatctttgtagctcatgcgtataggcttgagggcatgaatgtaatttttatgaagctatacatcttgattataagcaattgaataggttgcaaaaactgatttctagttaccacatcataaataatggaatgtaaactctatgtacattgtttgccagtacttgttggactaacaaatatagaaagtgaaatgtccaacataatgtcacatggtttatacctttctgct

SEQ ID NO: 67666 - DNA, 2497 bp, Zea Mays
cgaccgtgcttaggtgccaaatatggtgctcaacggatctagtagggttgggtggtgttcagagaatgcacagaactcatggactaagcttgctgtggagatcgacagtccacaagctatgtctctggaccagttagccgatccagccaatagcacctgtgcacaagtaatccactcaaagtcagagatatgtagccacagatggctaccaggtagcagcaacagaaactgcaagaagcaaaaatacactaatgatgactttaagggaaaggacttggagataggtggccctagaaatttatatatggatcaccaatcttccccaaatgagagacccatcaaagcagcagatcatgaaaacaactccaaggagtcaatgatagaaaatttagaggagccaactgttcgagctgctgacctaattggttcaatggccaaaaacatggatacccaacaggcagcaagagctgcagaagatacccctaatttctcttccaaagtgccagaagggaaaggtaagaatgaccagcatgataattatgttttgccatcacttgagctgagtttgaagaggtcgagatcatgtggagatggtgccaacgatacagtcaatgacgatgaacagcggaatagtgcattaaggcgatcgaatctctcggcttttacaaggtaccatacatctgcggcttccaatcaaggtgggacaggattggtaggtagctgttcgccgcatgataacagctcggaggctgtgaaaacggattctacttacaacatgaagtcaaattcagatgctgccgcaataaaacaaggctccaacggcagtagcaataacaatgacatgggttccactacaaaggatgttgtgacaaaacccagcacaaataacgagagggtgatgttgccctctgctattaaggctaatggatacacgtcaacattccatcctgtgcagcagtggatggttccagataatgcgacagcagggaaagcgaaggctgatgaagtggccaacaatgcaggcagaaatagtcatcctggtgacgtgcagagcaacctgacgcaacaacatcgtccaacccttcattacgtccattttgagaatagtggatcaggtgccctgcaatgtggttcctccaatgtatttgatcccccacttgaaggccaggctaccaataactatggtgtgaaagccgggagcaactcaggcagcaacaaggggcagaataatgggagtacagctggtgcgagcacggctgctgcaaatgctggacggacagatacagagatacgggctatcgataaaagtggacctggaggtggcagtgggagtggcaatgacacatatgtcagacggcttgctgcgagcatgacaccacgacaagaacagctaaagaaatatagagagaaaaagaaagatcggaactttgggaaaaaggtgcggtaccagagcagaaagaggctagccgaccagcggccaagggttcgtggacagttcgtgaagcaagctgtgcaaaatcaagagggagatggagagagatgacccccccccccctctggcttcagctcatggttgttagacgtggcggttgatgattcttccttctctggtgtgatctgatatgatcgacaacacaccatccttccttttcttcattggtttcttcacatctagaatttactgcctgaccgggaaaaaataagctaggaacttctatacatgtgtatgcatttctaatcatgtagaagaataagtgtgtcttgactctagataattttaggtagagtcatgctcgctctcctacattatgtgatgtaactgaagtgttgttgtgttgtcatgtatggtcttggatcactttctgtcaatatattactagcccacaactactattaatttgatgagatgtatataattaaaaatattgtaatagtccttcctttggtaggtagacaacaaacaatcttgaattcagtgcatacataaatcactgtatagatatatacacgttggggtctgctttagatgaaggtcctcaaaacattaactaatcagttattttttgagtctgtttcaagtgtaacagggtaaatgctaaaggacaccttcgttcgaagatgatgcgcggtgatcacggttgccaagacgaagctacaaacttcagaccgcggcgcatgcacgtgatgaggtaggtggcaagagaagggccaaatcccagagacttgtttatcaagattactaaggcaaaagacgacaatacccttaatcatctttgtagctcatgcgtataggcttgagggcatgaatgtaatttttatgaagctatacatcttgattataagcaattgaataggttgcaaaaactgatttctagttaccacatcataaataatggaatgtaaactctatgtacattgtttgccagtacttgttggactaacaaatatagaaagtgaaatgtccaacataatgtcacatggtttatacctttctgct

SEQ ID NO: 67667 - DNA, 599 bp, Zea Mays
aaaacgtctcattctcatccacacgctagtccgcttcacatgcgtgcagggcgcgtctcagcatcggcaagcaaggacaaggcccaagcgcgtctcggcttttggatggagaaggcccgttaaaggcccaagcgcgtagtaaccctaaccctcgccaccggcctccgcctctcctccagagccagccgccgtgcgctctcgctctccctctgtctgcgacgagacttggtgggctaccgccgctgcgcttcgccaggtgctgacgccttcgccgatcacttcgccggcgatagcactcaccaggaatgggcctgtggacattgctggagggttttttgcttcttgcaaatgcgttagcgatattgaacgaagaccgcttccttggtccaaggggatggagcatgtctgaagtatcaggaaacgggcaaaccaagtcgttcaagggccagatcgtggggcttatctacgctacacagtttctgcggatgcccttaattgctctcaacgttctcatcatcgttgtcaaattggtgtctggctgagcctgatgaattggtatctgttccacctttatctacagaagacgttttgggctccag

SEQ ID NO: 67668 - DNA, 2235 bp, Zea Mays
gataaatagcaggccgcggacacagccgagacctttccatttccagagttccaaggcttcccttttaccccttcgcttcccatggcgccgtgggtgtgggtggcgttgcaggcggccgccgtggctgcgtccgcggcggaggcgctgagcctggacgtccaccaccgctactcggccaccgtgcgggagtgggcggggcaccgcgcgccgccagccgggacggcggagtactacgcggcgctcgccgggcacgacctccgccggcgctcgctggcgggagggggggaggtggccttcgccgacggcaacgacacgtaccggctcaacgaactgggattcttgcattacgcggtggtggcgctggggacgccgaacgtgacgttcctggtggcgctggacaccggcagcgacctcttctgggtgccctgcgactgcatcaactgcgcgccactagtctcacccaactacagggatctcaagttcgacacttacagccctcagaagtcgagcactagccgaaaggtcccatgcagcagcaatttgtgcgatgaacagagtgcatgccggtcagcaagcagcagctgcccctacagcatccaatacctgtctgataacacatcatccaccggtgtgctggttgaggatgtcctgtacctggtcacggagtatgggcggcaacccaaaatcgttacggcccccataacgttcggctgtggacggactcagacgggttcatttctgggcactgctgcacccaatggtctacttggcctgggcatggacaccatatcggtccccagtttgctagcaagtcagggagttgctgctgccaattccttctccatgtgcttcgcacaagatggccatggtagaatcaattttggggacactggaagctcagatcagcaggaaaccccgttaaacatgtataaacaaaatccatactacaacataagcatcactggtgctacggtggggagtaaatccattcacaccaagttcaacgctattgttgactctggcacctctttcacagctctgtctgatccgatgtacactcaaatcactagcagcttcaactcacaagtccaggataagccaagccagcttgactcttctctgccctttgaattttgctactctataagtccaaaggcttctaccaatcctccgaacataagcttcacggcggaaggtggaagcgtgtttcctgtcaatgatccaataattaccattacggactctgtatctaatccgatggcatattgcttggctgttatgaagagcgaaggtgttaacttaataggggagaattttatgtctgggctgaaggtcgtgtttgatcgagagaggaaggtcttgggctggaaaaactttgatttgtgggcaactcaagaagcaaccttccagtgaacccaaatccttctggtgttccccctaaacctgccttgggacctaacagctacactcctgaagctaccaagggcgcctcgcccaatggcacccaagtcaatgtcttgcagccttctgcaagtttttcgccgaagctgcgttgcaacagaaacgtcctcgtcgccgctgctctgctgttcctcgtgatcctttgatcacctcaactccccatgacaatcttttcagaaaccaaatcgacagatatgatagattttagttaaacttggtttacgttgtatgtattgagttacgtatagtgtgatagtatcacattcttttggcctgtgtccacagttccagtaggagttaggatagaacacgggatgagtccatagccctttttttttgcacgttcataatgtacctggtggatgtactgtgtacatattagatatgacttcaggatgtattgattttatagaataattgaataacgatgctcgcatacacagatatatatacttcgcattgcttctctctcgttggtgagagggccccgctcgttgttccgaggcaggctcccgaagccgagaggcaaagctctcggcctgctggatcgcagcgcactctaggagacccctgatttcaccgtagattcggtgttcctcggtggtggatgattctggcattgttcggagcaagattgttgccgcagtaaggttctggctggccttgttaaaggtcggaggggcttcgtgtcatgacccaggtgcgtgacaggattggagattaacagaagataagtgtggtgatttgatttgttgttgggccatatacggcctt

SEQ ID NO: 67669 - DNA, 2230 bp, Zea Mays
gataaatagcaggccgcggacacagccgagacctttccatttccagagttccaaggcttcccttttaccccttcgcttcccatggcgccgtgggtgtgggtggcgttgcaggcggccgccgtggctgcgtccgcggcggaggcgctgagcctggacgtccaccaccgctactcggccaccgtgcgggagtgggcggggcaccgcgcgccgccagccgggacggcggagtactacgcggcgctcgccgggcacgacctccgccggcgctcgctggcgggagggggggaggtggccttcgccgacggcaacgacacgtaccggctcaacgaactgggattcttgcattacgcggtggtggcgctggggacgccgaacgtgacgttcctggtggcgctggacaccggcagcgacctcttctgggtgccctgcgactgcatcaactgcgcgccactagtctcacccaactacagggatctcaagttcgacacttacagccctcagaagtcgagcactagccgaaaggtcccatgcagcagcaatttgtgcgatgaacagagtgcatgccggtcagcaagcagcagctgcccctacagcatccaatacctgtctgataacacatcatccaccggtgtgctggttgaggatgtcctgtacctggtcacggagtatgggcggcaacccaaaatcgttacggcccccataacgttcggctgtggacggactcagacgggttcatttctgggcactgctgcacccaatggtctacttggcctgggcatggacaccatatcggtccccagtttgctagcaagtcagggagttgctgctgccaattccttctccatgtgcttcgcacaagatggccatggtagaatcaattttggggacactggaagctcagatcagcaggaaaccccgttaaacattccatactacaacataagcatcactggtgctacggtggggagtaaatccattcacaccaagttcaacgctattgttgactctggcacctctttcacagctctgtctgatccgatgtacactcaaatcactagcagcttcaactcacaagtccaggataagccaagccagcttgactcttctctgccctttgaattttgctactctataagtccaaaggcttctaccaatcctccgaacataagcttcacggcggaaggtggaagcgtgtttcctgtcaatgatccaataattaccattacggactctgtatctaatccgatggcatattgcttggctgttatgaagagcgaaggtgttaacttaataggggagaattttatgtctgggctgaaggtcgtgtttgatcgagagaggaaggtcttgggctggaaaaactttgattgttacagtgtgggcaactcaagaagcaaccttccagtgaacccaaatccttctggtgttccccctaaacctgccttgggacctaacagctacactcctgaagctaccaagggcgcctcgcccaatggcacccaagtcaatgtcttgcagccttctgcaagtttttcgccgaagctgcgttgcaacagaaacgtcctcgtcgccgctgctctgctgttcctcgtgatcctttgatcacctcaactccccatgacaatcttttcagaaaccaaatcgacagatatgatagattttagttaaacttggtttacgttgtatgtattgagttacgtatagtgtgatagtatcacattcttttggcctgtgtccacagttccagtaggagttaggatagaacacgggatgagtccatagccctttttttttgcacgttcataatgtacctggtggatgtactgtgtacatattagatatgacttcaggatgtattgattttatagaataattgaataacgatgctcgcatacacagatatatatacttcgcattgcttctctctcgttggtgagagggccccgctcgttgttccgaggcaggctcccgaagccgagaggcaaagctctcggcctgctggatcgcagcgcactctaggagacccctgatttcaccgtagattcggtgttcctcggtggtggatgattctggcattgttcggagcaagattgttgccgcagtaaggttctggctggccttgttaaaggtcggaggggcttcgtgtcatgacccaggtgcgtgacaggattggagattaacagaagataagtgtggtgatttgatttgttgttgggccatatacggcctt

SEQ ID NO: 67670 - DNA, 2242 bp, Zea Mays
gataaatagcaggccgcggacacagccgagacctttccatttccagagttccaaggcttcccttttaccccttcgcttcccatggcgccgtgggtgtgggtggcgttgcaggcggccgccgtggctgcgtccgcggcggaggcgctgagcctggacgtccaccaccgctactcggccaccgtgcgggagtgggcggggcaccgcgcgccgccagccgggacggcggagtactacgcggcgctcgccgggcacgacctccgccggcgctcgctggcgggagggggggaggtggccttcgccgacggcaacgacacgtaccggctcaacgaactgggattcttgcattacgcggtggtggcgctggggacgccgaacgtgacgttcctggtggcgctggacaccggcagcgacctcttctgggtgccctgcgactgcatcaactgcgcgccactagtctcacccaactacagggatctcaagttcgacacttacagccctcagaagtcgagcactagccgaaaggtcccatgcagcagcaatttgtgcgatgaacagagtgcatgccggtcagcaagcagcagctgcccctacagcatccaatacctgtctgataacacatcatccaccggtgtgctggttgaggatgtcctgtacctggtcacggagtatgggcggcaacccaaaatcgttacggcccccataacgttcggctgtggacggactcagacgggttcatttctgggcactgctgcacccaatggtctacttggcctgggcatggacaccatatcggtccccagtttgctagcaagtcagggagttgctgctgccaattccttctccatgtgcttcgcacaagatggccatggtagaatcaattttggggacactggaagctcagatcagcaggaaaccccgttaaacatgtataaacaaaatccatactacaacataagcatcactggtgctacggtggggagtaaatccattcacaccaagttcaacgctattgttgactctggcacctctttcacagctctgtctgatccgatgtacactcaaatcactagcagcttcaactcacaagtccaggataagccaagccagcttgactcttctctgccctttgaattttgctactctataagtccaaaggcttctaccaatcctccgaacataagcttcacggcggaaggtggaagcgtgtttcctgtcaatgatccaataattaccattacggactctgtatctaatccgatggcatattgcttggctgttatgaagagcgaaggtgttaacttaataggggagaattttatgtctgggctgaaggtcgtgtttgatcgagagaggaaggtcttgggctggaaaaactttgattgttacagtgtgggcaactcaagaagcaaccttccagtgaacccaaatccttctggtgttccccctaaacctgccttgggacctaacagctacactcctgaagctaccaagggcgcctcgcccaatggcacccaagtcaatgtcttgcagccttctgcaagtttttcgccgaagctgcgttgcaacagaaacgtcctcgtcgccgctgctctgctgttcctcgtgatcctttgatcacctcaactccccatgacaatcttttcagaaaccaaatcgacagatatgatagattttagttaaacttggtttacgttgtatgtattgagttacgtatagtgtgatagtatcacattcttttggcctgtgtccacagttccagtaggagttaggatagaacacgggatgagtccatagccctttttttttgcacgttcataatgtacctggtggatgtactgtgtacatattagatatgacttcaggatgtattgattttatagaataattgaataacgatgctcgcatacacagatatatatacttcgcattgcttctctctcgttggtgagagggccccgctcgttgttccgaggcaggctcccgaagccgagaggcaaagctctcggcctgctggatcgcagcgcactctaggagacccctgatttcaccgtagattcggtgttcctcggtggtggatgattctggcattgttcggagcaagattgttgccgcagtaaggttctggctggccttgttaaaggtcggaggggcttcgtgtcatgacccaggtgcgtgacaggattggagattaacagaagataagtgtggtgatttgatttgttgttgggccatatacggcctt

SEQ ID NO: 67671 - DNA, 645 bp, Zea Mays
cattcgcccacacgagcctacccaaagagcccagagcccgggaggttacttcgctgcctgaggagtccccggcaccggaggtcttgctaccggctggcggcttcttcttccgttcctccccaagtcctcttcccggaggaatcatgatcgtctgcgtcgccgttgtcggccaccagagcttcacggaggcggacgacgccctcaagctccaccacatcgtccactgctctctcgacgtcatcgacgagcgaggtatggctatttgacaaacacaaaggtcaaatttatcatggtcacgactgatcttgatgtcaaagatgcagatgccagaaattttttcaggaagttccatgctgcatatgtagatgccgtctcgaacccgttccatgtcccagggaagaagattgcttcaagaagctttggtgcaagagtaagcaccatcgttaaatccttcggttcagggaccagttgatcgaatgctacttttgtcagactttctgtaatcaaacatatgtgttctctccctgtttgacaaaattactccctaccgtgtacttgtctggtgaacgagatgctattggtactgattgctgaacaaagaaaaatagtggtttattcattcaaaatcctcctcaattccatcca

SEQ ID NO: 67672 - DNA, 721 bp, Zea Mays
ctgctaattacgcacctaacctcccaccgccgccacaccgagcctcctctccggcccccgccttcccagtcccctcatctctcgtctctcctcctgcctcctcgtcctcgccttcccattcccccgccccaaacccccagctcgattcccagtcgtctcgccccgtgatgtcgccggctgctggtggccccgcgcccgcgccagcgccagcgcaatcagcggccgccgttccgcaggcgatcgcggtaccgccggagtccggccgttcggcgcccgaggcgtcccgcagggatccaccggcccaccccgagggggccgatcccaccaatgcggcggcaaggaagacaacgtggagcgtgctggcgcagacccccgccgccgcggcggaggcgaccccagagggcggcggcatcatcggcggggacgcctcgtggccggcgctcgtggagtcgacgcgcgcgtgccccaagtcgggctcgtccgactccctcaatgccctctccgatgtttccggcccgcctccgcagctgatgtgcaaccttatcctgtctacctcccaccagtagaacagtttcagaacatgcatcttcttcggccacccatgcagcctgcttgggttcctcctcatcaggatcaaccaaatctccaagatagtattaggaatcagatagagttctattttagcacaaataatctatgccatgacgaatctctagatcgt

SEQ ID NO: 67673 - DNA, 1111 bp, Zea Mays
gtcctttcttgtttgcaaattgttccactgaacttgtaacagtaattggactttgataccgtggctgcatggtgtgtcatattgcgtccaagcagggttgcattttgatatgtataatacttgcttggagttaacaatacaatttccaagtagcaacggatcatggctagttcagttatctggatagtgtgaaaccatttgaattatataagcgattaagtggaaatcaaaatattgaagaaaaaggttaatatcatggagacttagcttgcatttcataatgaggatggaacaacacaaactagccatgctcttcttgagcctatatttctcatatggttgtaccagactactgtctgccaaagttgaagtttcagattttggaaattaataatctggaatatttgctcaacaacctttgatatgcattactctgatttgggactagataatgaatcatacatactagtaagatttgtagtaattatgtatgatgccctgacgcaattcattttgttttggcaacccgcaatacagactttataacgatcaggatgtggtcttctaacagttatattcaccctatctttattatattattctcagatgagggcgtttacaggtttggtggacaccaactacatactagatgctatccgtggttctgagttattggaagtgcagggagataatgtccggaggcgcaatgattggatggaatggctgcttcattaaggccgtccactagtaaatcagatgccaagatgcagctgcatgccatattgggggaactgaatgaatagaagtcttgatcacggcgtgatggactgatgtacagcgagcgggtctattggaatcgggatgatttttgtttgacgtgatggctgcacgtgaaggcacattattcaaagggaaaataattttacttagggctagcaaatgtttttatggcagtctgtatagttgtccgaaaagaagtgaccaccctgccttctcattatggattattattattattaggtgtcctgttgaacgatttggtgaccgtttgctttgcttttcttggatcaaagtcacgtaaccgcagcccattcaattcaacccactacaa

SEQ ID NO: 67674 - DNA, 3505 bp, Zea Mays
aagcggaagcggcggatgggtaggcaaggaccaaggagagagggcttttaacgcggattagttgggcctcaagacataaaaagcccaaacacatctagttgagcaagcccgtcccatgagcccacgaagtggaggatcagcaagcacgagcgtctcgagctcgcgtcgcgtccgtttgctgcgccctccgccgccgccgcaatgatgcagccgcatctgccctccccggcgaggctggggctcacagcctcgtcgccgtcgctcccgcccaatccggtccccttgaatcccacatcctcgccttcacacggtagcctgccctcgagcgcagccgctggcaccagtgctgccccaaccctaaccacctcgccgtcgctgctaccgctcctgccgccgcttccgcgcgcgcaatcgctgctccagcttatatcgtcgctcgcttccaacctcttggaactctcggcgaaccgcgccgcgtggatctcagcgtaccgaggatcgcttcccaccttcctcccatcggcgtcctccgcgccgccgctcgcaaccccgatctcctccaccaaggacgcgctctctcttgtcaccaccctgcagacgcagctcttcgaggccgtcgccgagctgcaagagaccctcgatctgcaggatgcgcgcgcgcgccttgtccgtgaggcgcgtggcaaggatgctgcgctgctagcctttgcgaagaagctgcatgaggctcaccaagtacttgaccgcctcgtcgacgactacgctgactaccgtcgcgatcccaaacgcccgcgtggcgccgctgctgctgacgatcccgagccggcgtcagagggcgacttcggcacgtccctccactccagccttaagcttgatgacatcctgacctacgcgcaccgcataagttacacaacctttgctccgccggagcatggtgctgggttgcctctccgtgttagcctgccacctgtaccacaggagaatcagatgagagcgtcgcagctgtatctgtttgctgatttggatgtaggggtacccaagaagccattggatgcgaaggacgggatcgcggcagaagtggaggttgcgccgctgtatgaggcaccacaggaggggccgtcgaggctaccaaacaccttgccacccatgttcccgaaggagctaaagccgccgccgggatggaagcctggtgatccgatcacgctaccacttgatgagatactacctggtatcaagggtgaagagcgggaggcacaggcccctgtgccgcaggcacctgtttcagtgcgaccagtggcaccaatgggaccagagacaatacaggtcaagcctgtgcagcttgattttgggagcagtagtagtgacgagtacagtagtgacgttgggagctcagaagaagatgatgaggattagtgctcggtaagctgctctattttgttggctttcaattgtagttgcctttctatcgtatgcttggagtagaatcttctatgctagcgatttttacctgctcatgtcttactgactatttatgaactttagggctgatctcagatcattgtaatggtgctttatcctgtacttcttaaaccaatgtattctaccattgattttacttattatatgcttagtatcaattgtttacctttgttaaattgttatattcctgcaatacagtagattgttaccagtttcaaattgtttgtgttcttaccaaataacaatgatagccgcgagaatggtatttgcacaattgagttacaaggtgttgtgagtgtgaacttctaactttgcacttgtgattcatgttagtcgtttatttgtattctcagtgagcctttgttgtacaggagttactccagatcttctctatatgtggaagcttatctagtttttttttttgaaagagatttatttctctgcttaccagtttacaaggataacagaagatgagaagaacaatagcagcagcaaaacaatctaaatcagacatcacacttgtagctgaattccaacaggatacccgaacccactccaggaacccaaaggcaacaggaacaccacctcttgcacttgtacagaggctcaaatcactgtgtgtctacagatgcagtgcattcagctgtcccaccacaccaccttctcagccgaccgaaaggcatcttacttatcccaatcagcctgccacagtggcgagaatggaaccgtacctccagtggttagggatacagctcatggagctcggcggtaccgcaatgtcgctgctgctgctgctcgtgctcgccgcgtcgccattgcagcaggccagggcggttggcggcggcaggccgcgggtgccggccatcctggtgttcggcgactccatcgtggacacgggcaacaacaacgccgtcctcacgctcaccaagtccaacttcaggccatacggcaaggacctcaacggcggcgtacccaccggacgcttctccaacggccggattccgacggacttcgtagcttcacggctcggcttgaaagatctggttccggcgtatctcggcaccgacctcagcgacgacgacctctgcacgggcgtcagcttcgcgtctgggggcaccggctacgacccgctcacctccactctcgtggaggagctcaacatgttcgcggagtacaaggagaggctcgcaggggtcgtcggagacgaggccgccgccgcaggaatcgtggccgaaagcctgttccttgtctgcgccgggtcggacgacatcgccaacaactactacctcgcccccgtcagacctctgcagtacgacatctcggcgtacgtggatttccttgtggagcaggcctgcgacttcattaggcaactgtaccagcaaggggccaggaggatcgcggtcctggggatgccgccggtcgggtgcgtgccctcgcagcggaccctcgccggcggcctagccagggactgcgaccccgctcgcaaccacgcggcgcagctgtacaactccaggctgaaggaggaggtagtgctgctccagaaggagctggcgtgccagagaatcggctacgtggatatctacgacgtcctgcaggacatgatcacgaacccctgcaaatacggcttcgaggtctccacgagaggatgctgcggcaccggggacttggaggtgtcgctcctgtgcaaccagctgacggcgccgacgtgccctgacgaccggaaatacgtcttctgggacagcttccatcccaccgagaaagcatacgagatcatcgtggactacctgttcccgagatacatagagaacctgctataattacttctgctttaccgtcgcttctttaattcgatcgtttctagttgttgtcaagtttagacatgccgtctttgtttcccaatttaagcttttgctttaaaactcaagacttttcaaggaaatgaaatgacacctgctagcttgttgcaagctgtaaagattgattggttttgtttacttgttccgtgtgaaacaactttaaggctagg

SEQ ID NO: 67675 - DNA, 3513 bp, Zea Mays
aagcggaagcggcggatgggtaggcaaggaccaaggagagagggcttttaacgcggattagttgggcctcaagacataaaaagcccaaacacatctagttgagcaagcccgtcccatgagcccacgaagtggaggatcagcaagcacgagcgtctcgagctcgcgtcgcgtccgtttgctgcgccctccgccgccgccgcaatgatgcagccgcatctgccctccccggcgaggctggggctcacagcctcgtcgccgtcgctcccgcccaatccggtccccttgaatcccacatcctcgccttcacacggtagcctgccctcgagcgcagccgctggcaccagtgctgccccaaccctaaccacctcgccgtcgctgctaccgctcctgccgccgcttccgcgcgcgcaatcgctgctccagcttatatcgtcgctcgcttccaacctcttggaactctcggcgaaccgcgccgcgtggatctcagcgtaccgaggatcgcttcccaccttcctcccatcggcgtcctccgcgccgccgctcgcaaccccgatctcctccaccaaggacgcgctctctcttgtcaccaccctgcagacgcagctcttcgaggccgtcgccgagctgcaagagaccctcgatctgcaggatgcgcgcgcgcgccttgtccgtgaggcgcgtggcaaggatgctgcgctgctagcctttgcgaagaagctgcatgaggctcaccaagtacttgaccgcctcgtcgacgactacgctgactaccgtcgcgatcccaaacgcccgcgtggcgccgctgctgctgacgatcccgagccggcgtcagagggcgacttcggcacgtccctccactccagccttaagcttgatgacatcctgacctacgcgcaccgcataagttacacaacctttgctccgccggagcatggtgctgggttgcctctccgtgttagcctgccacctgtaccacaggagaatcagatgagagcgtcgcagctgtatctgtttgctgatttggatgtaggggtacccaagaagccattggatgcgaaggacgggatcgcggcagaagtggaggttgcgccgctgtatgaggcaccacaggaggggccgtcgaggctaccaaacaccttgccacccatgttcccgaaggagctaaagccgccgccgggatggaagcctggtgatccgatcacgctaccacttgatgagatactacctggtatcaagggtgaagagcgggaggcacaggcccctgtgccgcaggcacctgtttcagtgcgaccagtggcaccaatgggaccagagacaatacaggtcaagcctgtgcagcttgattttgggagcagtagtagtgacgagtacagtagtgacgttgggagctcagaagaagatgatgaggattagtgctcggtaagctgctctattttgttggctttcaattgtagttgcctttctatcgtatgcttggagtagaatcttctatgctagcgatttttacctgctcatgtcttactgactatttatgaactttagggctgatctcagatcattgtaatggtgctttatcctgtacttcttaaaccaatgtattctaccattgattttacttattatatgcttagtatcaattgtttacctttgttaaattgttatattcctgcaatacagtagattgttaccagtttcaaattgtttgtgttcttaccaaataacaatgatagccgcgagaatggtatttgcacaattgagttacaaggtgttgtgagtgtgaacttctaactttgcacttgtgattcatgttagtcgtttatttgtattctcagtgagcctttgttgtacaggagttactccagatcttctctatatgtggaagcttatctagtttttttttttgaaagagatttatttctctgcttaccagtttacaaggataacagaagatgagaagaacaatagcagcagcaaaacaatctaaatcagacatcacacttgtagctgaattccaacaggatacccgaacccactccaggaacccaaaggcaacaggaacaccacctcttgcacttgtacagaggctcaaatcactgtatgcagtgcattcagctgtcccaccacaccaccttctcagccgaccgaaaggcatcttacttatcccaatcagcctgccacagtggcgagaatggaaccgtacctccagtggttagggatacagctcatggagctcggcggtaccgcaatgtcgctgctgctgctgctcgtgctcgccgcgtcgccattgcagcaggccagggcggttggcggcggcaggccgcgggtgccggccatcctggtgttcggcgactccatcgtggacacgggcaacaacaacgccgtcctcacgctcaccaagtccaacttcaggccatacggcaaggacctcaacggcggcgtacccaccggacgcttctccaacggccggattccgacggacttcgtagcttcacggctcggcttgaaagatctggttccggcgtatctcggcaccgacctcagcgacgacgacctctgcacgggcgtcagcttcgcgtctgggggcaccggctacgacccgctcacctccactctcgtggcagttctgccgatgcaggaggagctcaacatgttcgcggagtacaaggagaggctcgcaggggtcgtcggagacgaggccgccgccgcaggaatcgtggccgaaagcctgttccttgtctgcgccgggtcggacgacatcgccaacaactactacctcgcccccgtcagacctctgcagtacgacatctcggcgtacgtggatttccttgtggagcaggcctgcgacttcattaggcaactgtaccagcaaggggccaggaggatcgcggtcctggggatgccgccggtcgggtgcgtgccctcgcagcggaccctcgccggcggcctagccagggactgcgaccccgctcgcaaccacgcggcgcagctgtacaactccaggctgaaggaggaggtagtgctgctccagaaggagctggcgtgccagagaatcggctacgtggatatctacgacgtcctgcaggacatgatcacgaacccctgcaaatacggcttcgaggtctccacgagaggatgctgcggcaccggggacttggaggtgtcgctcctgtgcaaccagctgacggcgccgacgtgccctgacgaccggaaatacgtcttctgggacagcttccatcccaccgagaaagcatacgagatcatcgtggactacctgttcccgagatacatagagaacctgctataattacttctgctttaccgtcgcttctttaattcgatcgtttctagttgttgtcaagtttagacatgccgtctttgtttcccaatttaagcttttgctttaaaactcaagacttttcaaggaaatgaaatgacacctgctagcttgttgcaagctgtaaagattgattggttttgtttacttgttccgtgtgaaacaactttaaggctagg

SEQ ID NO: 67676 - DNA, 3495 bp, Zea Mays
aagcggaagcggcggatgggtaggcaaggaccaaggagagagggcttttaacgcggattagttgggcctcaagacataaaaagcccaaacacatctagttgagcaagcccgtcccatgagcccacgaagtggaggatcagcaagcacgagcgtctcgagctcgcgtcgcgtccgtttgctgcgccctccgccgccgccgcaatgatgcagccgcatctgccctccccggcgaggctggggctcacagcctcgtcgccgtcgctcccgcccaatccggtccccttgaatcccacatcctcgccttcacacggtagcctgccctcgagcgcagccgctggcaccagtgctgccccaaccctaaccacctcgccgtcgctgctaccgctcctgccgccgcttccgcgcgcgcaatcgctgctccagcttatatcgtcgctcgcttccaacctcttggaactctcggcgaaccgcgccgcgtggatctcagcgtaccgaggatcgcttcccaccttcctcccatcggcgtcctccgcgccgccgctcgcaaccccgatctcctccaccaaggacgcgctctctcttgtcaccaccctgcagacgcagctcttcgaggccgtcgccgagctgcaagagaccctcgatctgcaggatgcgcgcgcgcgccttgtccgtgaggcgcgtggcaaggatgctgcgctgctagcctttgcgaagaagctgcatgaggctcaccaagtacttgaccgcctcgtcgacgactacgctgactaccgtcgcgatcccaaacgcccgcgtggcgccgctgctgctgacgatcccgagccggcgtcagagggcgacttcggcacgtccctccactccagccttaagcttgatgacatcctgacctacgcgcaccgcataagttacacaacctttgctccgccggagcatggtgctgggttgcctctccgtgttagcctgccacctgtaccacaggagaatcagatgagagcgtcgcagctgtatctgtttgctgatttggatgtaggggtacccaagaagccattggatgcgaaggacgggatcgcggcagaagtggaggttgcgccgctgtatgaggcaccacaggaggggccgtcgaggctaccaaacaccttgccacccatgttcccgaaggagctaaagccgccgccgggatggaagcctggtgatccgatcacgctaccacttgatgagatactacctggtatcaagggtgaagagcgggaggcacaggcccctgtgccgcaggcacctgtttcagtgcgaccagtggcaccaatgggaccagagacaatacaggtcaagcctgtgcagcttgattttgggagcagtagtagtgacgagtacagtagtgacgttgggagctcagaagaagatgatgaggattagtgctcggtaagctgctctattttgttggctttcaattgtagttgcctttctatcgtatgcttggagtagaatcttctatgctagcgatttttacctgctcatgtcttactgactatttatgaactttagggctgatctcagatcattgtaatggtgctttatcctgtacttcttaaaccaatgtattctaccattgattttacttattatatgcttagtatcaattgtttacctttgttaaattgttatattcctgcaatacagtagattgttaccagtttcaaattgtttgtgttcttaccaaataacaatgatagccgcgagaatggtatttgcacaattgagttacaaggtgttgtgagtgtgaacttctaactttgcacttgtgattcatgttagtcgtttatttgtattctcagtgagcctttgttgtacaggagttactccagatcttctctatatgtggaagcttatctagtttttttttttgaaagagatttatttctctgcttaccagtttacaaggataacagaagatgagaagaacaatagcagcagcaaaacaatctaaatcagacatcacacttgtagctgaattccaacaggatacccgaacccactccaggaacccaaaggcaacaggaacaccacctcttgcacttgtacagaggctcaaatcactgtatgcagtgcattcagctgtcccaccacaccaccttctcagccgaccgaaaggcatcttacttatcccaatcagcctgccacagtggcgagaatggaaccgtacctccagtggttagggatacagctcatggagctcggcggtaccgcaatgtcgctgctgctgctgctcgtgctcgccgcgtcgccattgcagcaggccagggcggttggcggcggcaggccgcgggtgccggccatcctggtgttcggcgactccatcgtggacacgggcaacaacaacgccgtcctcacgctcaccaagtccaacttcaggccatacggcaaggacctcaacggcggcgtacccaccggacgcttctccaacggccggattccgacggacttcgtagcttcacggctcggcttgaaagatctggttccggcgtatctcggcaccgacctcagcgacgacgacctctgcacgggcgtcagcttcgcgtctgggggcaccggctacgacccgctcacctccactctcgtggaggagctcaacatgttcgcggagtacaaggagaggctcgcaggggtcgtcggagacgaggccgccgccgcaggaatcgtggccgaaagcctgttccttgtctgcgccgggtcggacgacatcgccaacaactactacctcgcccccgtcagacctctgcagtacgacatctcggcgtacgtggatttccttgtggagcaggcctgcgacttcattaggcaactgtaccagcaaggggccaggaggatcgcggtcctggggatgccgccggtcgggtgcgtgccctcgcagcggaccctcgccggcggcctagccagggactgcgaccccgctcgcaaccacgcggcgcagctgtacaactccaggctgaaggaggaggtagtgctgctccagaaggagctggcgtgccagagaatcggctacgtggatatctacgacgtcctgcaggacatgatcacgaacccctgcaaatacggcttcgaggtctccacgagaggatgctgcggcaccggggacttggaggtgtcgctcctgtgcaaccagctgacggcgccgacgtgccctgacgaccggaaatacgtcttctgggacagcttccatcccaccgagaaagcatacgagatcatcgtggactacctgttcccgagatacatagagaacctgctataattacttctgctttaccgtcgcttctttaattcgatcgtttctagttgttgtcaagtttagacatgccgtctttgtttcccaatttaagcttttgctttaaaactcaagacttttcaaggaaatgaaatgacacctgctagcttgttgcaagctgtaaagattgattggttttgtttacttgttccgtgtgaaacaactttaaggctagg

SEQ ID NO: 67677 - DNA, 3523 bp, Zea Mays
aagcggaagcggcggatgggtaggcaaggaccaaggagagagggcttttaacgcggattagttgggcctcaagacataaaaagcccaaacacatctagttgagcaagcccgtcccatgagcccacgaagtggaggatcagcaagcacgagcgtctcgagctcgcgtcgcgtccgtttgctgcgccctccgccgccgccgcaatgatgcagccgcatctgccctccccggcgaggctggggctcacagcctcgtcgccgtcgctcccgcccaatccggtccccttgaatcccacatcctcgccttcacacggtagcctgccctcgagcgcagccgctggcaccagtgctgccccaaccctaaccacctcgccgtcgctgctaccgctcctgccgccgcttccgcgcgcgcaatcgctgctccagcttatatcgtcgctcgcttccaacctcttggaactctcggcgaaccgcgccgcgtggatctcagcgtaccgaggatcgcttcccaccttcctcccatcggcgtcctccgcgccgccgctcgcaaccccgatctcctccaccaaggacgcgctctctcttgtcaccaccctgcagacgcagctcttcgaggccgtcgccgagctgcaagagaccctcgatctgcaggatgcgcgcgcgcgccttgtccgtgaggcgcgtggcaaggatgctgcgctgctagcctttgcgaagaagctgcatgaggctcaccaagtacttgaccgcctcgtcgacgactacgctgactaccgtcgcgatcccaaacgcccgcgtggcgccgctgctgctgacgatcccgagccggcgtcagagggcgacttcggcacgtccctccactccagccttaagcttgatgacatcctgacctacgcgcaccgcataagttacacaacctttgctccgccggagcatggtgctgggttgcctctccgtgttagcctgccacctgtaccacaggagaatcagatgagagcgtcgcagctgtatctgtttgctgatttggatgtaggggtacccaagaagccattggatgcgaaggacgggatcgcggcagaagtggaggttgcgccgctgtatgaggcaccacaggaggggccgtcgaggctaccaaacaccttgccacccatgttcccgaaggagctaaagccgccgccgggatggaagcctggtgatccgatcacgctaccacttgatgagatactacctggtatcaagggtgaagagcgggaggcacaggcccctgtgccgcaggcacctgtttcagtgcgaccagtggcaccaatgggaccagagacaatacaggtcaagcctgtgcagcttgattttgggagcagtagtagtgacgagtacagtagtgacgttgggagctcagaagaagatgatgaggattagtgctcggtaagctgctctattttgttggctttcaattgtagttgcctttctatcgtatgcttggagtagaatcttctatgctagcgatttttacctgctcatgtcttactgactatttatgaactttagggctgatctcagatcattgtaatggtgctttatcctgtacttcttaaaccaatgtattctaccattgattttacttattatatgcttagtatcaattgtttacctttgttaaattgttatattcctgcaatacagtagattgttaccagtttcaaattgtttgtgttcttaccaaataacaatgatagccgcgagaatggtatttgcacaattgagttacaaggtgttgtgagtgtgaacttctaactttgcacttgtgattcatgttagtcgtttatttgtattctcagtgagcctttgttgtacaggagttactccagatcttctctatatgtggaagcttatctagtttttttttttgaaagagatttatttctctgcttaccagtttacaaggataacagaagatgagaagaacaatagcagcagcaaaacaatctaaatcagacatcacacttgtagctgaattccaacaggatacccgaacccactccaggaacccaaaggcaacaggaacaccacctcttgcacttgtacagaggctcaaatcactgtgtgtctacagatgcagtgcattcagctgtcccaccacaccaccttctcagccgaccgaaaggcatcttacttatcccaatcagcctgccacagtggcgagaatggaaccgtacctccagtggttagggatacagctcatggagctcggcggtaccgcaatgtcgctgctgctgctgctcgtgctcgccgcgtcgccattgcagcaggccagggcggttggcggcggcaggccgcgggtgccggccatcctggtgttcggcgactccatcgtggacacgggcaacaacaacgccgtcctcacgctcaccaagtccaacttcaggccatacggcaaggacctcaacggcggcgtacccaccggacgcttctccaacggccggattccgacggacttcgtagcttcacggctcggcttgaaagatctggttccggcgtatctcggcaccgacctcagcgacgacgacctctgcacgggcgtcagcttcgcgtctgggggcaccggctacgacccgctcacctccactctcgtggcagttctgccgatgcaggaggagctcaacatgttcgcggagtacaaggagaggctcgcaggggtcgtcggagacgaggccgccgccgcaggaatcgtggccgaaagcctgttccttgtctgcgccgggtcggacgacatcgccaacaactactacctcgcccccgtcagacctctgcagtacgacatctcggcgtacgtggatttccttgtggagcaggcctgcgacttcattaggcaactgtaccagcaaggggccaggaggatcgcggtcctggggatgccgccggtcgggtgcgtgccctcgcagcggaccctcgccggcggcctagccagggactgcgaccccgctcgcaaccacgcggcgcagctgtacaactccaggctgaaggaggaggtagtgctgctccagaaggagctggcgtgccagagaatcggctacgtggatatctacgacgtcctgcaggacatgatcacgaacccctgcaaatacggcttcgaggtctccacgagaggatgctgcggcaccggggacttggaggtgtcgctcctgtgcaaccagctgacggcgccgacgtgccctgacgaccggaaatacgtcttctgggacagcttccatcccaccgagaaagcatacgagatcatcgtggactacctgttcccgagatacatagagaacctgctataattacttctgctttaccgtcgcttctttaattcgatcgtttctagttgttgtcaagtttagacatgccgtctttgtttcccaatttaagcttttgctttaaaactcaagacttttcaaggaaatgaaatgacacctgctagcttgttgcaagctgtaaagattgattggttttgtttacttgttccgtgtgaaacaactttaaggctagg

SEQ ID NO: 67678 - DNA, 3079 bp, Zea Mays
aagcggaagcggcggatgggtaggcaaggaccaaggagagagggcttttaacgcggattagttgggcctcaagacataaaaagcccaaacacatctagttgagcaagcccgtcccatgagcccacgaagtggaggatcagcaagcacgagcgtctcgagctcgcgtcgcgtccgtttgctgcgccctccgccgccgccgcaatgatgcagccgcatctgccctccccggcgaggctggggctcacagcctcgtcgccgtcgctcccgcccaatccggtccccttgaatcccacatcctcgccttcacacggtagcctgccctcgagcgcagccgctggcaccagtgctgccccaaccctaaccacctcgccgtcgctgctaccgctcctgccgccgcttccgcgcgcgcaatcgctgctccagcttatatcgtcgctcgcttccaacctcttggaactctcggcgaaccgcgccgcgtggatctcagcgtaccgaggatcgcttcccaccttcctcccatcggcgtcctccgcgccgccgctcgcaaccccgatctcctccaccaaggacgcgctctctcttgtcaccaccctgcagacgcagctcttcgaggccgtcgccgagctgcaagagaccctcgatctgcaggatgcgcgcgcgcgccttgtccgtgaggcgcgtggcaaggatgctgcgctgctagcctttgcgaagaagctgcatgaggctcaccaagtacttgaccgcctcgtcgacgactacgctgactaccgtcgcgatcccaaacgcccgcgtggcgccgctgctgctgacgatcccgagccggcgtcagagggcgacttcggcacgtccctccactccagccttaagcttgatgacatcctgacctacgcgcaccgcataagttacacaacctttgctccgccggagcatggtgctgggttgcctctccgtgttagcctgccacctgtaccacaggagaatcagatgagagcgtcgcagctgtatctgtttgctgatttggatgtaggggtacccaagaagccattggatgcgaaggacgggatcgcggcagaagtggaggttgcgccgctgtatgaggcaccacaggaggggccgtcgaggctaccaaacaccttgccacccatgttcccgaaggagctaaagccgccgccgggatggaagcctggtgatccgatcacgctaccacttgatgagatactacctggtatcaagggtgaagagcgggaggcacaggcccctgtgccgcaggcacctgtttcagtgcgaccagtggcaccaatgggaccagagacaatacaggtcaagcctgtgcagcttgattttgggagcagtagtagtgacgagtacagtagtgacgttgggagctcagaagaagatgatgaggattagtgctcgtttacaaggataacagaagatgagaagaacaatagcagcagcaaaacaatctaaatcagacatcacacttgtagctgaattccaacaggatacccgaacccactccaggaacccaaaggcaacaggaacaccacctcttgcacttgtacagaggctcaaatcactgtgtgtctacagatgcagtgcattcagctgtcccaccacaccaccttctcagccgaccgaaaggcatcttacttatcccaatcagcctgccacagtggcgagaatggaaccgtacctccagtggttagggatacagctcatggagctcggcggtaccgcaatgtcgctgctgctgctgctcgtgctcgccgcgtcgccattgcagcaggccagggcggttggcggcggcaggccgcgggtgccggccatcctggtgttcggcgactccatcgtggacacgggcaacaacaacgccgtcctcacgctcaccaagtccaacttcaggccatacggcaaggacctcaacggcggcgtacccaccggacgcttctccaacggccggattccgacggacttcgtagtcgctgtatggatgcctgtgcagcttcacggctcggcttgaaagatctggttccggcgtatctcggcaccgacctcagcgacgacgacctctgcacgggcgtcagcttcgcgtctgggggcaccggctacgacccgctcacctccactctcgtggtaaacaacaaacgaacgacccccgttgaaatgcctttcttcaggcagttctgccgatgcaggaggagctcaacatgttcgcggagtacaaggagaggctcgcaggggtcgtcggagacgaggccgccgccgcaggaatcgtggccgaaagcctgttccttgtctgcgccgggtcggacgacatcgccaacaactactacctcgcccccgtcagacctctgcagtacgacatctcggcgtacgtggatttccttgtggagcaggcctgcgacttcattaggcaactgtaccagcaaggggccaggaggatcgcggtcctggggatgccgccggtcgggtgcgtgccctcgcagcggaccctcgccggcggcctagccagggactgcgaccccgctcgcaaccacgcggcgcagctgtacaactccaggctgaaggaggaggtagtgctgctccagaaggagctggcgtgccagagaatcggctacgtggatatctacgacgtcctgcaggacatgatcacgaacccctgcaaatacggcttcgaggtctccacgagaggatgctgcggcaccggggacttggaggtgtcgctcctgtgcaaccagctgacggcgccgacgtgccctgacgaccggaaatacgtcttctgggacagcttccatcccaccgagaaagcatacgagatcatcgtggactacctgttcccgagatacatagagaacctgctataattacttctgctttaccgtcgcttctttaattcgatcgtttctagttgttgtcaagtttagacatgccgtctttgtttcccaatttaagcttttgctttaaaactcaagacttttcaaggaaatgaaatgacacctgctagcttgttgcaagctgtaaagattgattggttttgtttacttgttccgtgtgaaacaactttaaggctagg

SEQ ID NO: 67679 - DNA, 3017 bp, Zea Mays
aagcggaagcggcggatgggtaggcaaggaccaaggagagagggcttttaacgcggattagttgggcctcaagacataaaaagcccaaacacatctagttgagcaagcccgtcccatgagcccacgaagtggaggatcagcaagcacgagcgtctcgagctcgcgtcgcgtccgtttgctgcgccctccgccgccgccgcaatgatgcagccgcatctgccctccccggcgaggctggggctcacagcctcgtcgccgtcgctcccgcccaatccggtccccttgaatcccacatcctcgccttcacacggtagcctgccctcgagcgcagccgctggcaccagtgctgccccaaccctaaccacctcgccgtcgctgctaccgctcctgccgccgcttccgcgcgcgcaatcgctgctccagcttatatcgtcgctcgcttccaacctcttggaactctcggcgaaccgcgccgcgtggatctcagcgtaccgaggatcgcttcccaccttcctcccatcggcgtcctccgcgccgccgctcgcaaccccgatctcctccaccaaggacgcgctctctcttgtcaccaccctgcagacgcagctcttcgaggccgtcgccgagctgcaagagaccctcgatctgcaggatgcgcgcgcgcgccttgtccgtgaggcgcgtggcaaggatgctgcgctgctagcctttgcgaagaagctgcatgaggctcaccaagtacttgaccgcctcgtcgacgactacgctgactaccgtcgcgatcccaaacgcccgcgtggcgccgctgctgctgacgatcccgagccggcgtcagagggcgacttcggcacgtccctccactccagccttaagcttgatgacatcctgacctacgcgcaccgcataagttacacaacctttgctccgccggagcatggtgctgggttgcctctccgtgttagcctgccacctgtaccacaggagaatcagatgagagcgtcgcagctgtatctgtttgctgatttggatgtaggggtacccaagaagccattggatgcgaaggacgggatcgcggcagaagtggaggttgcgccgctgtatgaggcaccacaggaggggccgtcgaggctaccaaacaccttgccacccatgttcccgaaggagctaaagccgccgccgggatggaagcctggtgatccgatcacgctaccacttgatgagatactacctggtatcaagggtgaagagcgggaggcacaggcccctgtgccgcaggcacctgtttcagtgcgaccagtggcaccaatgggaccagagacaatacaggtcaagcctgtgcagcttgattttgggagcagtagtagtgacgagtacagtagtgacgttgggagctcagaagaagatgatgaggattagtgctcgagatttatttctctgcttaccagtttacaaggataacagaagatgagaagaacaatagcagcagcaaaacaatctaaatcagacatcacacttgtagctgaattccaacaggatacccgaacccactccaggaacccaaaggcaacaggaacaccacctcttgcacttgtacagaggctcaaatcactgtgtgtctacagatgcagtgcattcagctgtcccaccacaccaccttctcagccgaccgaaaggcatcttacttatcccaatcagcctgccacagtggcgagaatggaaccgtacctccagtggttagggatacagctcatggagctcggcggtaccgcaatgtcgctgctgctgctgctcgtgctcgccgcgtcgccattgcagcaggccagggcggttggcggcggcaggccgcgggtgccggccatcctggtgttcggcgactccatcgtggacacgggcaacaacaacgccgtcctcacgctcaccaagtccaacttcaggccatacggcaaggacctcaacggcggcgtacccaccggacgcttctccaacggccggattccgacggacttcgtagcttcacggctcggcttgaaagatctggttccggcgtatctcggcaccgacctcagcgacgacgacctctgcacgggcgtcagcttcgcgtctgggggcaccggctacgacccgctcacctccactctcgtggaggagctcaacatgttcgcggagtacaaggagaggctcgcaggggtcgtcggagacgaggccgccgccgcaggaatcgtggccgaaagcctgttccttgtctgcgccgggtcggacgacatcgccaacaactactacctcgcccccgtcagacctctgcagtacgacatctcggcgtacgtggatttccttgtggagcaggcctgcgacttcattaggcaactgtaccagcaaggggccaggaggatcgcggtcctggggatgccgccggtcgggtgcgtgccctcgcagcggaccctcgccggcggcctagccagggactgcgaccccgctcgcaaccacgcggcgcagctgtacaactccaggctgaaggaggaggtagtgctgctccagaaggagctggcgtgccagagaatcggctacgtggatatctacgacgtcctgcaggacatgatcacgaacccctgcaaatacggcttcgaggtctccacgagaggatgctgcggcaccggggacttggaggtgtcgctcctgtgcaaccagctgacggcgccgacgtgccctgacgaccggaaatacgtcttctgggacagcttccatcccaccgagaaagcatacgagatcatcgtggactacctgttcccgagatacatagagaacctgctataattacttctgctttaccgtcgcttctttaattcgatcgtttctagttgttgtcaagtttagacatgccgtctttgtttcccaatttaagcttttgctttaaaactcaagacttttcaaggaaatgaaatgacacctgctagcttgttgcaagctgtaaagattgattggttttgtttacttgttccgtgtgaaacaactttaaggctagg

SEQ ID NO: 67680 - DNA, 2994 bp, Zea Mays
aagcggaagcggcggatgggtaggcaaggaccaaggagagagggcttttaacgcggattagttgggcctcaagacataaaaagcccaaacacatctagttgagcaagcccgtcccatgagcccacgaagtggaggatcagcaagcacgagcgtctcgagctcgcgtcgcgtccgtttgctgcgccctccgccgccgccgcaatgatgcagccgcatctgccctccccggcgaggctggggctcacagcctcgtcgccgtcgctcccgcccaatccggtccccttgaatcccacatcctcgccttcacacggtagcctgccctcgagcgcagccgctggcaccagtgctgccccaaccctaaccacctcgccgtcgctgctaccgctcctgccgccgcttccgcgcgcgcaatcgctgctccagcttatatcgtcgctcgcttccaacctcttggaactctcggcgaaccgcgccgcgtggatctcagcgtaccgaggatcgcttcccaccttcctcccatcggcgtcctccgcgccgccgctcgcaaccccgatctcctccaccaaggacgcgctctctcttgtcaccaccctgcagacgcagctcttcgaggccgtcgccgagctgcaagagaccctcgatctgcaggatgcgcgcgcgcgccttgtccgtgaggcgcgtggcaaggatgctgcgctgctagcctttgcgaagaagctgcatgaggctcaccaagtacttgaccgcctcgtcgacgactacgctgactaccgtcgcgatcccaaacgcccgcgtggcgccgctgctgctgacgatcccgagccggcgtcagagggcgacttcggcacgtccctccactccagccttaagcttgatgacatcctgacctacgcgcaccgcataagttacacaacctttgctccgccggagcatggtgctgggttgcctctccgtgttagcctgccacctgtaccacaggagaatcagatgagagcgtcgcagctgtatctgtttgctgatttggatgtaggggtacccaagaagccattggatgcgaaggacgggatcgcggcagaagtggaggttgcgccgctgtatgaggcaccacaggaggggccgtcgaggctaccaaacaccttgccacccatgttcccgaaggagctaaagccgccgccgggatggaagcctggtgatccgatcacgctaccacttgatgagatactacctggtatcaagggtgaagagcgggaggcacaggcccctgtgccgcaggcacctgtttcagtgcgaccagtggcaccaatgggaccagagacaatacaggtcaagcctgtgcagcttgattttgggagcagtagtagtgacgagtacagtagtgacgttgggagctcagaagaagatgatgaggattagtgctcgtttacaaggataacagaagatgagaagaacaatagcagcagcaaaacaatctaaatcagacatcacacttgtagctgaattccaacaggatacccgaacccactccaggaacccaaaggcaacaggaacaccacctcttgcacttgtacagaggctcaaatcactgtgtgtctacagatgcagtgcattcagctgtcccaccacaccaccttctcagccgaccgaaaggcatcttacttatcccaatcagcctgccacagtggcgagaatggaaccgtacctccagtggttagggatacagctcatggagctcggcggtaccgcaatgtcgctgctgctgctgctcgtgctcgccgcgtcgccattgcagcaggccagggcggttggcggcggcaggccgcgggtgccggccatcctggtgttcggcgactccatcgtggacacgggcaacaacaacgccgtcctcacgctcaccaagtccaacttcaggccatacggcaaggacctcaacggcggcgtacccaccggacgcttctccaacggccggattccgacggacttcgtagcttcacggctcggcttgaaagatctggttccggcgtatctcggcaccgacctcagcgacgacgacctctgcacgggcgtcagcttcgcgtctgggggcaccggctacgacccgctcacctccactctcgtggaggagctcaacatgttcgcggagtacaaggagaggctcgcaggggtcgtcggagacgaggccgccgccgcaggaatcgtggccgaaagcctgttccttgtctgcgccgggtcggacgacatcgccaacaactactacctcgcccccgtcagacctctgcagtacgacatctcggcgtacgtggatttccttgtggagcaggcctgcgacttcattaggcaactgtaccagcaaggggccaggaggatcgcggtcctggggatgccgccggtcgggtgcgtgccctcgcagcggaccctcgccggcggcctagccagggactgcgaccccgctcgcaaccacgcggcgcagctgtacaactccaggctgaaggaggaggtagtgctgctccagaaggagctggcgtgccagagaatcggctacgtggatatctacgacgtcctgcaggacatgatcacgaacccctgcaaatacggcttcgaggtctccacgagaggatgctgcggcaccggggacttggaggtgtcgctcctgtgcaaccagctgacggcgccgacgtgccctgacgaccggaaatacgtcttctgggacagcttccatcccaccgagaaagcatacgagatcatcgtggactacctgttcccgagatacatagagaacctgctataattacttctgctttaccgtcgcttctttaattcgatcgtttctagttgttgtcaagtttagacatgccgtctttgtttcccaatttaagcttttgctttaaaactcaagacttttcaaggaaatgaaatgacacctgctagcttgttgcaagctgtaaagattgattggttttgtttacttgttccgtgtgaaacaactttaaggctagg

SEQ ID NO: 67681 - DNA, 3007 bp, Zea Mays
aagcggaagcggcggatgggtaggcaaggaccaaggagagagggcttttaacgcggattagttgggcctcaagacataaaaagcccaaacacatctagttgagcaagcccgtcccatgagcccacgaagtggaggatcagcaagcacgagcgtctcgagctcgcgtcgcgtccgtttgctgcgccctccgccgccgccgcaatgatgcagccgcatctgccctccccggcgaggctggggctcacagcctcgtcgccgtcgctcccgcccaatccggtccccttgaatcccacatcctcgccttcacacggtagcctgccctcgagcgcagccgctggcaccagtgctgccccaaccctaaccacctcgccgtcgctgctaccgctcctgccgccgcttccgcgcgcgcaatcgctgctccagcttatatcgtcgctcgcttccaacctcttggaactctcggcgaaccgcgccgcgtggatctcagcgtaccgaggatcgcttcccaccttcctcccatcggcgtcctccgcgccgccgctcgcaaccccgatctcctccaccaaggacgcgctctctcttgtcaccaccctgcagacgcagctcttcgaggccgtcgccgagctgcaagagaccctcgatctgcaggatgcgcgcgcgcgccttgtccgtgaggcgcgtggcaaggatgctgcgctgctagcctttgcgaagaagctgcatgaggctcaccaagtacttgaccgcctcgtcgacgactacgctgactaccgtcgcgatcccaaacgcccgcgtggcgccgctgctgctgacgatcccgagccggcgtcagagggcgacttcggcacgtccctccactccagccttaagcttgatgacatcctgacctacgcgcaccgcataagttacacaacctttgctccgccggagcatggtgctgggttgcctctccgtgttagcctgccacctgtaccacaggagaatcagatgagagcgtcgcagctgtatctgtttgctgatttggatgtaggggtacccaagaagccattggatgcgaaggacgggatcgcggcagaagtggaggttgcgccgctgtatgaggcaccacaggaggggccgtcgaggctaccaaacaccttgccacccatgttcccgaaggagctaaagccgccgccgggatggaagcctggtgatccgatcacgctaccacttgatgagatactacctggtatcaagggtgaagagcgggaggcacaggcccctgtgccgcaggcacctgtttcagtgcgaccagtggcaccaatgggaccagagacaatacaggtcaagcctgtgcagcttgattttgggagcagtagtagtgacgagtacagtagtgacgttgggagctcagaagaagatgatgaggattagtgctcgagatttatttctctgcttaccagtttacaaggataacagaagatgagaagaacaatagcagcagcaaaacaatctaaatcagacatcacacttgtagctgaattccaacaggatacccgaacccactccaggaacccaaaggcaacaggaacaccacctcttgcacttgtacagaggctcaaatcactgtatgcagtgcattcagctgtcccaccacaccaccttctcagccgaccgaaaggcatcttacttatcccaatcagcctgccacagtggcgagaatggaaccgtacctccagtggttagggatacagctcatggagctcggcggtaccgcaatgtcgctgctgctgctgctcgtgctcgccgcgtcgccattgcagcaggccagggcggttggcggcggcaggccgcgggtgccggccatcctggtgttcggcgactccatcgtggacacgggcaacaacaacgccgtcctcacgctcaccaagtccaacttcaggccatacggcaaggacctcaacggcggcgtacccaccggacgcttctccaacggccggattccgacggacttcgtagcttcacggctcggcttgaaagatctggttccggcgtatctcggcaccgacctcagcgacgacgacctctgcacgggcgtcagcttcgcgtctgggggcaccggctacgacccgctcacctccactctcgtggaggagctcaacatgttcgcggagtacaaggagaggctcgcaggggtcgtcggagacgaggccgccgccgcaggaatcgtggccgaaagcctgttccttgtctgcgccgggtcggacgacatcgccaacaactactacctcgcccccgtcagacctctgcagtacgacatctcggcgtacgtggatttccttgtggagcaggcctgcgacttcattaggcaactgtaccagcaaggggccaggaggatcgcggtcctggggatgccgccggtcgggtgcgtgccctcgcagcggaccctcgccggcggcctagccagggactgcgaccccgctcgcaaccacgcggcgcagctgtacaactccaggctgaaggaggaggtagtgctgctccagaaggagctggcgtgccagagaatcggctacgtggatatctacgacgtcctgcaggacatgatcacgaacccctgcaaatacggcttcgaggtctccacgagaggatgctgcggcaccggggacttggaggtgtcgctcctgtgcaaccagctgacggcgccgacgtgccctgacgaccggaaatacgtcttctgggacagcttccatcccaccgagaaagcatacgagatcatcgtggactacctgttcccgagatacatagagaacctgctataattacttctgctttaccgtcgcttctttaattcgatcgtttctagttgttgtcaagtttagacatgccgtctttgtttcccaatttaagcttttgctttaaaactcaagacttttcaaggaaatgaaatgacacctgctagcttgttgcaagctgtaaagattgattggttttgtttacttgttccgtgtgaaacaactttaaggctagg

SEQ ID NO: 67682 - DNA, 3002 bp, Zea Mays
aagcggaagcggcggatgggtaggcaaggaccaaggagagagggcttttaacgcggattagttgggcctcaagacataaaaagcccaaacacatctagttgagcaagcccgtcccatgagcccacgaagtggaggatcagcaagcacgagcgtctcgagctcgcgtcgcgtccgtttgctgcgccctccgccgccgccgcaatgatgcagccgcatctgccctccccggcgaggctggggctcacagcctcgtcgccgtcgctcccgcccaatccggtccccttgaatcccacatcctcgccttcacacggtagcctgccctcgagcgcagccgctggcaccagtgctgccccaaccctaaccacctcgccgtcgctgctaccgctcctgccgccgcttccgcgcgcgcaatcgctgctccagcttatatcgtcgctcgcttccaacctcttggaactctcggcgaaccgcgccgcgtggatctcagcgtaccgaggatcgcttcccaccttcctcccatcggcgtcctccgcgccgccgctcgcaaccccgatctcctccaccaaggacgcgctctctcttgtcaccaccctgcagacgcagctcttcgaggccgtcgccgagctgcaagagaccctcgatctgcaggatgcgcgcgcgcgccttgtccgtgaggcgcgtggcaaggatgctgcgctgctagcctttgcgaagaagctgcatgaggctcaccaagtacttgaccgcctcgtcgacgactacgctgactaccgtcgcgatcccaaacgcccgcgtggcgccgctgctgctgacgatcccgagccggcgtcagagggcgacttcggcacgtccctccactccagccttaagcttgatgacatcctgacctacgcgcaccgcataagttacacaacctttgctccgccggagcatggtgctgggttgcctctccgtgttagcctgccacctgtaccacaggagaatcagatgagagcgtcgcagctgtatctgtttgctgatttggatgtaggggtacccaagaagccattggatgcgaaggacgggatcgcggcagaagtggaggttgcgccgctgtatgaggcaccacaggaggggccgtcgaggctaccaaacaccttgccacccatgttcccgaaggagctaaagccgccgccgggatggaagcctggtgatccgatcacgctaccacttgatgagatactacctggtatcaagggtgaagagcgggaggcacaggcccctgtgccgcaggcacctgtttcagtgcgaccagtggcaccaatgggaccagagacaatacaggtcaagcctgtgcagcttgattttgggagcagtagtagtgacgagtacagtagtgacgttgggagctcagaagaagatgatgaggattagtgctcgtttacaaggataacagaagatgagaagaacaatagcagcagcaaaacaatctaaatcagacatcacacttgtagctgaattccaacaggatacccgaacccactccaggaacccaaaggcaacaggaacaccacctcttgcacttgtacagaggctcaaatcactgtatgcagtgcattcagctgtcccaccacaccaccttctcagccgaccgaaaggcatcttacttatcccaatcagcctgccacagtggcgagaatggaaccgtacctccagtggttagggatacagctcatggagctcggcggtaccgcaatgtcgctgctgctgctgctcgtgctcgccgcgtcgccattgcagcaggccagggcggttggcggcggcaggccgcgggtgccggccatcctggtgttcggcgactccatcgtggacacgggcaacaacaacgccgtcctcacgctcaccaagtccaacttcaggccatacggcaaggacctcaacggcggcgtacccaccggacgcttctccaacggccggattccgacggacttcgtagcttcacggctcggcttgaaagatctggttccggcgtatctcggcaccgacctcagcgacgacgacctctgcacgggcgtcagcttcgcgtctgggggcaccggctacgacccgctcacctccactctcgtggcagttctgccgatgcaggaggagctcaacatgttcgcggagtacaaggagaggctcgcaggggtcgtcggagacgaggccgccgccgcaggaatcgtggccgaaagcctgttccttgtctgcgccgggtcggacgacatcgccaacaactactacctcgcccccgtcagacctctgcagtacgacatctcggcgtacgtggatttccttgtggagcaggcctgcgacttcattaggcaactgtaccagcaaggggccaggaggatcgcggtcctggggatgccgccggtcgggtgcgtgccctcgcagcggaccctcgccggcggcctagccagggactgcgaccccgctcgcaaccacgcggcgcagctgtacaactccaggctgaaggaggaggtagtgctgctccagaaggagctggcgtgccagagaatcggctacgtggatatctacgacgtcctgcaggacatgatcacgaacccctgcaaatacggcttcgaggtctccacgagaggatgctgcggcaccggggacttggaggtgtcgctcctgtgcaaccagctgacggcgccgacgtgccctgacgaccggaaatacgtcttctgggacagcttccatcccaccgagaaagcatacgagatcatcgtggactacctgttcccgagatacatagagaacctgctataattacttctgctttaccgtcgcttctttaattcgatcgtttctagttgttgtcaagtttagacatgccgtctttgtttcccaatttaagcttttgctttaaaactcaagacttttcaaggaaatgaaatgacacctgctagcttgttgcaagctgtaaagattgattggttttgtttacttgttccgtgtgaaacaactttaaggctagg

SEQ ID NO: 67683 - DNA, 2984 bp, Zea Mays
aagcggaagcggcggatgggtaggcaaggaccaaggagagagggcttttaacgcggattagttgggcctcaagacataaaaagcccaaacacatctagttgagcaagcccgtcccatgagcccacgaagtggaggatcagcaagcacgagcgtctcgagctcgcgtcgcgtccgtttgctgcgccctccgccgccgccgcaatgatgcagccgcatctgccctccccggcgaggctggggctcacagcctcgtcgccgtcgctcccgcccaatccggtccccttgaatcccacatcctcgccttcacacggtagcctgccctcgagcgcagccgctggcaccagtgctgccccaaccctaaccacctcgccgtcgctgctaccgctcctgccgccgcttccgcgcgcgcaatcgctgctccagcttatatcgtcgctcgcttccaacctcttggaactctcggcgaaccgcgccgcgtggatctcagcgtaccgaggatcgcttcccaccttcctcccatcggcgtcctccgcgccgccgctcgcaaccccgatctcctccaccaaggacgcgctctctcttgtcaccaccctgcagacgcagctcttcgaggccgtcgccgagctgcaagagaccctcgatctgcaggatgcgcgcgcgcgccttgtccgtgaggcgcgtggcaaggatgctgcgctgctagcctttgcgaagaagctgcatgaggctcaccaagtacttgaccgcctcgtcgacgactacgctgactaccgtcgcgatcccaaacgcccgcgtggcgccgctgctgctgacgatcccgagccggcgtcagagggcgacttcggcacgtccctccactccagccttaagcttgatgacatcctgacctacgcgcaccgcataagttacacaacctttgctccgccggagcatggtgctgggttgcctctccgtgttagcctgccacctgtaccacaggagaatcagatgagagcgtcgcagctgtatctgtttgctgatttggatgtaggggtacccaagaagccattggatgcgaaggacgggatcgcggcagaagtggaggttgcgccgctgtatgaggcaccacaggaggggccgtcgaggctaccaaacaccttgccacccatgttcccgaaggagctaaagccgccgccgggatggaagcctggtgatccgatcacgctaccacttgatgagatactacctggtatcaagggtgaagagcgggaggcacaggcccctgtgccgcaggcacctgtttcagtgcgaccagtggcaccaatgggaccagagacaatacaggtcaagcctgtgcagcttgattttgggagcagtagtagtgacgagtacagtagtgacgttgggagctcagaagaagatgatgaggattagtgctcgtttacaaggataacagaagatgagaagaacaatagcagcagcaaaacaatctaaatcagacatcacacttgtagctgaattccaacaggatacccgaacccactccaggaacccaaaggcaacaggaacaccacctcttgcacttgtacagaggctcaaatcactgtatgcagtgcattcagctgtcccaccacaccaccttctcagccgaccgaaaggcatcttacttatcccaatcagcctgccacagtggcgagaatggaaccgtacctccagtggttagggatacagctcatggagctcggcggtaccgcaatgtcgctgctgctgctgctcgtgctcgccgcgtcgccattgcagcaggccagggcggttggcggcggcaggccgcgggtgccggccatcctggtgttcggcgactccatcgtggacacgggcaacaacaacgccgtcctcacgctcaccaagtccaacttcaggccatacggcaaggacctcaacggcggcgtacccaccggacgcttctccaacggccggattccgacggacttcgtagcttcacggctcggcttgaaagatctggttccggcgtatctcggcaccgacctcagcgacgacgacctctgcacgggcgtcagcttcgcgtctgggggcaccggctacgacccgctcacctccactctcgtggaggagctcaacatgttcgcggagtacaaggagaggctcgcaggggtcgtcggagacgaggccgccgccgcaggaatcgtggccgaaagcctgttccttgtctgcgccgggtcggacgacatcgccaacaactactacctcgcccccgtcagacctctgcagtacgacatctcggcgtacgtggatttccttgtggagcaggcctgcgacttcattaggcaactgtaccagcaaggggccaggaggatcgcggtcctggggatgccgccggtcgggtgcgtgccctcgcagcggaccctcgccggcggcctagccagggactgcgaccccgctcgcaaccacgcggcgcagctgtacaactccaggctgaaggaggaggtagtgctgctccagaaggagctggcgtgccagagaatcggctacgtggatatctacgacgtcctgcaggacatgatcacgaacccctgcaaatacggcttcgaggtctccacgagaggatgctgcggcaccggggacttggaggtgtcgctcctgtgcaaccagctgacggcgccgacgtgccctgacgaccggaaatacgtcttctgggacagcttccatcccaccgagaaagcatacgagatcatcgtggactacctgttcccgagatacatagagaacctgctataattacttctgctttaccgtcgcttctttaattcgatcgtttctagttgttgtcaagtttagacatgccgtctttgtttcccaatttaagcttttgctttaaaactcaagacttttcaaggaaatgaaatgacacctgctagcttgttgcaagctgtaaagattgattggttttgtttacttgttccgtgtgaaacaactttaaggctagg

SEQ ID NO: 67684 - DNA, 2657 bp, Zea Mays
aagcggaagcggcggatgggtaggcaaggaccaaggagagagggcttttaacgcggattagttgggcctcaagacataaaaagcccaaacacatctagttgagcaagcccgtcccatgagcccacgaagtggaggatcagcaagcacgagcgtctcgagctcgcgtcgcgtccgtttgctgcgccctccgccgccgccgcaatgatgcagccgcatctgccctccccggcgaggctggggctcacagcctcgtcgccgtcgctcccgcccaatccggtccccttgaatcccacatcctcgccttcacacggtagcctgccctcgagcgcagccgctggcaccagtgctgccccaaccctaaccacctcgccgtcgctgctaccgctcctgccgccgcttccgcgcgcgcaatcgctgctccagcttatatcgtcgctcgcttccaacctcttggaactctcggcgaaccgcgccgcgtggatctcagcgtaccgaggatcgcttcccaccttcctcccatcggcgtcctccgcgccgccgctcgcaaccccgatctcctccaccaaggacgcgctctctcttgtcaccaccctgcagacgcagctcttcgaggccgtcgccgagctgcaagagaccctcgatctgcaggatgcgcgcgcgcgccttgtccgtgaggcgcgtggcaaggatgctgcgctgctagcctttgcgaagaagctgcatgaggctcaccaagtacttgaccgcctcgtcgacgactacgctgactaccgtcgcgatcccaaacgcccgcgtggcgccgctgctgctgacgatcccgagccggcgtcagagggcgacttcggcacgtccctccactccagccttaagcttgatgacatcctgacctacgcgcaccgcataagttacacaacctttgctccgccggagcatggtgctgggttgcctctccgtgttagcctgccacctgtaccacaggagaatcagatgagagcgtcgcagctgtatctgtttgctgatttggatgtaggggtacccaagaagccattggatgcgaaggacgggatcgcggcagaagtggaggttgcgccgctgtatgaggcaccacaggaggggccgtcgaggctaccaaacaccttgccacccatgttcccgaaggagctaaagccgccgccgggatggaagcctggtgatccgatcacgctaccacttgatgagatactacctggtatcaagggtgaagagcgggaggcacaggcccctgtgccgcaggcacctgtttcagtgcgaccagtggcaccaatgggaccagagacaatacaggtcaagcctgtgcagcttgattttgggagcagtagtagtgacgagtacagtagtgacgttgggagctcagaagaagatgatgaggattagtgctcgtttacaaggataacagaagatgagaagaacaatagcagcagcaaaacaatctaaatcagacatcacacttgtagctgaattccaacaggatacccgaacccactccaggaacccaaaggcaacaggaacaccacctcttgcacttgtacagaggctcaaatcactgtatgcagtgcattcagctgtcccaccacaccaccttctcagccgaccgaaaggcatcttacttatcccaatcagcctgccacagtggcgagaatggaaccgtacctccagtggttagggatacagctcatggagctcggcggtaccgcaatgtcgctgctgctgctgctcgtgctcgccgcgtcgccattgcagcaggccagggcggttggcggcggcaggccgcgggtgccggccatcctggtgttcggcgactccatcgtggacacgggcaacaacaacgccgtcctcacgctcaccaagtccaacttcaggccatacggcaaggacctcaacggcggcgtacccaccggacgcttctccaacggccggattccgacggacttcgtagcttcacggctcggcttgaaagatctggttccggcgtatctcggcaccgacctcagcgacgacgacctctgcacgggcgtcagcttcgcgtctgggggcaccggctacgacccgctcacctccactctcgtggtaaacaacaaacgaacgacccccgttgaaatgcctttcttcaggcagttctgccgatgcaggaggagctcaacatgttcgcggagtacaaggagaggctcgcaggggtcgtcggagacgaggccgccgccgcaggaatcgtggccgaaagcctgttccttgtctgcgccgggtcggacgacatcgccaacaactactacctcgcccccgtcagacctctgcagtacgacgtgccctgacgaccggaaatacgtcttctgggacagcttccatcccaccgagaaagcatacgagatcatcgtggactacctgttcccgagatacatagagaacctgctataattacttctgctttaccgtcgcttctttaattcgatcgtttctagttgttgtcaagtttagacatgccgtctttgtttcccaatttaagcttttgctttaaaactcaagacttttcaaggaaatgaaatgacacctgctagcttgttgcaagctgtaaagattgattggttttgtttacttgttccgtgtgaaacaactttaaggctagg

SEQ ID NO: 67685 - DNA, 3170 bp, Zea Mays
aagcggaagcggcggatgggtaggcaaggaccaaggagagagggcttttaacgcggattagttgggcctcaagacataaaaagcccaaacacatctagttgagcaagcccgtcccatgagcccacgaagtggaggatcagcaagcacgagcgtctcgagctcgcgtcgcgtccgtttgctgcgccctccgccgccgccgcaatgatgcagccgcatctgccctccccggcgaggctggggctcacagcctcgtcgccgtcgctcccgcccaatccggtccccttgaatcccacatcctcgccttcacacggtagcctgccctcgagcgcagccgctggcaccagtgctgccccaaccctaaccacctcgccgtcgctgctaccgctcctgccgccgcttccgcgcgcgcaatcgctgctccagcttatatcgtcgctcgcttccaacctcttggaactctcggcgaaccgcgccgcgtggatctcagcgtaccgaggatcgcttcccaccttcctcccatcggcgtcctccgcgccgccgctcgcaaccccgatctcctccaccaaggacgcgctctctcttgtcaccaccctgcagacgcagctcttcgaggccgtcgccgagctgcaagagaccctcgatctgcaggatgcgcgcgcgcgccttgtccgtgaggcgcgtggcaaggatgctgcgctgctagcctttgcgaagaagctgcatgaggctcaccaagtacttgaccgcctcgtcgacgactacgctgactaccgtcgcgatcccaaacgcccgcgtggcgccgctgctgctgacgatcccgagccggcgtcagagggcgacttcggcacgtccctccactccagccttaagcttgatgacatcctgacctacgcgcaccgcataagttacacaacctttgctccgccggagcatggtgctgggttgcctctccgtgttagcctgccacctgtaccacaggagaatcagatgagagcgtcgcagctgtatctgtttgctgatttggatgtaggggtacccaagaagccattggatgcgaaggacgggatcgcggcagaagtggaggttgcgccgctgtatgaggcaccacaggaggggccgtcgaggctaccaaacaccttgccacccatgttcccgaaggagctaaagccgccgccgggatggaagcctggtgatccgatcacgctaccacttgatgagatactacctggtatcaagggtgaagagcgggaggcacaggcccctgtgccgcaggcacctgtttcagtgcgaccagtggcaccaatgggaccagagacaatacaggtcaagcctgtgcagcttgattttgggagcagtagtagtgacgagtacagtagtgacgttgggagctcagaagaagatgatgaggattagtgctcgagatttatttctctgcttaccagtttacaaggataacagaagatgagaagaacaatagcagcagcaaaacaatctaaatcagacatcacacttgtagctgaattccaacaggatacccgaacccactccaggaacccaaaggcaacaggaacaccacctcttgcacttgtacagaggctcaaatcactgtgtatgtgatttaactgggtttttcttcttcttgtgatttaactgtgtacatgtgaatgctgcattccataggtcttacttagcgggatgcatgtgatcttctgaataaggtcgtttcgtatggtcccgtggttaggtgtctacagatgcagtgcattcagctgtcccaccacaccaccttctcagccgaccgaaaggcatcttacttatcccaatcagcctgccacagtggcgagaatggaaccgtacctccagtggttagggatacagctcatggagctcggcggtaccgcaatgtcgctgctgctgctgctcgtgctcgccgcgtcgccattgcagcaggccagggcggttggcggcggcaggccgcgggtgccggccatcctggtgttcggcgactccatcgtggacacgggcaacaacaacgccgtcctcacgctcaccaagtccaacttcaggccatacggcaaggacctcaacggcggcgtacccaccggacgcttctccaacggccggattccgacggacttcgtagcttcacggctcggcttgaaagatctggttccggcgtatctcggcaccgacctcagcgacgacgacctctgcacgggcgtcagcttcgcgtctgggggcaccggctacgacccgctcacctccactctcgtggcagttctgccgatgcaggaggagctcaacatgttcgcggagtacaaggagaggctcgcaggggtcgtcggagacgaggccgccgccgcaggaatcgtggccgaaagcctgttccttgtctgcgccgggtcggacgacatcgccaacaactactacctcgcccccgtcagacctctgcagtacgacatctcggcgtacgtggatttccttgtggagcaggcctgcgacttcattaggcaactgtaccagcaaggggccaggaggatcgcggtcctggggatgccgccggtcgggtgcgtgccctcgcagcggaccctcgccggcggcctagccagggactgcgaccccgctcgcaaccacgcggcgcagctgtacaactccaggctgaaggaggaggtagtgctgctccagaaggagctggcgtgccagagaatcggctacgtggatatctacgacgtcctgcaggacatgatcacgaacccctgcaaatacggcttcgaggtctccacgagaggatgctgcggcaccggggacttggaggtgtcgctcctgtgcaaccagctgacggcgccgacgtgccctgacgaccggaaatacgtcttctgggacagcttccatcccaccgagaaagcatacgagatcatcgtggactacctgttcccgagatacatagagaacctgctataattacttctgctttaccgtcgcttctttaattcgatcgtttctagttgttgtcaagtttagacatgccgtctttgtttcccaatttaagcttttgctttaaaactcaagacttttcaaggaaatgaaatgacacctgctagcttgttgcaagctgtaaagattgattggttttgtttacttgttccgtgtgaaacaactttaaggctagg

SEQ ID NO: 67686 - DNA, 2806 bp, Zea Mays
atgatttgctttaagtctattttattatttaacttctaccagacaaaaaaatattctttagttctacaatgagtatctcattgcgggatcgtattagaaagaggagggaagaagaagatgatgacatgatgatatttattttccccgccttatatctgatgggttctactagaggtgggggacaaaagaagaaacttcatacctcagatgagacaggcgaggttaaggttcgtcgactcctcgagggacatgtcaagaactgtcaagttacatttcggatggaaccacacatcttcagagagcttgcaacttatcttagaaggagaaggatcattgttgatacaaggatcacggtcgaggagaagttggggttcttcttatacatgctaagtcgcaacgcctcatattaggatctccaagtgtattttgggcacagtaatgacacattccatcatcacatcaaccacttcttcaataaggtcattcctgtcctatctcgtcgtttcattcagcctcctgatcctaatcaagtgcatcaaaaaatacaaggtaatcctagattctatccattctttaagaattgtctcggtgccattgatggaactcatattcctatttctatatctcctgataaacattctccttttcgaaatcggaagggaacacttagcataaatgtgatggtggcatgtgatttcgatctcaatatcacttttgtttctagtggttgggagggattggctacagattctagaatgctaagatcagctatgagcaagggttttcaggtacctctaggaaaattctatctagttgatggtgggtatgcaaatactccatcttttcttgctccataccgaggagttcggtaccacttgaaggccttgttcgtttgtatcagattgcacccgaaaacgttccacctaattaaagtttatataaattagagaaacaacccggttaggaatggttccaacccaccaatccggcagaaacgaacaaggccgaaggaatttggggctggacatcgaagaccacagaacccgaaggagctcttcaaccatcgtcacgcacttctgaggaaccatgtggaaagggctttggggtgcttaaaaagcgcttctccattctcaaagttgccacgttccacacactggaaaaccaagtaaagatacctataactgttgccatcttccacaatctaatccgatcacttcatggtgatgaggattggttagatcatcagccggataatattgatccatcaaactttgttgatctaccaagtgctatggttggaaaaggctccccaaggttcaacataggtggttccccaaagttgcgtaggttcattcctacaacaagtgctactaaaaagaaggcttctcctaaatgcagtggggcaaaaaagagtggaagttctccaagagtagtgaaacaaagagcggattggaatccaggcattgagaggtctcttgttgacattctccatgaatttaaagaaagtggatatagaggtgacaatggttggaactccgaagggtggaatagaatggtcaaggagtttcatgatgaagaaggtcagctgaagagagactacaagatgctcaaagcagcaaagcaacagagtgggtccacctggaatgagaaaaggaatatggttgaaggaccaccagctttgtgggagaatctcatggtgacatttcctaaaatcaagaagtttaacaacaacaaggcaaccttcccgctctttgatgctttgggagagctttatgatggacacttggctgaagggacttggaattgcacttctcttgaggcaccgcaagaggaagaaccgaatgagcaacttcaggatgcagaagatggaccacaaggctttgatctgaatgttgttcatgatgtagatgatgaagttgatgatgcactcactgaaaggaatgaagatatgcttgaaggaagggctaatactctgtcacgagatgaagaaagtggacagcgaagacctgttgcgtcaagaaacaagcaagaaaaggaaccaaagaagcctagaaagactgacaacatagaaaatatgatgaacaaatacctagaaatgaggagcaagcaagtagaagatgaagttgcaagagaaaaggaagcaagagaaaaggagacaagagaaaaggaggcagctcaaagtgaagatttctccatcaaaaggtgcatatcagttctgaacacaatggaagaagtgaccaaactggagaaggcaaaagcatattcagtcttcaccaagagcaaagagaatagagagactttcatatgtgcatgtgaagcggatcaagaatcagctttgatttggctaagaaatgagatggcttagtaggtatgatatttgtgtctttaccttccactcaaccatattcacttgggcctttatattccaatctaattgttctatttgtttggacaggtttgggtgatcaatcggtgatgcttagcacatctggaggtttcttattttgaactgacatgcttagttctaaagtgatgtttcttcttagcacatctgttctatctcttagctgttgaagatgtcagtctatcaagactgttctttgcgtttgttggcaagactataatttatttggcaagactataatttatttgacatgctttgttgttttaaaactattttggctttactactacgtaccaagtctgctgttggtgctctattgtagaatgctgtccaaaacagaagcttttgctggacaggtgacgtgcttacaagctcagattgattcatgaaattgctttgttt

SEQ ID NO: 67687 - DNA, 2621 bp, Zea Mays
aatcgcacaagtttcccacccggagcgagcgagggagcagccttgacgcagcagcatcacggtcacgggccgggcctcgtgcgctccgcccgttccgagtcgcatcgtatcgatacgcccgatgcgtcgtcacaggcacagctccgccgctcatgtccgcacccgagttattatatactactactacggcccgccaccttcgcttcgctagcggtccgcacccgttgcctccaaactcatttctcccgagcgccgccgcgagcctccgttccagcttcgtccatggcttccctcaccggatccgctctctcctttgcgaggcccgtcaaggcaatcagcattaagtctgtctctttctctggtttaaggaaggataatgtagccttccgcttgcagccagtgccacaaagattcgcagtctgctgtcctgtaagtaacaaattgttgtactgtggatctgtcaccacgtaatttaatcactgcatgatgctgcagctacacatctctatttattttctttttctatgtcaaatgtgccaattgtttcaactactttgtttggcttctaaagagattttgtatttattgtgcactgaagtgcttccattatgtacttgattgtatttttgtgaacacatagctccgatgaaagaaattttcaagagaattcctaaggtactggttatctttttttttcctttgcatttggcaccccaggatttttctgtcacgtgttagcatctgatgtggatgtaaaacgtcccatcacattgtgtttgtgtttttagctggtagattatactggtgcaatcttctttaaactgaagtttgtgttacctaatgattatgatcattccactgttgctgtgcttaccattttaccaggctaaaaaggagactgtggatcgggtttgtgatattgtcaagaagcagcttgcacttcctgagggcactgaggtctgtggctcctctaagtttcaagacctcggcgctgattcgttggacactgttgagattgttatgggccttgaggaggctttcaagatcactgtagaggagtcgagcgcgcagtcaatcgcaactgtggaagatgctgctaatctcatcgacgaacttgttgcaggagcagcaaaatcgtgttaaactggtcgtattgcgttgggtgctgtaccagggcatcacttgttgttctatgcccccttgcctactagattttctaccctgggcctggagagatgtttctgtcatgactgtcattgtggatctcgcgatattgttatattgaagcttttgtgcttgttcaagaaaagaaaatgttgttgcgatatatatgttattatattgaattttttttgtccatgttcaaggatattttatatattttaagtgatctgaggggtactggtaggctcgctcatgctgtgcttttttatggcatgattattttgttcattgcgagtctacgccatcattgtggttgcagatcgccaagcacgcgcacaaacgaaaacgcacgagcctcaggcgtgctgcttccctagctacctttattcagtcacagactgcagtgccggccatggctgtggagcagtgaagaatattctgcacttgtcggagcaaattccccgacagccatcagcacggcctgcgtggctgtcggtgcccatcgatcgagctgacaactttgtttcaagctcttcaagttcatcagtgcaaaagcagcagctgtacatactacatatataatagctgcctagctccaccgcaaagccgagcaggaggcgacgaaaccaactgagggtgcgtgtcggatggcgaggccgagggaggaggagctcgtggaggccgcgctggtcgcggcggccgcagcgctgatcgtgtcgggcgttaagaggctggtggcgccgcccgagcccgtagctccgtggtggtggcctgcgtcgctctcggtgccgtctcccgcgctgttcctgctcctcaacgtcatcatcgcgtctatcgttgtggcgtccgtgcagccgcggcggggaggagcggcagcttcggcgtcgtccgggggagccatcgacgacgaacgggaggcgcggggagacgccgcgaagaggaggaggagcaagagcaagagcaagagcaagaagcggacggcggccgaggccgccattccagatggctgctacatggcgctggtcgttacgggcgagccgatagagacggcggcggtgatggaggaggtggcggcagcagatgaggatgcggccgccgaggtgaacaaacgggctgaggagttcatctcggcgttccggcaccacctcagggtcgactccttctcgtctactacaacccggcgaagcaacgctagagcggcggcaccatgctctatctagatagttctggattgcaaacatatttttatggtttccccactttcaaagaatttttaatttgtgctccaagtttttcttcttcttttgagttgtagttgtatactctcttaacgtcagtttcatccaaattccctcactttgccttttcatttgactactcaacaatttaatcaactccctccgtgccataaagagcacagtttttatttccctaaaagtcaaacatttatatttttc

SEQ ID NO: 67688 - DNA, 1838 bp, Zea Mays
ctgcggatagcctaacctcctggagacgggcgttggagcctgacaccttcgcggcttcgcgcaccaccatcccgccacgtcggctcaccttccccgctgtggccgcaccagccccacctaccaaccgcagtaccatctcagctgtccattcatattgccaactgcccagatcgatccgtctcactcatcaccgtgctcctcgcccacctaccgcgccacacccgcctcaaatcaccggctcggaaaccaccaccaattacatcggcgtcaccgtcaccgccgctttccgagctctcatggcggcgtccgcgtcctccctccttgccgcccccgcatcctcatcctgtggggccatctccccccagctccctcgtggagctccggccgctgcctccgtcgcttcgccgtcgcgtcactcctgctacctcctccgcgcttccccttcgaggcgccatcggagtcgcttcgtagccaacgccgctcccaccatgcagcctccggcggagtccagggtctccacggtagtcgatgtcgacctcggcgaccgtagctatccgatctacatcggcgcaggcctcctcgacgagccggacctgctgcagaggcatgttcatggtaagagggttctggtggtgaccaacacgaccgtcgcgccgctttacctggacaaggtgacatgggcactcacccacaacaacctgaatgtatcagtggaaagcgtgatcctgcccgacggtgaaaagtacaaaaatatggacacgctgatgaaggtgtttgacaaggcagtcgagtcccgttttgaccgccggtgcacatttgtagcactgggtggtggtgtcattggggacatgtgtggttttgcagctgctgcattcctccggggcgtcaatttcatacagataccaactactctgatggcccagggagctagcttcaggcattgccgaggtagtaaagtatgggctcataagggatgcaccattctttgagtggcaagagaagaacatgccgaaattgttagcaagagaaccaaatgctttggcatatgctatcaagagatcatgtgaaaacaaagctgaagtggtggcacaagatgagaaggaaagtggccttcgagcaacactaaacctgggtcacacatttggccatgctattgagactgggacaggatatggagcatggctccatggggaggctgtcgcagctggaacagttatggcaactgacatgtctcaccgcctggggtggatagatgactccatcagaaaacgtgtggttgacatactaaagcaagccaaacttcccattgcacctcctgagaccatgaccgtagagaagtttaaaaacatcatggctgttgacaagaaggttgctgatggtctgttgagactcatccttctgaaaggaccactagggtgctgtgtatttacgggggattatgaggggaatgcactcgatgaaaccctacatgcattctgcgacaactgagacatcccagttttggacatcacttctgtatgctagtactaggctatgtatcaatcagagaaaatattgtggtgtacattatcttcactgcctcattggtatatttttgtcagaaataatggtatattgttttaagtgctggtttgagtttgtagagaaccatggctaatcaactgcggtgcggtcagttgttctctagtaataatagtaaagaagcttcactacatcccttctgtctgttactgtcaagtaacaatactcgtagagatttaaacctgtatttgtgtcaattaaatcattacctcgtcacttctaaattttaatacggagtagttcactttgactttgtc

SEQ ID NO: 67689 - DNA, 1526 bp, Zea Mays
ctgcggatagcctaacctcctggagacgggcgttggagcctgacaccttcgcggcttcgcgcaccaccatcccgccacgtcggctcaccttccccgctgtggccgcaccagccccacctaccaaccgcagtaccatctcagctgtccattcatattgccaactgcccagatcgatccgtctcactcatcaccgtgctcctcgcccacctaccgcgccacacccgcctcaaatcaccggctcggaaaccaccaccaattacatcggcgtcaccgtcaccgccgctttccgagctctcatggcggcgtccgcgtcctccctccttgccgcccccgcatcctcatcctgtggggccatctccccccagctccctcgtggagctccggccgctgcctccgtcgcttcgccgtcgcgtcactcctgctacctcctccgcgcttccccttcgaggcgccatcggagtcgcttcgtagccaacgccgctcccaccatgcagcctccggcggagtccagggtctccacggtagtcgatgtcgacctcggcgaccgtagctatccgatctacatcggcgcaggcctcctcgacgagccggacctgctgcagaggcatgttcatggtaagagggttctggtggtgaccaacacgaccgtcgcgccgctttacctggacaaggtgacatgggcactcacccacaacaacctgaatgtatcagtggaaagcgtgatcctgcccgacggtgaaaagtacaaaaatatggacacgctgatgaaggtgtttgacaaggcagtcgagtcccgttttgaccgccggtgcacatttgtagcactgggtggtggtgtcattggggacatgtgtggttttgcagctgctgcattcctccggggcgtcaatttcatacagataccaactactctgatggcccaggtggattcatctgttggtgggaaaaccgggattaaccacccactaggaaagaacttgattggggcattttaccagccacaatgtgttctaattgacacaaatacactgaacacattgcctgacagggagctagcttcaggcattgccgaggtagtaaagtatgggctcataagggatgcaccattctttgagtggcaagagaagaacatgccgaaattgttagcaagagaaccaaatgctttggcatatgctatcaagagatcatgtgaaaacaaagctgaagtggtggcacaagatgagaaggaaagtggccttcgagcaacactaaacctgggtcacacatttggccatgctattgagactgggacaggatatggagcatggctccatggggaggctgtcgcagctggaacagttatggcaactgacatgtctcaccgcctggggtggatagatgactccatcagaaaacgtgtggttgacatactaaagcaagccaaacttcccattgcacctcctgagaccatgaccgtagagaagtttaaaaacatcatggctatatgtcgaaggaccaaatgtcgaagctagagtagcgaagcaagg

SEQ ID NO: 67690 - DNA, 1128 bp, Zea Mays
gtactcctagtagttgtgaaagatgtttagtgaactgtaattagaaagaaagtttgcactctagtttagcccttacaatagcattacattatattatattgctgaactttcgcttgttgagaaaatgcagaatagttttctggcataatttgaatgttgtaattaaatttccatcttgctgttaatgttacatatagcgtattgctgaactttcgcttgttgagaaattgcagaatagtattctggcatatattgaatgtagtaattaaattttcatcttgctgttaacgttgagcttgaaatgtatatctatagagaaccaaatgctttggcatatgctatcaagagatcatgtgaaaacaaagctgaagtggtggcacaagatgagaaggaaagtggccttcgagcaacactaaacctgggtcacacatttggccatgctattgagactgggacaggatatggagcatggctccatggggaggctgtcgcagctggaacagttatggcaactgacatgtctcaccgcctggggtggatagatgactccatcagaaaacgtgtggttgacatactaaagcaagccaaacttcccattgcacctcctgagaccatgaccgtagagaagtttaaaaacatcatggctgttgacaagaaggttgctgatggtctgttgagactcatccttctgaaaggaccactagggtgctgtgtatttacgggggattatgaggggaatgcactcgatgaaaccctacatgcattctgcgacaactgagacatcccagttttggacatcacttctgtatgctagtactaggctatgtatcaatcagagaaaatattgtggtgtacattatcttcactgcctcattggtatatttttgtcagaaataatggtatattgttttaagtgctggtttgagtttgtagagaaccatggctaatcaactgcggtgcggtcagttgttctctagtaataatagtaaagaagcttcactacatcccttctgtctgttactgtcaagtaacaatactcgtagagatttaaacctgtatttgtgtcaattaaatcattacctcgtcacttctaaattttaatacggagtagttcactttgactttgtc

SEQ ID NO: 67691 - DNA, 1577 bp, Zea Mays
gttaaccccaccttggatcgcggccgccgtgtgcgtgagcagcgacgtgccgacagccgaaggcccaaaccaattcgattcctcccccctgccggccgaatcaaatttctccgccgccgcccggagcaccgatccccgagagttccatggactcgccttccgcatcgaggtattagcaagcctcgccgcgtcgcgccgcactgccccgccccgacgcctgctgcgctggttttggaaggatccaagatgggtgtaatcagcacagtgcttggtttctttgggtttggatttgggttatctgctggcattgtaattggttacttcttcttcatctacgtacaaccaactgatgtcaaggatgtcaaggtccggccgcttgtagaatatgattcaaaatccttggagggcatccttcccgaaattcctttaactgcacaagatatcgcgaagccaattattgctgagaatactgctaagtataacatagacactgttgagtttgaaacacttactttgggtagcttgccacccacctttcaagggatgaaagtctacatcacagaggagcaagagctgataatggaaccatctcttaaatgggctgcaaacccaaatattactgttgttgtaaaagcctatggtttgaaagctactatccagattgtggatctacaagtctttgcatcacctcgcattactctgaagccattggtgcctacatttccttgctttgcaaaaatccttgtctcacttatggagaagccacacgttgactttgggctaaaacttcttggagcagatgtaatggctattcctggtctttacatatttgttcagaccatggacccaaatgatgtacaaaatgagaaatctcgtggtgagcttactctagagctcatatacaagcctttcaaggaagaagatatagagaaagaagatacagagagtgctgatgtgatagagaaagctccagatggtactccagctggtggtggcttgctttatgttattgttcatgaagcccaagatcttgaggggaagcaccatacaaacccatatgcaaaaattattttcaaaggcgaggagaagaaaacaaaggtcatcaagaagaatagggatccaagatgggaggatgaatttgagttcgtgtgtgaggagcctcctgtaaatgataaactgcatgttgatgtcctaagtaaagcctcgaagaaagggctaatacatggcaaggaaactttgggctacattgatattagcctcgcagacgtgatcagcaacaagcggattaatgaaaagtaccatctcatagactcaaaaaatggtcagatccaaatcgagttgcagtggagaacttcctagacaggaaaaagccagaatgcctgaatgtagtacacacgtatgttcctatattcagtttgcggatgtctgtgattgagattgagctcgtgtagatagtttctttgtttatggacatctttgttcagatctcctcttagttgctcaaatttccgacaagcactatgtatgcatgtttatggaactgaacctattctttgactaatggcagaccatacaag

SEQ ID NO: 67692 - DNA, 1608 bp, Zea Mays
gttaaccccaccttggatcgcggccgccgtgtgcgtgagcagcgacgtgccgacagccgaaggcccaaaccaattcgattcctcccccctgccggccgaatcaaatttctccgccgccgcccggagcaccgatccccgagagttccatggactcgccttccgcatcgaggttttggaaggatccaagatgggtgtaatcagcacagtgcttggtttctttgggtttggatttgggttatctgctggcattgtaattggttacttcttcttcatctacgtacaaccaactgatgtcaaggatgtcaaggtccggccgcttgtagaatatgattcaaaatccttggagggcatccttcccgaaattcctttgtgggtcaagaatcctgactatgatagaattgattggttgaataggttcttggagttgatgtggccttatcttaacaaggctatctgcagaactgcacaagatatcgcgaagccaattattgctgagaatactgctaagtataacatagacactgttgagtttgaaacacttactttgggtagcttgccacccacctttcaagggatgaaagtctacatcacagaggagcaagagctgataatggaaccatctcttaaatgggctgcaaacccaaatattactgttgttgtaaaagcctatggtttgaaagctactatccagattgtggatctacaagtctttgcatcacctcgcattactctgaagccattggtgcctacatttccttgctttgcaaaaatccttgtctcacttatggagaagccacacgttgactttgggctaaaacttcttggagcagatgtaatggctattcctggtctttacatatttgttcagaccatggacccaaatgatgtacaaaatgagaaatctcgtggtgagcttactctagagctcatatacaagcctttcaaggaagaagatatagagaaagaagatacagagagtgctgatgtgatagagaaagctccagatggtactccagctggtggtggcttgctttatgttattgttcatgaagcccaagatcttgaggggaagcaccatacaaacccatatgcaaaaattattttcaaaggcgaggagaagaaaacaaaggtcatcaagaagaatagggatccaagatgggaggatgaatttgagttcgtgtgtgaggagcctcctgtaaatgataaactgcatgttgatgtcctaagtaaagcctcgaagaaagggctaatacatggcaaggaaactttgggctacattgatattagcctcgcagacgtgatcagcaacaagcggattaatgaaaagtaccatctcatagactcaaaaaatggtcagatccaaatcgagttgcagtggagaacttcctagacaggaaaaagccagaatgcctgaatgtagtacacacgtatgttcctatattcagtttgcggatgtctgtgattgagattgagctcgtgtagatagtttctttgtttatggacatctttgttcagatctcctcttagttgctcaaatttccgacaagcactatgtatgcatgtttatggaactgaacctattctttgactaatggcagaccatacaag

SEQ ID NO: 67693 - DNA, 1647 bp, Zea Mays
gtgagtgagtggcaatgtgcttttgagaggtccttttgttgtgttggtttgttcacctatggtctgtgatggggaatgctgctaacaatgattcagctgtggtggcaattgattttgctgaagaaacaagaaagagttacgaggggtataagcaggagcatgataagaaggtcagtctgttgaggaagcaagaggtgaagggtgtggattacttgaagatggagaagaacaagatggagattgagagcctggagtccaagatgctggttgccaaccagtccatcgagaccaccacttctgagataatcaggctcagagaatccgagctatttccccagcttcttgagctgattgctggcttgatgagcatgtggaggggtatgtacgagtgccatcaagttcagacccacatcgtgcagcagctggagtacctgaacaatgctcggaataccaatccgacttccaatgtccaccggcaagcagctcttcagctcgagatagaggttgacaggtggtattcagccttctgtagtctggtgaaatcccagagagactacgtctactcattgaccggctggcttcgtctatcgctgttctgccaccacgacccactgactaaagctcagaactcagatatctatggcttgtgtgaggaatggcagctagccatcgacagaatcccagataaggtggcctcggaagggatcaagactctcctgacagtgattcatgctgtcgtcattcaacaagctgaggagcataagcagaagaagaggtcggagtctgcattcaaagagtttgagaagaaggcagaggagctgagagccctggagtcaaaatatgtcggcgctgaaggttacagagaaatgtcacgaaaatcatcggtagctgacaagcgggcgaaggttgaggctctgaggagccgtgccgacgaggagaagatcaaatacgagaagagcatcggggtcaccagagcaatgaccctgaataacctgcagactggcttccctaacgttttccaggcgatgacgggcttcgccagcgtgtgcatggaggcatttgagtcggtgtacaacttcaagcggagctcggacccgaagaggctgctgacctgaagcaatgttgtataaaatgtatacagtcctaggtttttagtaacaatgataccttgcaacctttgtctggctgttatcaggttctaatggcgcaaaaaaaaaaccccccgtcaagttcaattacaccaagtaattgaaacttgaggccttgttttcctttttggttgagataatctcttgcctcggatgcaggttccaaaaggctcagctttgttttttcaatcggaagaaggtttgaactgtttgtttgcttccagcagctaatgacctgtttgtagcttcatgtcacgagctgagacttggatgggactggtaacagtagtctgtgcaattcagaaatgggccacacctgttgtttttccagcgcctaaattatatttctggtgatatggtcagtgaattctaattgaggcttttcagcttcaatttgcaagttcaacaagaggactgaaccgcacggcacacctgcctatccaatctcctataactttttttttctttcgaaaagttataccctctatgaagatctgac

SEQ ID NO: 67694 - DNA, 1322 bp, Zea Mays
ccatggtttgcgaccttctacccatgctcaagtcttgatgagcatgtggaggggtatgtacgagtgccatcaagttcagacccacatcgtgcagcagctggagtacctgaacaatgctcggaataccaatccgacttccaatgtccaccggcaagcagctcttcagctcgagatagaggttgacaggtggtattcagccttctgtagtctggtgaaatcccagagagactacgtctactcattgaccggctggcttcgtctatcgctgttctgccaccacgacccactgactaaagctcagaactcagatatctatggcttgtgtgaggaatggcagctagccatcgacagaatcccagataaggtggcctcggaagggatcaagactctcctgacagtgattcatgctgtcgtcattcaacaagctgaggagcataagcagaagaagaggtcggagtctgcattcaaagagtttgagaagaaggcagaggagctgagagccctggagtcaaaatatgtcggcgctgaaggttacagagaaatgtcacgaaaatcatcggtagctgacaagcgggcgaaggttgaggctctgaggagccgtgccgacgaggagaagatcaaatacgagaagagcatcggggtcaccagagcaatgaccctgaataacctgcagactggcttccctaacgttttccaggcgatgacgggcttcgccagcgtgtgcatggaggcatttgagtcggtgtacaacttcaagcggagctcggacccgaagaggctgctgacctgaagcaatgttgtataaaatgtatacagtcctaggtttttagtaacaatgataccttgcaacctttgtctggctgttatcaggttctaatggcgcaaaaaaaaaaccccccgtcaagttcaattacaccaagtaattgaaacttgaggccttgttttcctttttggttgagataatctcttgcctcggatgcaggttccaaaaggctcagctttgttttttcaatcggaagaaggtttgaactgtttgtttgcttccagcagctaatgacctgtttgtagcttcatgtcacgagctgagacttggatgggactggtaacagtagtctgtgcaattcagaaatgggccacacctgttgtttttccagcgcctaaattatatttctggtgatatggtcagtgaattctaattgaggcttttcagcttcaatttgcaagttcaacaagaggactgaaccgcacggcacacctgcctatccaatctcctataactttttttttctttcgaaaagttataccctctatgaagatctgac

SEQ ID NO: 67695 - DNA, 1705 bp, Zea Mays
cttttatcgactcttggcgctaggccgcattccttgccgagcgccgccgcggctggagctgggttcagtcggcgcggccccgttctgcggcgaactttttcttaatggtaggggcggtgaacgttgtggacttgcatctgtctcctctctcctgtgagcgagcgcatccgtggcggtggccggcgtggtgttcgacgaaatgcaaatctcggcgatgtttgcatctctcgttacattagaggcaacagaaaatcactggttcacagattcagacagagtcaaaggagcatatggatggtcattataattttatgtcatcttttggtggatgtggatgcactaagaaaaaggagcttatgggacagggcatctgtgcatcagcgacaggaaaagagagatgaatgaacgaacctaatccatccatcagcagcgtaaccaaatcaggcacagagctcccgcgatccagtcaagtgccctataaaatccagccccgcttggcttcacccacccttgggctcgcagtcgcagcaacgatggggaggtcgccgtgctgcgagaaggcgcacacgaacaagggcgcgtggaccaaggaggaggacgaccgtctggtggcgtacatcaaggcgcacggcgaggggtgctggcgctcccttcccaaggccgccggacttgtgcgctgcggcaagagctgccgcctccggtggatcaactacctgcggcccgacctcaagcgcggcaacttcacggaggaggaggacgagctcatcatcaagctccacagcctactcggcaacaaatggtccctgatcgctggaaggctgccgggcaggaccgacaacgagatcaagaactactggaacacgcacatccggcggaagctgctgagcagggggatcgacccggtgacacaccgccccatcaacgagcacacgtccaacataaccatatcgttcgaggactggggccaggggaaggcgctcaagtgccccgacctgaacctggacctctgcatcagcccgccgtgccaggaggaggaggaggccatgctgctgaggccggtgaagcgggaggaggccgggctctgcttcagctgcagcctggggctccccaagagcgcggactgcaagtgcagcaacttcctcgggctcaggaccgccatgctcgacttcagaagactcgagatgaaatgagagcttccatccatctctgtctgtctctctctgtaacttcacccctgataacacgcagtagtagtagtcaccaactgatttgtcgctccattaattctgtctctctctctctctctctcgctatgtaaattagcatcaccaactgattgattgatcatgggcaattaataatacttgttgctgctgcaaattgacattaatcacggttgccatgtgcagctgagacagatcttacgacgtttaccaaaccactagtagagcagcagcagcaagcatccaaatggcttcctgctgtgggctgtcccccggcgatgcggtaggggcgccgccccctgctgtgggctgtgggctgtgtggcctgcggaaaaaaggcagctggttttggaaggatctcgcgcagcaacttgcctgatcgattggattagttgcggatgtagcgtctggcggcaaaagctgtgctagcgtactccttgtgcgtgtttttccctatatttctctccatatctctgtacttt

SEQ ID NO: 67696 - DNA, 1708 bp, Zea Mays
cttttatcgactcttggcgctaggccgcattccttgccgagcgccgccgcggctggagctgggttcagtcggcgcggccccgttctgcggcgaactttttcttaatggtaggggcggtgaacgttgtggacttgcatctgtctcctctctcctgtgagcgagcgcatccgtggcggtggccggcgtggtgttcgacgaaatgcaaatctcggcgatgtttgcatctctcgttacattagaggcaacagaaaatcactggttcacagattcagacagagtcaaaggagcatatggatggtcattataattttatgtcatcttttggtggatgtggatgcactaagaaaaaggagcttatgggacagggcatctgtgcatcagcgacaggaaaagagagatgaatgaacgaacctaatccatccatcagcagcgtaaccaaatcaggcacagaagagctcccgcgatccagtcaagtgccctataaaatccagccccgcttggcttcacccacccttgggctcgcagtcgcagcaacgatggggaggtcgccgtgctgcgagaaggcgcacacgaacaagggcgcgtggaccaaggaggaggacgaccgtctggtggcgtacatcaaggcgcacggcgaggggtgctggcgctcccttcccaaggccgccggacttgtgcgctgcggcaagagctgccgcctccggtggatcaactacctgcggcccgacctcaagcgcggcaacttcacggaggaggaggacgagctcatcatcaagctccacagcctactcggcaacaaatggtccctgatcgctggaaggctgccgggcaggaccgacaacgagatcaagaactactggaacacgcacatccggcggaagctgctgagcagggggatcgacccggtgacacaccgccccatcaacgagcacacgtccaacataaccatatcgttcgaggactggggccaggggaaggcgctcaagtgccccgacctgaacctggacctctgcatcagcccgccgtgccaggaggaggaggaggccatgctgctgaggccggtgaagcgggaggaggccgggctctgcttcagctgcagcctggggctccccaagagcgcggactgcaagtgcagcaacttcctcgggctcaggaccgccatgctcgacttcagaagactcgagatgaaatgagagcttccatccatctctgtctgtctctctctgtaacttcacccctgataacacgcagtagtagtagtcaccaactgatttgtcgctccattaattctgtctctctctctctctctctcgctatgtaaattagcatcaccaactgattgattgatcatgggcaattaataatacttgttgctgctgcaaattgacattaatcacggttgccatgtgcagctgagacagatcttacgacgtttaccaaaccactagtagagcagcagcagcaagcatccaaatggcttcctgctgtgggctgtcccccggcgatgcggtaggggcgccgccccctgctgtgggctgtgggctgtgtggcctgcggaaaaaaggcagctggttttggaaggatctcgcgcagcaacttgcctgatcgattggattagttgcggatgtagcgtctggcggcaaaagctgtgctagcgtactccttgtgcgtgtttttccctatatttctctccatatctctgtacttt

SEQ ID NO: 67697 - DNA, 366 bp, Zea Mays
cattccttgccgagcgccgccgcggctggagctgggttcagtcggcgcggccccgttctgcggcgaactttttcttaatggtaggggcggtgaacgttgtggacttgcatctgtctcctctctcctgtgagcgagcgcatccgtggcggtggccggcgtggtgttcgacgaaatgcaaatctcggcgatgtttgcatctctcgttacattagaggcaacagaaaatcactggttcacagattcagacagagtcaaaggagcatatggatggtcattataattttatgtcatcttttggtggatgtggatgcactaagaaaaaggagcttatgggacaggtacaaaatcaaactacccttcccatcc

SEQ ID NO: 67698 - DNA, 1566 bp, Zea Mays
caaaaactcttggttgagtatatttcctccccttgcgggcaaccaactatggtccataatttgggcatctgtgcatcagcgacaggaaaagagagatgaatgaacgaacctaatccatccatcagcagcgtaaccaaatcaggcacaggtttgggtattaatttaaagcagtggaagtgatgagctgggagcaggcctaacccttttccaccaactctagaagagctcccgcgatccagtcaagtgccctataaaatccagccccgcttggcttcacccacccttgggctcgcagtcgcagcaacgatggggaggtcgccgtgctgcgagaaggcgcacacgaacaagggcgcgtggaccaaggaggaggacgaccgtctggtggcgtacatcaaggcgcacggcgaggggtgctggcgctcccttcccaaggccgccggacttgtgcgctgcggcaagagctgccgcctccggtggatcaactacctgcggcccgacctcaagcgcggcaacttcacggaggaggaggacgagctcatcatcaagctccacagcctactcggcaacaagtaggcagcccgaccgacctcaagcactaaggcacccactaaggcactaactgtgttgtctgtgtatgatctgtttgttgggtcacagatggtccctgatcgctggaaggctgccgggcaggaccgacaacgagatcaagaactactggaacacgcacatccggcggaagctgctgagcagggggatcgacccggtgacacaccgccccatcaacgagcacacgtccaacataaccatatcgttcgaggactggggccaggggaaggcgctcaagtgccccgacctgaacctggacctctgcatcagcccgccgtgccaggaggaggaggaggccatgctgctgaggccggtgaagcgggaggaggccgggctctgcttcagctgcagcctggggctccccaagagcgcggactgcaagtgcagcaacttcctcgggctcaggaccgccatgctcgacttcagaagactcgagatgaaatgagagcttccatccatctctgtctgtctctctctgtaacttcacccctgataacacgcagtagtagtagtcaccaactgatttgtcgctccattaattctgtctctctctctctctctctcgctatgtaaattagcatcaccaactgattgattgatcatgggcaattaataatacttgttgctgctgcaaattgacattaatcacggttgccatgtgcagctgagacagatcttacgacgtttaccaaaccactagtagagcagcagcagcaagcatccaaatggcttcctgctgtgggctgtcccccggcgatgcggtaggggcgccgccccctgctgtgggctgtgggctgtgtggcctgcggaaaaaaggcagctggttttggaaggatctcgcgcagcaacttgcctgatcgattggattagttgcggatgtagcgtctggcggcaaaagctgtgctagcgtactccttgtgcgtgtttttccctatatttctctccatatctctgtacttt

SEQ ID NO: 67699 - DNA, 2189 bp, Zea Mays
aaaaaccaataaattactccaagaaaagccgtaccctccctctctcagccgctgataaaaccaccggccctgctcctacggccgaccagaccgaacgaatcctcgagtcccgcccgacgcaccggaaagcgacgcgcctccaccgccccttccgtacctcctcctcctcctcctcgggacacacggccaagcaccaagcgaccaaacgcgcgccaccttgattgaactcgaagcaagcaaggaaaggccctaatggcggggacgcgctgggggcggtggctggggctggtgacggcggtgtgggtgcagtgcatctccggcaacaactacaccttctccaactactcgcacgcgctcaagacgctcatgggcctcacgcagctgcagctcaacggcctctccgtcgccaaggacgtcggcaaggcgttcggcctcctcgcggggctggcgtccgaccgcgtccccacctggctcctcctcgccgtcggctccctcgagggcctcctcggctacggcgcgcagtggatggtcgtgtccggggccgtcgcgccgctcccgtactggcagatgtgcgtcttcctctgtctcggcgggaacagcaccacatggatgaacaccgccgtgctcgtcacctgcatccgcaacttccgccggagtaggggccccgtctccggcctgctcaagggctacgtcggcctcagcaccgccatcttcaccgacacctgctccgcgctcttcgccgacgacccggcctcgttcctcgtcatgctcgccgtcgtgccggccgccgtctgcgcgctcgccatggtgttcctccgcgagggcgccgccgctgcggacgaggacgacgacgggcgctgcttcgccgcgatcaactcgctcgccgtggcaatcgcgctgtacctcctcgccgcggacctcacggggctcggcggcgggggcggggtcgtcttcgtcgccgtgctcctggtgctcctcgcgtcccccgctgccgtgccggcgatcctggcgtggaaatcgtgggcggagacccgcaaggccgcgaacgccgacctcgaggaggcggactccttggccgcggccgcgccgctgcttctcgtcgcgaaggaggcgcgtgctcccggagagcggccgcgcctcggggaggagcacacgatcgcgcagacgctcacgtcgctggacttctggctgatgttcgcgtcgttcctgatgggcgtgggcacggggctggccgtgatgaacaacctggggcagatgggcgtggccatgggctacgtcgacgtctccctcttcgtctccatgaccagcatctggggattcttcggtcgcatcgcctccggcaccatctccgagcacttcatcaagacacgaggtattccccgcccgctgtggaacgcagcctcgcaggtcctgatggccgtcggatacatcgtgatggcgctggcgatgccaggctccctcttcatcggctcggtggtcgtcggcatctgctacggcgtgcggctggcggtcaccgtgcccacggcgtcggagctgttcggcctcaagtactacggtctcgtctacaacgtcctcatcctcaacctgccgctcggctccttcctcttctcgggcctgctggcgggcctcctctacgacgcggaagccaccgcggtgcccggcggcggcaacacctgcgtcggcgcacactgctaccgcctcgtcttcctgatcatggcgctcgcctgcgtcgtcgggttcggcctcgacgtcctgctctgcgtccggacgaagagggtgtacgccaagatccacgagagcaagcggttgagcaggtcagccgtggcggagagggtgggttagcttagcaacgcacgcggcgccggcggctctgtggaagcgttggaattcagaagcacctccgcaattttaagggccattcttgtctttattctatttctagggaaaagatgggatcaatttgattgatacagttgattgccactaagtactaattgagggggggctgcggcctgcagattttgctggttcgccagcacggtgtctactcttgaaacgtatataaagcatctcgtcccaatacagattttagggcgaaaaaaaaacaatcatccaacagtaccgtatccatcgtttctattctatccccaccattttttctagggaaggagatgggccatgggctccta

SEQ ID NO: 67700 - DNA, 755 bp, Zea Mays
gttggcttgggagagacgagggtggctttcaagctgcagaaagacatgtttcattacatggcattggctgacgacaggcagagaattatgccaatgcccaatgaccggttgcctcctcgaggacaaccattagcgtaccctgaggctgtgctccttgtggacccaatcaaccctgaacttagaggggagatgtctcttagtgcacattatgcaggggatgacctctcaccaaagttcacgaatggagagtactggaaaaaggtccatggaccgatattcatgtatcttaattccagttgggatgcaagtgacccaactatgctatgggaagatgcaaaagttcaggtgattatatttctgacacgtaagtgctcgaggatagtacaaccagagccagcgagtaactactgcggtgctgcctatctatatgcatgtcatgagtattactgaactgtggaagtcactttgttttctctatttatgttttgccttgtgtaatcagatgatgattgagaaaggaaactggtcatactgttttgcactttcagaggattttcagaagacagagcaaaggggttgtgtctctggtagattaatttgttggtcaaacacgaatttggacagtcaaaacatgccctgcatttctagacgaagtaaaattttccatttaatatttttctagagcagtagggcatagtctttgtctcaccaaagcaaacaccaagtcacattacaatatttggatgtgatacaag

SEQ ID NO: 67701 - DNA, 668 bp, Zea Mays
cctccaattggcttctggctgatcactccaagtgatgagttcaggacaggaggacctctgaagcaaaacttgacttctcatgttggccctactatactggttatgtctcttagtgcacattatgcaggggatgacctctcaccaaagttcacgaatggagagtactggaaaaaggtccatggaccgatattcatgtatcttaattccagttgggatgcaagtgacccaactatgctatgggaagatgcaaaagttcaggtgattatatttctgacacgtaagtgctcgaggatagtacaaccagagccagcgagtaactactgcggtgctgcctatctatatgcatgtcatgagtattactgaactgtggaagtcactttgttttctctatttatgttttgccttgtgtaatcagatgatgattgagaaaggaaactggtcatactgttttgcactttcagaggattttcagaagacagagcaaaggggttgtgtctctggtagattaatttgttggtcaaacacgaatttggacagtcaaaacatgccctgcatttctagacgaagtaaaattttccatttaatatttttctagagcagtagggcatagtctttgtctcaccaaagcaaacaccaagtcacattacaatatttggatgtgatacaag

SEQ ID NO: 67702 - DNA, 1409 bp, Zea Mays
gctccaaccgctcgcagccctaaatctaatccgtcgtcttccgggtcgccatccgccctcatcccctcacgctcaaaccaaaccctagcaaaccctagcagatgtcagcccacgacgaggacggcggccgccgccgcaggacccttgccaaggtttcactctcgttggtctcgagcaccatggcggaggcctccacctactccttagacgcagttaagacgcgccacctctagctccaccacagccccggcggcgcgggcgtgcgcggcgtaatccgggtcgcggccgagctcgtccgagatagcggggtttaacggggcttaaccccctccgttctccgccacctgatgtacacccgctttgcatcgtggggttccagcatcttcggtccaccctcgctagcaactgggggaggatggcctttttgggaaggcgctcgccggtggactttcaggtgttgctgcacagggccgacatgttgtgttgggcgcctttccatggttgcagggccggcacggatgtatggttgtcgtgctgagtgagcaggccggaagatgctcttttagtactttgtctgatcaagtccatttagattttccctatgtcaaactattttacctttgactatcaatttttaaacttgacaggctgatgacacaattcacattattactaggtttattatgaaaaagacagcatattcttgacgatattgctatatgaagtgtcatactaagagactactgatcggatggacgagtgtattattttagtagttagtggtgcttgtttagaactaagattgcaaatacactgagatgatttgggtattataatacaagccaagctgcaaatatggaaccatgcaacttccacaattagtcaagttatctttgggtcctgcttttaattcttgggattccaaactcatgtttggtcaagacaaggacattacgacattgtgcaatgggctggcttttgataaactcgaatgtggaggtggcttgctactgcaagccttgttactggcttataaatctggcttccaagtgtgggatgtggaacatgtttatgatgtaagatagctagatacagacatgatggctctatttcatttattcaagtgctaaaggatccaattttcacaaccgaatctcgagacagatttgtagatgtacggccatcgctagctcttgcatgtgatcgtgtatgattgcaacaatcctgacaaaatatggtggtactttatattttggcatattgtgcacaaaaacaagtgtcttctatgaccaccgtgatttatgtattttcaaacgaaattttatggcacttcttgttgtgttttacgcttctactaaaaaacagtcttactgcgttttacaccaaatttatgacacttttgatgtatt

SEQ ID NO: 67703 - DNA, 1481 bp, Zea Mays
cccaaatcatcccaagcgctccaaccgctcgcagccctaaatctaatccgtcgtcttccgggtcgccatccgccctcatcccctcacgctcaaaccaaaccctagcaaaccctagcagatgtcagcccacgacgaggacggcggccgccgccgcaggacccttgccaaggtttcactctcgttggtctcgagcaccatggcggaggcctccacctactccttagacgcagttaagacgcgccacctctagctccaccacagccccggcggcgcgggcgtgcgcggcgtaatccgggtcgcggccgagctcgtccgagatagcggggtttaacggggcttaaccccctccgttctccgccacctgatgtacacccgctttgcatcgtggggttccagcatcttcggtccaccctcgctagcaactgggggaggatggcctttttgggaaggcgctcgccggtggactttcaggtgttgctgcacagtcactgatagggcagccgttctgggtttcctatgagaaactgcaccaaacatcagggccgacatgttgtgttgggcgcctttccatggttgcagggccggcacggatgtatggttgtcgtgctgagtgagcaggccggaagatgctcttttagtactttgtctgatcaagtccatttagattttccctatgtcaaactattttacctttgactatcaatttttaaacttgacaggctgatgacacaattcacattattactaggtttattatgaaaaagacagcatattcttgacgatattgctatatgaagtgtcatactaagagactactgatcggatggacgagtgtattattttagtagttagtggtgcttgtttagaactaagattgcaaatacactgagatgatttgggtattataatacaagccaagctgcaaatatggaaccatgcaacttccacaattagtcaagttatctttgggtcctgcttttaattcttgggattccaaactcatgtttggtcaagacaaggacattacgacattgtgcaatgggctggcttttgataaactcgaatgtggaggtggcttgctactgcaagccttgttactggcttataaatctggcttccaagtgtgggatgtggaacatgtttatgatgtaagatagctagatacagacatgatggctctatttcatttattcaagtgctaaaggatccaattttcacaaccgaatctcgagacagatttgtagatgtacggccatcgctagctcttgcatgtgatcgtgtatgattgcaacaatcctgacaaaatatggtggtactttatattttggcatattgtgcacaaaaacaagtgtcttctatgaccaccgtgatttatgtattttcaaacgaaattttatggcacttcttgttgtgttttacgcttctactaaaaaacagtcttactgcgttttacaccaaatttatgacacttttgatgtatt

SEQ ID NO: 67704 - DNA, 2553 bp, Zea Mays
cccccaaatcatcccaagcgctccaaccgctcgcagccctaaatctaatccgtcgtcttccgggtcgccatccgccctcatcccctcacgctcaaaccaaaccctagcaaaccctagcagatgtcagcccacgacgaggacggcggccgccgccgcaggacccttgccaaggtttcactctcgttggtctcgagcaccatggcggaggcctccacctactccttagacgcagttaagacgcgccacctctagctccaccacagccccggcggcgcgggcgtgcgcggcgtaatccgggtcgcggccgagctcgtccgagatagcggggtttaacggggcttaaccccctccgttctccgccacctgatgtacacccgctttgcatcgtggggttccagcatcttcggtccaccctcgctagcaactgggggaggatggcctttttgggaaggcgctcgccggtggactttcaggtgttgctgcacagtcactgatagggcagccgttctgggtttcctatgagaaactgcaccaaacatcaggtattttatcattttggcaatcgagtgtgtttcatggtagaaccatttttatgttcattactagagtgtgggcttttatcctttgctgtctccaaggaaacatggatgaaattgctacgcctcacattgtattttgacaatctacaagattcatgagctccacagaaaactgacaatctcatccattatcccttttctattaacaaagttgtttgctcaatctatatttgtgtgatttatagcctcacgtcggaagttatatatgtcattcaaaatttgacatctatagatatttattcataacttttaatcaaagtataaggatgaaagaagattttaaaatgtgatgtatatgaactaaataaccttagcttatgactgcaataattggacgcccggtgggaaatcctctcagtgccagatgtgatggaccatcctgccggtgtcacctctagccttcgcttggtaattgtaattcggcagcgactgaaaccatggctcaattgcagggccgacatgttgtgttgggcgcctttccatggttgcagggccggcacggatgtatggttgtcgtgctgagtgagcaggccggaagatgctcttttagtactttgtctgatcaagtccatttagattttccctatgtcaaactattttacctttgactatcaatttttaaacttgacaggctgatgacacaattcacattattactaggtttattatgaaaaagacagcatattcttgacgatattgctatatgaagtgtcatactaagagactactgatcggatggacgagtgtattattttagtagttagtggtgcttgtttagaactaagattgcaaatacactgagatgatttgggtattataatacaagccaagctgcaaatatggaaccatgcaacttccacaattagtcaagttatctttgggtcctgcttttaattcttgggattccaaactcatgtttggtcaagacaaggacattacgacattgtatattctacatacttttattctctctaataatatgttattatgtaaatgttataatttcaagctgaggactgattatgctctggtttactgagttatgaattcccactttgtcatgaaaattacttcggttttaccatggtcagaactgtatgtaaggttgactccaatgttgagcaaaaagttggttatatactctgacttcataattagagttccatattgaaaaatgcatatagtaaaataaaaatgttgtccacattttaattctccagtctctcaaccatgcaaaattgaatgtaatcttttacaactctttgtttgtacacatcattctttatgcatgttttgagttatgttgaaattgaccactatctttggctttttgcatagtgagaataaaacaaatagtagtgtctatatgtctgttctttactatcatgtaagctgtatatacaccaaaccaatgtatgatgcacctaaggcttgggtttttactttttgagtattaatccatgtaaacaatgaactaaaacccttcttacctgtcatgttttgcaggtgcaatgggctggcttttgataaactcgaatgtggaggtggcttgctactgcaagccttgttactggcttataaatctggcttccaagtgtgggatgtggaacatgtttatgatgtaagatagctagatacagacatgatggctctatttcatttattcaagtgctaaaggatccaattttcacaaccgaatctcgagacagatttgtagatgtacggccatcgctagctcttgcatgtgatcgtgtatgattgcaacaatcctgacaaaatatggtggtactttatattttggcatattgtgcacaaaaacaagtgtcttctatgaccaccgtgatttatgtattttcaaacgaaattttatggcacttcttgttgtgttttacgcttctactaaaaaacagtcttactgcgttttacaccaaatttatgacacttttgatgtatt

SEQ ID NO: 67705 - DNA, 1992 bp, Zea Mays
cccccaaatcatcccaagcgctccaaccgctcgcagccctaaatctaatccgtcgtcttccgggtcgccatccgccctcatcccctcacgctcaaaccaaaccctagcaaaccctagcagatgtcagcccacgacgaggacggcggccgccgccgcaggacccttgccaaggtttcactctcgttggtctcgagcaccatggcggaggcctccacctactccttagacgcagttaagacgcgccacctctagctccaccacagccccggcggcgcgggcgtgcgcggcgtaatccgggtcgcggccgagctcgtccgagatagcggggtttaacggggcttaaccccctccgttctccgccacctgatgtacacccgctttgcatcgtggggttccagcatcttcggtccaccctcgctagcaactgggggaggatggcctttttgggaaggcgctcgccggtggactttcaggtgttgctgcacagtcactgatagggcagccgttctgggtttcctatgagaaactgcaccaaacatcaggtattttatcattttggcaatcgagtgtgtttcatggtagaaccatttttatgttcattactagagtgtgggcttttatcctttgctgtctccaaggaaacatggatgaaattgctacgcctcacattgtattttgacaatctacaagattcatgagctccacagaaaactgacaatctcatccattatcccttttctattaacaaagttgtttgctcaatctatatttgtgtgatttatagcctcacgtcggaagttatatatgtcattcaaaatttgacatctatagatatttattcataacttttaatcaaagtataaggatgaaagaagattttaaaatgtgatgtatatgaactaaataaccttagcttatgactgcaataattggacgcccggtgggaaatcctctcagtgccagatgtgatggaccatcctgccggtgtcacctctagccttcgcttggtaattgtaattcggcagcgactgaaaccatggctcaattgcagggccgacatgttgtgttgggcgcctttccatggttgcagggccggcacggatgtatggttgtcgtgctgagtgagcaggccggaagatgctcttttagtactttgtctgatcaagtccatttagattttccctatgtcaaactattttacctttgactatcaatttttaaacttgacaggctgatgacacaattcacattattactaggtttattatgaaaaagacagcatattcttgacgatattgctatatgaagtgtcatactaagagactactgatcggatggacgagtgtattattttagtagttagtggtgcttgtttagaactaagattgcaaatacactgagatgatttgggtattataatacaagccaagctgcaaatatggaaccatgcaacttccacaattagtcaagttatctttgggtcctgcttttaattcttgggattccaaactcatgtttggtcaagacaaggacattacgacattgtgcaatgggctggcttttgataaactcgaatgtggaggtggcttgctactgcaagccttgttactggcttataaatctggcttccaagtgtgggatgtggaacatgtttatgatgtaagatagctagatacagacatgatggctctatttcatttattcaagtgctaaaggatccaattttcacaaccgaatctcgagacagatttgtagatgtacggccatcgctagctcttgcatgtgatcgtgtatgattgcaacaatcctgacaaaatatggtggtactttatattttggcatattgtgcacaaaaacaagtgtcttctatgaccaccgtgatttatgtattttcaaacgaaattttatggcacttcttgttgtgttttacgcttctactaaaaaacagtcttactgcgttttacaccaaatttatgacacttttgatgtatt

SEQ ID NO: 67706 - DNA, 2627 bp, Zea Mays
cgcccccaaatcatcccaagcgctccaaccgctcgcagccctaaatctaatccgtcgtcttccgggtcgccatccgccctcatcccctcacgctcaaaccaaaccctagcaaaccctagcagatgtcagcccacgacgaggacggcggccgccgccgcaggacccttgccaaggtttcactctcgttggtctcgagcaccatggcggaggcctccacctactccttagacgcagttaagacgcgccacctctagctccaccacagccccggcggcgcgggcgtgcgcggcgtaatccgggtcgcggccgagctcgtccgagatagcggggtttaacggggcttaaccccctccgttctccgccacctgatgtacacccgctttgcatcgtggggttccagcatcttcggtccaccctcgctagcaactgggggaggatggcctttttgggaaggcgctcgccggtggactttcaggtgttgctgcacaggtaaaattttgttaggcataagtaacctttttattttctcgttagatcagagccgaattaaacccattgatctacatgcaaatatagtggccacaaatgtgacttatgaatacacaatttgtaagtcaacgtcagattttgcagctaggctgtgactcgcattatcacagtgtgattagtgcgaaatttagaagttattttgggttgcgttggcaaaattttgatccaaaccatgcttgatgtatatttcgacttacgaatttattcttttgttggtctgcctattaatttgcccatgaaagcatcttagccaaaaatgagaaacactttttactgatctgtcattaaatcatcatcattctaatatttaagtagtttggtatatgataaagcaacatgcattcttttttctattccttttccttatttgggttcagttgattcatggcattgtgagctaatggcttcattgagcagcagtaacagtgatacacaaactatttcactgtctatctgtgcttctattcttcaccatatgcttccagcacatctgatattttgatcttccttaacgttgccagtcactgatagggcagccgttctgggtttcctatgagaaactgcaccaaacatcagggccgacatgttgtgttgggcgcctttccatggttgcagggccggcacggatgtatggttgtcgtgctgagtgagcaggccggaagatgctcttttagtactttgtctgatcaagtccatttagattttccctatgtcaaactattttacctttgactatcaatttttaaacttgacaggctgatgacacaattcacattattactaggtttattatgaaaaagacagcatattcttgacgatattgctatatgaagtgtcatactaagagactactgatcggatggacgagtgtattattttagtagttagtggtgcttgtttagaactaagattgcaaatacactgagatgatttgggtattataatacaagccaagctgcaaatatggaaccatgcaacttccacaattagtcaagttatctttgggtcctgcttttaattcttgggattccaaactcatgtttggtcaagacaaggacattacgacattgtatattctacatacttttattctctctaataatatgttattatgtaaatgttataatttcaagctgaggactgattatgctctggtttactgagttatgaattcccactttgtcatgaaaattacttcggttttaccatggtcagaactgtatgtaaggttgactccaatgttgagcaaaaagttggttatatactctgacttcataattagagttccatattgaaaaatgcatatagtaaaataaaaatgttgtccacattttaattctccagtctctcaaccatgcaaaattgaatgtaatcttttacaactctttgtttgtacacatcattctttatgcatgttttgagttatgttgaaattgaccactatctttggctttttgcatagtgagaataaaacaaatagtagtgtctatatgtctgttctttactatcatgtaagctgtatatacaccaaaccaatgtatgatgcacctaaggcttgggtttttactttttgagtattaatccatgtaaacaatgaactaaaacccttcttacctgtcatgttttgcaggtgcaatgggctggcttttgataaactcgaatgtggaggtggcttgctactgcaagccttgttactggcttataaatctggcttccaagtgtgggatgtggaacatgtttatgatgtaagatagctagatacagacatgatggctctatttcatttattcaagtgctaaaggatccaattttcacaaccgaatctcgagacagatttgtagatgtacggccatcgctagctcttgcatgtgatcgtgtatgattgcaacaatcctgacaaaatatggtggtactttatattttggcatattgtgcacaaaaacaagtgtcttctatgaccaccgtgatttatgtattttcaaacgaaattttatggcacttcttgttgtgttttacgcttctactaaaaaacagtcttactgcgttttacaccaaatttatgacacttttgatgtatt

SEQ ID NO: 67707 - DNA, 1573 bp, Zea Mays
cgcccccaaatcatcccaagcgctccaaccgctcgcagccctaaatctaatccgtcgtcttccgggtcgccatccgccctcatcccctcacgctcaaaccaaaccctagcaaaccctagcagatgtcagcccacgacgaggacggcggccgccgccgcaggacccttgccaaggtttcactctcgttggtctcgagcaccatggcggaggcctccacctactccttagacgcagttaagacgcgccacctctagctccaccacagccccggcggcgcgggcgtgcgcggcgtaatccgggtcgcggccgagctcgtccgagatagcggggtttaacggggcttaaccccctccgttctccgccacctgatgtacacccgctttgcatcgtggggttccagcatcttcggtccaccctcgctagcaactgggggaggatggcctttttgggaaggcgctcgccggtggactttcaggtgttgctgcacaggtaaaattttgttaggcataagtaacctttttattttctcgttagatcagagccgaattaaacccattgatctacatgcaaatatagtggccacaaatgtgacttatgaatacacaatttgtaagtcaacgtcagattttgcagctaggctgtgactcgcattatcacagtgtgattagtgcgaaatttagaagttattttgggttgcgttggcaaaattttgatccaaaccatgcttgatgtatatttcgacttacgaatttattcttttgttggtctgcctattaatttgcccatgaaagcatcttagccaaaaatgagaaacactttttactgatctgtcattaaatcatcatcattctaatatttaagtagtttggtatatgataaagcaacatgcattcttttttctattccttttccttatttgggttcagttgattcatggcattgtgagctaatggcttcattgagcagcagtaacagtgatacacaaactatttcactgtctatctgtgcttctattcttcaccatatgcttccagcacatctgatattttgatcttccttaacgttgccagtcactgatagggcagccgttctgggtttcctatgagaaactgcaccaaacatcaggtgcaatgggctggcttttgataaactcgaatgtggaggtggcttgctactgcaagccttgttactggcttataaatctggcttccaagtgtgggatgtggaacatgtttatgatgtaagatagctagatacagacatgatggctctatttcatttattcaagtgctaaaggatccaattttcacaaccgaatctcgagacagatttgtagatgtacggccatcgctagctcttgcatgtgatcgtgtatgattgcaacaatcctgacaaaatatggtggtactttatattttggcatattgtgcacaaaaacaagtgtcttctatgaccaccgtgatttatgtattttcaaacgaaattttatggcacttcttgttgtgttttacgcttctactaaaaaacagtcttactgcgttttacaccaaatttatgacacttttgatgtatt

SEQ ID NO: 67708 - DNA, 2575 bp, Zea Mays
cgcccccaaatcatcccaagcgctccaaccgctcgcagccctaaatctaatccgtcgtcttccgggtcgccatccgccctcatcccctcacgctcaaaccaaaccctagcaaaccctagcagatgtcagcccacgacgaggacggcggccgccgccgcaggacccttgccaaggtttcactctcgttggtctcgagcaccatggcggaggcctccacctactccttagacgcagttaagacgcgccacctctagctccaccacagccccggcggcgcgggcgtgcgcggcgtaatccgggtcgcggccgagctcgtccgagatagcggggtttaacggggcttaaccccctccgttctccgccacctgatgtacacccgctttgcatcgtggggttccagcatcttcggtccaccctcgctagcaactgggggaggatggcctttttgggaaggcgctcgccggtggactttcaggtgttgctgcacaggtaaaattttgttaggcataagtaacctttttattttctcgttagatcagagccgaattaaacccattgatctacatgcaaatatagtggccacaaatgtgacttatgaatacacaatttgtaagtcaacgtcagattttgcagctaggctgtgactcgcattatcacagtgtgattagtgcgaaatttagaagttattttgggttgcgttggcaaaattttgatccaaaccatgcttgatgtatatttcgacttacgaatttattcttttgttggtctgcctattaatttgcccatgaaagcatcttagccaaaaatgagaaacactttttactgatctgtcattaaatcatcatcattctaatatttaagtagtttggtatatgataaagcaacatgcattcttttttctattccttttccttatttgggttcagttgattcatggcattgtgagctaatggcttcattgagcagcagtaacagtgatacacaaactatttcactgtctatctgtgcttctattcttcaccatatgcttccagcacatctgatattttgatcttccttaacgttgccagtcactgatagggcagccgttctgggtttcctatgagaaactgcaccaaacatcaggtattttatcattttggcaatcgagtgtgtttcatggtagaaccatttttatgttcattactagagtgtgggcttttatcctttgctgtctccaaggaaacatggatgaaattgctacgcctcacattgtattttgacaatctacaagattcatgagctccacagaaaactgacaatctcatccattatcccttttctattaacaaagttgtttgctcaatctatatttgtgtgatttatagcctcacgtcggaagttatatatgtcattcaaaatttgacatctatagatatttattcataacttttaatcaaagtataaggatgaaagaagattttaaaatgtgatgtatatgaactaaataaccttagcttatgactgcaataattggacgcccggtgggaaatcctctcagtgccagatgtgatggaccatcctgccggtgtcacctctagccttcgcttggtaattgtaattcggcagcgactgaaaccatggctcaattgcagggccgacatgttgtgttgggcgcctttccatggttgcagggccggcacggatgtatggttgtcgtgctgagtgagcaggccggaagatgctcttttagtactttgtctgatcaagtccatttagattttccctatgtcaaactattttacctttgactatcaatttttaaacttgacaggctgatgacacaattcacattattactaggtttattatgaaaaagacagcatattcttgacgatattgctatatgaagtgtcatactaagagactactgatcggatggacgagtgtattattttagtagttagtggtgcttgtttagaactaagattgcaaatacactgagatgatttgggtattataatacaagccaagctgcaaatatggaaccatgcaacttccacaattagtcaagttatctttgggtcctgcttttaattcttgggattccaaactcatgtttggtcaagacaaggacattacgacattgtgcaatgggctggcttttgataaactcgaatgtggaggtggcttgctactgcaagccttgttactggcttataaatctggcttccaagtgtgggatgtggaacatgtttatgatgtaagatagctagatacagacatgatggctctatttcatttattcaagtgctaaaggatccaattttcacaaccgaatctcgagacagatttgtagatgtacggccatcgctagctcttgcatgtgatcgtgtatgattgcaacaatcctgacaaaatatggtggtactttatattttggcatattgtgcacaaaaacaagtgtcttctatgaccaccgtgatttatgtattttcaaacgaaattttatggcacttcttgttgtgttttacgcttctactaaaaaacagtcttactgcgttttacaccaaatttatgacacttttgatgtatt

SEQ ID NO: 67709 - DNA, 2047 bp, Zea Mays
acgcccccaaatcatcccaagcgctccaaccgctcgcagccctaaatctaatccgtcgtcttccgggtcgccatccgccctcatcccctcacgctcaaaccaaaccctagcaaaccctagcagatgtcagcccacgacgaggacggcggccgccgccgcaggacccttgccaaggtttcactctcgttggtctcgagcaccatggcggaggcctccacctactccttagacgcagttaagacgcgccacctctagctccaccacagccccggcggcgcgggcgtgcgcggcgtaatccgggtcgcggccgagctcgtccgagatagcggggtttaacggggcttaaccccctccgttctccgccacctgatgtacacccgctttgcatcgtggggttccagcatcttcggtccaccctcgctagcaactgggggaggatggcctttttgggaaggcgctcgccggtggactttcaggtgttgctgcacagtcactgatagggcagccgttctgggtttcctatgagaaactgcaccaaacatcagggccgacatgttgtgttgggcgcctttccatggttgcagggccggcacggatgtatggttgtcgtgctgagtgagcaggccggaagatgctcttttagtactttgtctgatcaagtccatttagattttccctatgtcaaactattttacctttgactatcaatttttaaacttgacaggctgatgacacaattcacattattactaggtttattatgaaaaagacagcatattcttgacgatattgctatatgaagtgtcatactaagagactactgatcggatggacgagtgtattattttagtagttagtggtgcttgtttagaactaagattgcaaatacactgagatgatttgggtattataatacaagccaagctgcaaatatggaaccatgcaacttccacaattagtcaagttatctttgggtcctgcttttaattcttgggattccaaactcatgtttggtcaagacaaggacattacgacattgtatattctacatacttttattctctctaataatatgttattatgtaaatgttataatttcaagctgaggactgattatgctctggtttactgagttatgaattcccactttgtcatgaaaattacttcggttttaccatggtcagaactgtatgtaaggttgactccaatgttgagcaaaaagttggttatatactctgacttcataattagagttccatattgaaaaatgcatatagtaaaataaaaatgttgtccacattttaattctccagtctctcaaccatgcaaaattgaatgtaatcttttacaactctttgtttgtacacatcattctttatgcatgttttgagttatgttgaaattgaccactatctttggctttttgcatagtgagaataaaacaaatagtagtgtctatatgtctgttctttactatcatgtaagctgtatatacaccaaaccaatgtatgatgcacctaaggcttgggtttttactttttgagtattaatccatgtaaacaatgaactaaaacccttcttacctgtcatgttttgcaggtgcaatgggctggcttttgataaactcgaatgtggaggtggcttgctactgcaagccttgttactggcttataaatctggcttccaagtgtgggatgtggaacatgtttatgatgtaagatagctagatacagacatgatggctctatttcatttattcaagtgctaaaggatccaattttcacaaccgaatctcgagacagatttgtagatgtacggccatcgctagctcttgcatgtgatcgtgtatgattgcaacaatcctgacaaaatatggtggtactttatattttggcatattgtgcacaaaaacaagtgtcttctatgaccaccgtgatttatgtattttcaaacgaaattttatggcacttcttgttgtgttttacgcttctactaaaaaacagtcttactgcgttttacaccaaatttatgacacttttgatgtatt

SEQ ID NO: 67710 - DNA, 1321 bp, Zea Mays
ggatccgccccactacgcccccaaatcatcccaagcgctccaaccgctcgcagccctaaatctaatccgtcgtcttccgggtcgccatccgccctcatcccctcacgctcaaaccaaaccctagcaaaccctagcagatgtcagcccacgacgaggacggcggccgccgccgcaggacccttgccaaggtttcactctcgttggtctcgagcaccatggcggaggcctccacctactccttagacgcagttaagacgcgccacctctagctccaccacagccccggcggcgcgggcgtgcgcggcgtaatccgggtcgcggccgagctcgtccgagatagcggggtttaacggggcttaaccccctccgttctccgccacctgatgtacacccgctttgcatcgtggggttccagcatcttcggtccaccctcgctagcaactgggggaggatggcctttttgggaaggcgctcgccggtggactttcaggtgttgctgcacagtcactgatagggcagccgttctgggtttcctatgagaaactgcaccaaacatcaggctgatgacacaattcacattattactaggtttattatgaaaaagacagcatattcttgacgatattgctatatgaagtgtcatactaagagactactgatcggatggacgagtgtattattttagtagttagtggtgcttgtttagaactaagattgcaaatacactgagatgatttgggtattataatacaagccaagctgcaaatatggaaccatgcaacttccacaattagtcaagttatctttgggtcctgcttttaattcttgggattccaaactcatgtttggtcaagacaaggacattacgacattgtgcaatgggctggcttttgataaactcgaatgtggaggtggcttgctactgcaagccttgttactggcttataaatctggcttccaagtgtgggatgtggaacatgtttatgatgtaagatagctagatacagacatgatggctctatttcatttattcaagtgctaaaggatccaattttcacaaccgaatctcgagacagatttgtagatgtacggccatcgctagctcttgcatgtgatcgtgtatgattgcaacaatcctgacaaaatatggtggtactttatattttggcatattgtgcacaaaaacaagtgtcttctatgaccaccgtgatttatgtattttcaaacgaaattttatggcacttcttgttgtgttttacgcttctactaaaaaacagtcttactgcgttttacaccaaatttatgacacttttgatgtatt

SEQ ID NO: 67711 - DNA, 960 bp, Zea Mays
cctagctcggatccgccccactacgcccccaaatcatcccaagcgctccaaccgctcgcagccctaaatctaatccgtcgtcttccgggtcgccatccgccctcatcccctcacgctcaaaccaaaccctagcaaaccctagcagatgtcagcccacgacgaggacggcggccgccgccgcaggacccttgccaaggtttcactctcgttggtctcgagcaccatggcggaggcctccacctactccttagacgcagttaagacgcgccacctctagctccaccacagccccggcggcgcgggcgtgcgcggcgtaatccgggtcgcggccgagctcgtccgagatagcggggtttaacggggcttaaccccctccgttctccgccacctgatgtacacccgctttgcatcgtggggttccagcatcttcggtccaccctcgctagcaactgggggaggatggcctttttgggaaggcgctcgccggtggactttcaggtgttgctgcacaggtgcaatgggctggcttttgataaactcgaatgtggaggtggcttgctactgcaagccttgttactggcttataaatctggcttccaagtgtgggatgtggaacatgtttatgatgtaagatagctagatacagacatgatggctctatttcatttattcaagtgctaaaggatccaattttcacaaccgaatctcgagacagatttgtagatgtacggccatcgctagctcttgcatgtgatcgtgtatgattgcaacaatcctgacaaaatatggtggtactttatattttggcatattgtgcacaaaaacaagtgtcttctatgaccaccgtgatttatgtattttcaaacgaaattttatggcacttcttgttgtgttttacgcttctactaaaaaacagtcttactgcgttttacaccaaatttatgacacttttgatgtatt

SEQ ID NO: 67712 - DNA, 1310 bp, Zea Mays
cacacccgcgcctagctcggatccgccccactacgcccccaaatcatcccaagcgctccaaccgctcgcagccctaaatctaatccgtcgtcttccgggtcgccatccgccctcatcccctcacgctcaaaccaaaccctagcaaaccctagcagatgtcagcccacgacgaggacggcggccgccgccgcaggacccttgccaaggtttcactctcgttggtctcgagcaccatggcggaggcctccacctactccttagacgcagttaagacgcgccacctctagctccaccacagccccggcggcgcgggcgtgcgcggcgtaatccgggtcgcggccgagctcgtccgagatagcggggtttaacggggcttaaccccctccgttctccgccacctgatgtacacccgctttgcatcgtggggttccagcatcttcggtccaccctcgctagcaactgggggaggatggcctttttgggaaggcgctcgccggtggactttcaggtgttgctgcacagtcactgatagggcagccgttctgggtttcctatgagaaactgcaccaaacatcaggtttattatgaaaaagacagcatattcttgacgatattgctatatgaagtgtcatactaagagactactgatcggatggacgagtgtattattttagtagttagtggtgcttgtttagaactaagattgcaaatacactgagatgatttgggtattataatacaagccaagctgcaaatatggaaccatgcaacttccacaattagtcaagttatctttgggtcctgcttttaattcttgggattccaaactcatgtttggtcaagacaaggacattacgacattgtgcaatgggctggcttttgataaactcgaatgtggaggtggcttgctactgcaagccttgttactggcttataaatctggcttccaagtgtgggatgtggaacatgtttatgatgtaagatagctagatacagacatgatggctctatttcatttattcaagtgctaaaggatccaattttcacaaccgaatctcgagacagatttgtagatgtacggccatcgctagctcttgcatgtgatcgtgtatgattgcaacaatcctgacaaaatatggtggtactttatattttggcatattgtgcacaaaaacaagtgtcttctatgaccaccgtgatttatgtattttcaaacgaaattttatggcacttcttgttgtgttttacgcttctactaaaaaacagtcttactgcgttttacaccaaatttatgacacttttgatgtatt

SEQ ID NO: 67713 - DNA, 2459 bp, Zea Mays
ctgatatgctacaatccaaccttgtctagcatatattttgtgtgtctcatactcgatttttttcttatgtcataagccccaggtcttcagcttcaaagcttcactctccagacttaaggagttgctttcaggatgttgcctcttgaaaatgagattgaccactgaagttgcttgattttattcttgcaaggaggttaagtgaggggaattaaggagaattaggagagttatgggagttgtgcttctgggtttcttgggccagctaatcgaacggcgagcttctctgcggtggaagcaagcggggagagcatcttaccgctgcagctagagcctcctgaactgtattacttcctgctaactgtatacataattctcctagtttattcatgtacctttatgcatgaaattttagctgggatgagcacacatatcatacaattgttacaaggcctgtgttctgatggtttatggaggtatggtgtcttctggtcattcaaaagtgagacgaatgggtggatcttgacttggggtgatggatatgtcaataaaatgatagaagactggcaaatgggagatctatctgctagccccactgttcgtaagaatcagacaataccttcttcgtggtgcaagaaaagctatccattttgccccattgaggcagcactgatgagaatgcctagccatttgtaccctcttggagaagggattattggtaaagtagcacttacaggacaacattgctggatttctgccaatgagctttgttcaacagctatgcataagtaccaagaagactggcagctgcagtttgcagcgggaatcaagacggttctgcttgtaccagtggttcctcacggggttcttcagctgggctctttagatacggttttcgaaagtgcagtgttggtggcactcataaaggacatgtttcataagatttgtgatgcttcggtttctcatgcttctttatccactgggtctgcctactcaaataatttgagtctaccaactgcaaccctatcaatcaatcatccagatgttaacttgatatatagttctgctcagatcgtgaatgctgatcaccacagtttaacacatcccttcagtacatcggaaattccaatactagaagacatcactataggttcttacagaactattccaacaggttggcctaatggactgttgggcgataatggcaccattgggcatgaatattttgaaggcttttctctgacagatatggcacattggaaccaagagaatactcatggcagcactattgttgtaaatgatggtgcaatgctttcgaatacttcaattcattcagagtttcacggagatgtcatggtaatgtccagggaagaacatgagctcttcacgtggcgttgtaggctgaaacaagaacctacaagccctgctctccctcaactgaatgacaacagtgctgatctttatgtgcagcttgaaaccaacaattatgcggaattgttactagacacaataatctaccagactggtcatacatcaaacattgaatctgctccctcagctgagtctccaatttcatgcaaaacacaagttaaaaaagatcattcattgagggtcgatgaatcgccaatttctgatatcccaggtcgtcaagacctttcacctatatccataaatgaagggtttataagttgtgcaatgactgatggacgtgtggaaatcaacaagaccatacctgaagaatgcttagttgaaaatacgcacaggataaattcagctgaaatcaaaagaagatgcagaaaagttgagctccagagaccaagaccaagggacaggcaattaattcaagataggatgaaggggttgagggagcttattccaaatgcatcaaagtgcagcattgatgctctactggacaaaaccatagcatacatgctgttcctgcaaagtgtatccgagaaagctgagaagattcagaatacattggaagacaaggaatcccacgatgagacaaagaagcaacttgaaaggtgcccactaagagtggaagagcttaaccagcctggccatcttctcatcgagatgttgtgcgaggactatgaagtctttcttgagatggcacacgtgctgaagggtcttaaggtgagcatactgaaaggagtgctggagtatcgttccgacaagttttgtgctcgctttgtcatcgagggttcggatggtttcaaccagatgcagattctgtgcccgctgatgcatctcctgcgcaggagatgaagtttgtgtgtcgttgaaatgttaccgagactcttcttactctctgtttgctttggcataaatgtacagcaaaataatggatggatgcattttttttagatcccagcgagactggaatgttgctatatatatatccatattcaatcgtgaacagcaaacaattcaatcgtgattcagcttcatgtctttag

SEQ ID NO: 67714 - DNA, 2180 bp, Zea Mays
atggctatgtggctgttgatgaaagaagacgtcctctgcacttgtgagaatggatgtcatcttcaatttaatagaaaagtcaaaggtctcaaggcagctcatgcccaggcagtccatcatattcttgtttcagctgggatgagcacacatatcatacaattgttacaaggcctgtgttctgatggtttatggaggtatggtgtcttctggtcattcaaaagtgagacgaatgggtggatcttgacttggggtgatggatatgtcaataaaatgatagaagactggcaaatgggagatctatctgctagccccactgttcgtaagaatcagacaataccttcttcgtggtgcaagaaaagctatccattttgccccattgaggcagcactgatgagaatgcctagccatttgtaccctcttggagaagggattattggtaaagtagcacttacaggacaacattgctggatttctgccaatgagctttgttcaacagctatgcataagtaccaagaagactggcagctgcagtttgcagcgggaatcaagacggttctgcttgtaccagtggttcctcacggggttcttcagctgggctctttagatacggttttcgaaagtgcagtgttggtggcactcataaaggacatgtttcataagatttgtgatgcttcggtttctcatgcttctttatccactgggtctgcctactcaaataatttgagtctaccaactgcaaccctatcaatcaatcatccagatgttaacttgatatatagttctgctcagatcgtgaatgctgatcaccacagtttaacacatcccttcagtacatcggaaattccaatactagaagacatcactataggttcttacagaactattccaacaggttggcctaatggactgttgggcgataatggcaccattgggcatgaatattttgaaggcttttctctgacagatatggcacattggaaccaagagaatactcatggcagcactattgttgtaaatgatggtgcaatgctttcgaatacttcaattcattcagagtttcacggagatgtcatggtaatgtccagggaagaacatgagctcttcacgtggcgttgtaggctgaaacaagaacctacaagccctgctctccctcaactgaatgacaacagtgctgatctttatgtgcagcttgaaaccaacaattatgcggaattgttactagacacaataatctaccagactggtcatacatcaaacattgaatctgctccctcagctgagtctccaatttcatgcaaaacacaagttaaaaaagatcattcattgagggtcgatgaatcgccaatttctgatatcccaggtcgtcaagacctttcacctatatccataaatgaagggtttataagttgtgcaatgactgatggacgtgtggaaatcaacaagaccatacctgaagaatgcttagttgaaaatacgcacaggataaattcagctgaaatcaaaagaagatgcagaaaagttgagctccagagaccaagaccaagggacaggcaattaattcaagataggatgaaggggttgagggagcttattccaaatgcatcaaagtgcagcattgatgctctactggacaaaaccatagcatacatgctgttcctgcaaagtgtatccgagaaagctgagaagattcagaatacattggaagacaaggaatcccacgatgagacaaagaagcaacttgaaaggtgcccactaagagtggaagagcttaaccagcctggccatcttctcatcgagatgttgtgcgaggactatgaagtctttcttgagatggcacacgtgctgaagggtcttaaggtgagcatactgaaaggagtgctggagtatcgttccgacaagttttgtgctcgctttgtcatcgagggttcggatggtttcaaccagatgcagattctgtgcccgctgatgcatctcctgcgcaggagatgaagtttgtgtgtcgttgaaatgttaccgagactcttcttactctctgtttgctttggcataaatgtacagcaaaataatggatggatgcattttttttagatcccagcgagactggaatgttgctatatatatatccatattcaatcgtgaacagcaaacaattcaatcgtgattcagcttcatgtctttag

SEQ ID NO: 67715 - DNA, 2926 bp, Zea Mays
atggctatgtggctgttgatgaaagaagacgtcctctgcacttgtgagaatggatgtcatcttcaatttaatagaaaagtcaaaggtctcaaggcagctcatgcccaggcagtgagaagggaccaacagggacccaattgccttcccgctcagccaagcttttattggcaccacttctaggctctgatctcttgtattctctgcttcttctacaggtccatcatattcttgtttcaggtctgattaaaccctgatatgctacaatccaaccttgtctagcatatattttgtgtgtctcatactcgatttttttcttatgtcataaggtccaaatcgccgtctttgtttgttcttgcagtaatttcttctcctttttcagttcacctttttttgtgaataaaaagaacctcaaattcatagatcacaagatgttcattgattttcctaaaagatgatcaatctgctcttttcactttgaacttttaaattttgggagtgaatttgttctgcttgtcttctgatggctgagtcataaacctgcagccccaggtcttcagcttcaaagcttcactctccagacttaaggagttgctttcaggatgttgcctcttgaaaatgagattgaccactgaagttgcttgattttattcttgcaaggaggttaagtgaggggaattaaggagaattaggagagttatgggagttgtgcttctgggtttcttgggccagctaatcgaacggcgagcttctctgcggtggaagcaagcggggagagcatcttaccgctgcagctagagcctcctgaactgtattacttcctgctaactgtatacataattctcctagtttattcatgtacctttatgcatgaaattttagctgggatgagcacacatatcatacaattgttacaaggcctgtgttctgatggtttatggaggtatggtgtcttctggtcattcaaaagtgagacgaatgggtggatcttgacttggggtgatggatatgtcaataaaatgatagaagactggcaaatgggagatctatctgctagccccactgttcgtaagaatcagacaataccttcttcgtggtgcaagaaaagctatccattttgccccattgaggcagcactgatgagaatgcctagccatttgtaccctcttggagaagggattattggtaaagtagcacttacaggacaacattgctggatttctgccaatgagctttgttcaacagctatgcataagtaccaagaagactggcagctgcagtttgcagcgggaatcaagacggttctgcttgtaccagtggttcctcacggggttcttcagctgggctctttagatacggttttcgaaagtgcagtgttggtggcactcataaaggacatgtttcataagatttgtgatgcttcggtttctcatgcttctttatccactgggtctgcctactcaaataatttgagtctaccaactgcaaccctatcaatcaatcatccagatgttaacttgatatatagttctgctcagatcgtgaatgctgatcaccacagtttaacacatcccttcagtacatcggaaattccaatactagaagacatcactataggttcttacagaactattccaacaggttggcctaatggactgttgggcgataatggcaccattgggcatgaatattttgaaggcttttctctgacagatatggcacattggaaccaagagaatactcatggcagcactattgttgtaaatgatggtgcaatgctttcgaatacttcaattcattcagagtttcacggagatgtcatggtaatgtccagggaagaacatgagctcttcacgtggcgttgtaggctgaaacaagaacctacaagccctgctctccctcaactgaatgacaacagtgctgatctttatgtgcagcttgaaaccaacaattatgcggaattgttactagacacaataatctaccagactggtcatacatcaaacattgaatctgctccctcagctgagtctccaatttcatgcaaaacacaagttaaaaaagatcattcattgagggtcgatgaatcgccaatttctgatatcccaggtcgtcaagacctttcacctatatccataaatgaagggtttataagttgtgcaatgactgatggacgtgtggaaatcaacaagaccatacctgaagaatgcttagttgaaaatacgcacaggataaattcagctgaaatcaaaagaagatgcagaaaagttgagctccagagaccaagaccaagggacaggcaattaattcaagataggatgaaggggttgagggagcttattccaaatgcatcaaagtgcagcattgatgctctactggacaaaaccatagcatacatgctgttcctgcaaagtgtatccgagaaagctgagaagattcagaatacattggaagacaaggaatcccacgatgagacaaagaagcaacttgaaaggtgcccactaagagtggaagagcttaaccagcctggccatcttctcatcgagatgttgtgcgaggactatgaagtctttcttgagatggcacacgtgctgaagggtcttaaggtgagcatactgaaaggagtgctggagtatcgttccgacaagttttgtgctcgctttgtcatcgagggttcggatggtttcaaccagatgcagattctgtgcccgctgatgcatctcctgcgcaggagatgaagtttgtgtgtcgttgaaatgttaccgagactcttcttactctctgtttgctttggcataaatgtacagcaaaataatggatggatgcattttttttagatcccagcgagactggaatgttgctatatatatatccatattcaatcgtgaacagcaaacaattcaatcgtgattcagcttcatgtctttag

SEQ ID NO: 67716 - DNA, 2668 bp, Zea Mays
atggctatgtggctgttgatgaaagaagacgtcctctgcacttgtgagaatggatgtcatcttcaatttaatagaaaagtcaaaggtctcaaggcagctcatgcccaggcagtgagaagggaccaacagggacccaattgccttcccgctcagccaagcttttattggcaccacttctaggctctgatctcttgtattctctgcttcttctacaggtccatcatattcttgtttcagccccaggtcttcagcttcaaagcttcactctccagacttaaggagttgctttcaggatgttgcctcttgaaaatgagattgaccactgaagttgcttgattttattcttgcaaggaggttaagtgaggggaattaaggagaattaggagagttatgggagttgtgcttctgggtttcttgggccagctaatcgaacggcgagcttctctgcggtggaagcaagcggggagagcatcttaccgctgcagctagagcctcctgaactgtattacttcctgctaactgtatacataattctcctagtttattcatgtacctttatgcatgaaattttagctgggatgagcacacatatcatacaattgttacaaggcctgtgttctgatggtttatggaggtatggtgtcttctggtcattcaaaagtgagacgaatgggtggatcttgacttggggtgatggatatgtcaataaaatgatagaagactggcaaatgggagatctatctgctagccccactgttcgtaagaatcagacaataccttcttcgtggtgcaagaaaagctatccattttgccccattgaggcagcactgatgagaatgcctagccatttgtaccctcttggagaagggattattggtaaagtagcacttacaggacaacattgctggatttctgccaatgagctttgttcaacagctatgcataagtaccaagaagactggcagctgcagtttgcagcgggaatcaagacggttctgcttgtaccagtggttcctcacggggttcttcagctgggctctttagatacggttttcgaaagtgcagtgttggtggcactcataaaggacatgtttcataagatttgtgatgcttcggtttctcatgcttctttatccactgggtctgcctactcaaataatttgagtctaccaactgcaaccctatcaatcaatcatccagatgttaacttgatatatagttctgctcagatcgtgaatgctgatcaccacagtttaacacatcccttcagtacatcggaaattccaatactagaagacatcactataggttcttacagaactattccaacaggttggcctaatggactgttgggcgataatggcaccattgggcatgaatattttgaaggcttttctctgacagatatggcacattggaaccaagagaatactcatggcagcactattgttgtaaatgatggtgcaatgctttcgaatacttcaattcattcagagtttcacggagatgtcatggtaatgtccagggaagaacatgagctcttcacgtggcgttgtaggctgaaacaagaacctacaagccctgctctccctcaactgaatgacaacagtgctgatctttatgtgcagcttgaaaccaacaattatgcggaattgttactagacacaataatctaccagactggtcatacatcaaacattgaatctgctccctcagctgagtctccaatttcatgcaaaacacaagttaaaaaagatcattcattgagggtcgatgaatcgccaatttctgatatcccaggtcgtcaagacctttcacctatatccataaatgaagggtttataagttgtgcaatgactgatggacgtgtggaaatcaacaagaccatacctgaagaatgcttagttgaaaatacgcacaggataaattcagctgaaatcaaaagaagatgcagaaaagttgagctccagagaccaagaccaagggacaggcaattaattcaagataggatgaaggggttgagggagcttattccaaatgcatcaaagtgcagcattgatgctctactggacaaaaccatagcatacatgctgttcctgcaaagtgtatccgagaaagctgagaagcggaggtgtcccatgccttatttctgctttgccgtgacgctgagacagattcagaatacattggaagacaaggaatcccacgatgagacaaagaagcaacttgaaaggtgcccactaagagtggaagagcttaaccagcctggccatcttctcatcgagatgttgtgcgaggactatgaagtctttcttgagatggcacacgtgctgaagggtcttaaggtgagcatactgaaaggagtgctggagtatcgttccgacaagttttgtgctcgctttgtcatcgagggttcggatggtttcaaccagatgcagattctgtgcccgctgatgcatctcctgcgcaggagatgaagtttgtgtgtcgttgaaatgttaccgagactcttcttactctctgtttgctttggcataaatgtacagcaaaataatggatggatgcattttttttagatcccagcgagactggaatgttgctatatatatatccatattcaatcgtgaacagcaaacaattcaatcgtgattcagcttcatgtctttag

SEQ ID NO: 67717 - DNA, 2175 bp, Zea Mays
atggctatgtggctgttgatgaaagaagacgtcctctgcacttgtgagaatggatgtcatcttcaatttaatagaaaagtcaaaggtctcaaggcagctcatgcccaggcagtccatcatattcttgtttcagctgggatgagcacacatatcatacaattgttacaaggcctgtgttctgatggtttatggaggtatggtgtcttctggtcattcaaaagtgagacgaatgggtggatcttgacttggggtgatggatatgtcaataaaatgatagaagactggcaaatgggagatctatctgctagccccactgttcgtaagaatcagacaataccttcttcgtggtgcaagaaaagctatccattttgccccattgaggcagcactgatgagaatgcctagccatttgtaccctcttggagaagggattattggtaaagtagcacttacaggacaacattgctggatttctgccaatgagctttgttcaacagctatgcataagtaccaagaagactggcagctgcagtttgcagcgggaatcaagacggttctgcttgtaccagtggttcctcacggggttcttcagctgggctctttagatacggttttcgaaagtgcagtgttggtggcactcataaaggacatgtttcataagatttgtgatgcttcggtttctcatgcttctttatccactgggtctgcctactcaaataatttgagtctaccaactgcaaccctatcaatcaatcatccagatgttaacttgatatatagttctgctcagatcgtgaatgctgatcaccacagtttaacacatcccttcagtacatcggaaattccaatactagaagacatcactataggttcttacagaactattccaacaggttggcctaatggactgttgggcgataatggcaccattgggcatgaatattttgaaggcttttctctgacagatatggcacattggaaccaagagaatactcatggcagcactattgttgtaaatgatggtgcaatgctttcgaatacttcaattcattcagagtttcacggagatgtcatggtaatgtccagggaagaacatgagctcttcacgtggcgttgtaggctgaaacaagaacctacaagccctgctctccctcaactgaatgacaacagtgctgatctttatgtgcagcttgaaaccaacaattatgcggaattgttactagacacaataatctaccagactggtcatacatcaaacattgaatctgctccctcagctgagtctccaatttcatgcaaaacacaagttaaaaaagatcattcattgagggtcgatgaatcgccaatttctgatatcccaggtcgtcaagacctttcacctatatccataaatgaagggtttataagttgtgcaatgactgatggacgtgtggaaatcaacaagaccatacctgaagaatgcttagttgaaaatacgcacaggataaattcagctgaaatcaaaagaagatgcagaaaagttgagctccagagaccaagaccaagggacaggcaattaattcaagataggatgaaggggttgagggagcttattccaaatgcatcaaagcattgatgctctactggacaaaaccatagcatacatgctgttcctgcaaagtgtatccgagaaagctgagaagattcagaatacattggaagacaaggaatcccacgatgagacaaagaagcaacttgaaaggtgcccactaagagtggaagagcttaaccagcctggccatcttctcatcgagatgttgtgcgaggactatgaagtctttcttgagatggcacacgtgctgaagggtcttaaggtgagcatactgaaaggagtgctggagtatcgttccgacaagttttgtgctcgctttgtcatcgagggttcggatggtttcaaccagatgcagattctgtgcccgctgatgcatctcctgcgcaggagatgaagtttgtgtgtcgttgaaatgttaccgagactcttcttactctctgtttgctttggcataaatgtacagcaaaataatggatggatgcattttttttagatcccagcgagactggaatgttgctatatatatatccatattcaatcgtgaacagcaaacaattcaatcgtgattcagcttcatgtctttag

SEQ ID NO: 67718 - DNA, 2445 bp, Zea Mays
atggctatgtggctgttgatgaaagaagacgtcctctgcacttgtgagaatggatgtcatcttcaatttaatagaaaagtcaaaggtctcaaggcagctcatgcccaggcagtccatcatattcttgtttcagccccaggtcttcagcttcaaagcttcactctccagacttaaggagttgctttcaggatgttgcctcttgaaaatgagattgaccactgaagttgcttgattttattcttgcaaggaggttaagtgaggggaattaaggagaattaggagagttatgggagttgtgcttctgggtttcttgggccagctaatcgaacggcgagcttctctgcggtggaagcaagcggggagagcatcttaccgctgcagctagagcctcctgaactctgggatgagcacacatatcatacaattgttacaaggcctgtgttctgatggtttatggaggtatggtgtcttctggtcattcaaaagtgagacgaatgggtggatcttgacttggggtgatggatatgtcaataaaatgatagaagactggcaaatgggagatctatctgctagccccactgttcgtaagaatcagacaataccttcttcgtggtgcaagaaaagctatccattttgccccattgaggcagcactgatgagaatgcctagccatttgtaccctcttggagaagggattattggtaaagtagcacttacaggacaacattgctggatttctgccaatgagctttgttcaacagctatgcataagtaccaagaagactggcagctgcagtttgcagcgggaatcaagacggttctgcttgtaccagtggttcctcacggggttcttcagctgggctctttagatacggttttcgaaagtgcagtgttggtggcactcataaaggacatgtttcataagatttgtgatgcttcggtttctcatgcttctttatccactgggtctgcctactcaaataatttgagtctaccaactgcaaccctatcaatcaatcatccagatgttaacttgatatatagttctgctcagatcgtgaatgctgatcaccacagtttaacacatcccttcagtacatcggaaattccaatactagaagacatcactataggttcttacagaactattccaacaggttggcctaatggactgttgggcgataatggcaccattgggcatgaatattttgaaggcttttctctgacagatatggcacattggaaccaagagaatactcatggcagcactattgttgtaaatgatggtgcaatgctttcgaatacttcaattcattcagagtttcacggagatgtcatggtaatgtccagggaagaacatgagctcttcacgtggcgttgtaggctgaaacaagaacctacaagccctgctctccctcaactgaatgacaacagtgctgatctttatgtgcagcttgaaaccaacaattatgcggaattgttactagacacaataatctaccagactggtcatacatcaaacattgaatctgctccctcagctgagtctccaatttcatgcaaaacacaagttaaaaaagatcattcattgagggtcgatgaatcgccaatttctgatatcccaggtcgtcaagacctttcacctatatccataaatgaagggtttataagttgtgcaatgactgatggacgtgtggaaatcaacaagaccatacctgaagaatgcttagttgaaaatacgcacaggataaattcagctgaaatcaaaagaagatgcagaaaagttgagctccagagaccaagaccaagggacaggcaattaattcaagataggatgaaggggttgagggagcttattccaaatgcatcaaagtgcagcattgatgctctactggacaaaaccatagcatacatgctgttcctgcaaagtgtatccgagaaagctgagaagattcagaatacattggaagacaaggaatcccacgatgagacaaagaagcaacttgaaaggtgcccactaagagtggaagagcttaaccagcctggccatcttctcatcgagatgttgtgcgaggactatgaagtctttcttgagatggcacacgtgctgaagggtcttaaggtgagcatactgaaaggagtgctggagtatcgttccgacaagttttgtgctcgctttgtcatcgagggttcggatggtttcaaccagatgcagattctgtgcccgctgatgcatctcctgcgcaggagatgaagtttgtgtgtcgttgaaatgttaccgagactcttcttactctctgtttgctttggcataaatgtacagcaaaataatggatggatgcattttttttagatcccagcgagactggaatgttgctatatatatatccatattcaatcgtgaacagcaaacaattcaatcgtgattcagcttcatgtctttag

SEQ ID NO: 67719 - DNA, 1621 bp, Zea Mays
ctccccgccgctagcagtagccgctgatgtagcctccatagtcacacgccgccctcacgcggcaccctcttcagaactcgccgcctccatgctcccttccgaccgcgcgcacgtctcttccgtccgtttcgacgccgtcctaaaagatcatatcaataagctgataaagctttgatgtgcctgagcatcagatctgtttatctattaatttcatgtgaagtagcctcatccacatatattgtcttatttgaatgaagttccactcaaaaaacaatactgtttcgtcagtcagggctgttgtgcttttctgaccgagcttgtggcaagattctgaacgacctactgtctgttgctgctggtgcttccatatgttcctctgacgttcagatattgagtaaaggaggatgacagacaccctcattgttaagttattcccttaattttatgtgtacaacggtacaaaaaaatctagattaggggtccgacgtccccctaacattattatatttaagaagatgggcccaccgaaacctgccagggccagacgtcacccaagggatgccacacagcctcattggtatttttctacacgatatttagttctagtaacatttagtttgtgcctataatattgctgcacatgcattatattctaggctaatttgtatttgcaaatagagggatcagtatgggctttcaatctacttctttgtcagtttttcctgtttgagaaagtattcaagacaagttcgaattctatatagacaggcagataatagttatggaaaagctttcggtattaggtacaactagacttgttttggtatgggtgtaccaacatatcatttttttagagagagaggtggaccaaatgaatcaactacaagtaggaatcaacatgattaacatgtttcagactgacagggagaagaagtcttttaactttattgacgttttccaagacctgcctggccaattaagcctcttaataaggctgtgtcaattgatccctatcagcttatgtaatgccagaagaaaagacaagaggctctcaaaggaagagagcactatattatatagtcaaccaaccatcacaactcacctaacatatgtgtgcctttaccaataaaagttgagtaggcaatgcaacatgggtgtattcagaacaatacctactatatatgtatatgtactacttgtcttgtgcattagtagtattcagtgctagtgatgcaattgatgtagactattggccttaacaaacaattgtgatggcaaacaaatatacaaggaacctgcaatatattaatgtgttgacttgttgcaagattgattcagaacccagctaactttttttcttgaagtttaaccagccagctccaactttacagataatcaattatatagttaactcattattacctgattcacctctttcccaagtggcataggatctgcaggcgccaactgatttcatagaacccccccccccccccccccaaggttatggaacaggaggccttgaaacacaggtatactggtagcttgtcaatgattactttgttgagacttgttagcattgccagttatcaactacccatcaatctttgtttttctgtat

SEQ ID NO: 67720 - DNA, 1706 bp, Zea Mays
ctccccgccgctagcagtagccgctgatgtagcctccatagtcacacgccgccctcacgcggcaccctcttcagaactcgccgcctccatgctcccttccgaccgcgcgcacgtctcttccgtccgtttcgacgccgtcctaaaagatcatatcaataagctgataaagctttgatgtgcctgagcatcagatctgtttatctattaatttcatgtgaagtagcctcatccacatatattgtcttatttgaatgaagttccactcaaaaaacaatactgtttcgtcagtcagggtacatattggaacactatttcgtgtatattccaagttactctgtaaattacaaagccgcggccaaaatcatttataagtttgttgctgttgtgcttttctgaccgagcttgtggcaagattctgaacgacctactgtctgttgctgctggtgcttccatatgttcctctgacgttcagatattgagtaaaggaggatgacagacaccctcattgttaagttattcccttaattttatgtgtacaacggtacaaaaaaatctagattaggggtccgacgtccccctaacattattatatttaagaagatgggcccaccgaaacctgccagggccagacgtcacccaagggatgccacacagcctcattggtatttttctacacgatatttagttctagtaacatttagtttgtgcctataatattgctgcacatgcattatattctaggctaatttgtatttgcaaatagagggatcagtatgggctttcaatctacttctttgtcagtttttcctgtttgagaaagtattcaagacaagttcgaattctatatagacaggcagataatagttatggaaaagctttcggtattaggtacaactagacttgttttggtatgggtgtaccaacatatcatttttttagagagagaggtggaccaaatgaatcaactacaagtaggaatcaacatgattaacatgtttcagactgacagggagaagaagtcttttaactttattgacgttttccaagacctgcctggccaattaagcctcttaataaggctgtgtcaattgatccctatcagcttatgtaatgccagaagaaaagacaagaggctctcaaaggaagagagcactatattatatagtcaaccaaccatcacaactcacctaacatatgtgtgcctttaccaataaaagttgagtaggcaatgcaacatgggtgtattcagaacaatacctactatatatgtatatgtactacttgtcttgtgcattagtagtattcagtgctagtgatgcaattgatgtagactattggccttaacaaacaattgtgatggcaaacaaatatacaaggaacctgcaatatattaatgtgttgacttgttgcaagattgattcagaacccagctaactttttttcttgaagtttaaccagccagctccaactttacagataatcaattatatagttaactcattattacctgattcacctctttcccaagtggcataggatctgcaggcgccaactgatttcatagaacccccccccccccccccccaaggttatggaacaggaggccttgaaacacaggtatactggtagcttgtcaatgattactttgttgagacttgttagcattgccagttatcaactacccatcaatctttgtttttctgtat

SEQ ID NO: 67721 - DNA, 2565 bp, Zea Mays
cggagatcggatcgaactgcctgtgcagtctccctccctccctccctccctccctccctcatgtccatatataccaaaaaatctccgccgcgccgccattagctagctctcgtcgtcttcgttcctccgcaaataatttgttactcaagccgaaggaggacgagggcgacgggattggctaatcaaatcgaccgatctagtggctggtgcccaggagaagggacgcgggcagtgcggctcgtcgtggtcagcagcttgtggcgaccggtcgccagggaatcaatcaattcaatcagaaagttgcaattttgattgagctcgattcgtcatccacaagacattagggaatcgaaccaccacaaagcaagaaggcagtccagtgcagagagagagagagagagaccaagaagagaaagagaaagggaaagagaagcaaagcaatggatgccgcctccgcttcgtcgtcttggcaagacctgcccccgcgcctgcaatcctacgacaacagggcgccgctcctcctgcccgtcaagatcatggacgccgccgccgacgacaagccggaaatctccgacgatacggcccaccagattagcgttgatccttggtatcaagttggcttcgtcctcacaaccggggtcaacagcgcatacgttctaggatactctggatcaatcatggtccctctaggctggatcggcggcacatgcggcctcctcctagctgccgccatatccatgtacgctaatgctcttcttgcacggcttcatgaagtcggtggcaaacgccatatcagatacagagaccttgctggacacatatatggaccgaaaatttacgggcttacatgggctctgcagtacattaaccttttcatgatcaacactggctttatcatcttagctggacaagctctcaaggccacgtatggactgttcagtgatgatggagttctgaaactcccttactgcattgcgatatcaggattcgtctgtgctcttttcgccattggaatcccttatttatctgccctcaggatttggttggggttctccacgcttttcagcctcatgtatattgtgatagcagttgtgctgtcgtcgagagatgggataaccgcacctgcaagggattacagcatccccaaatcatcgcagtcaactcgagtcttcactacgataggttccatagcagaccttgtgtttgcttacaacaccggcatgctgccagaaattcaggcaaccatcaggcctcctgtggtgaagaacatggagaaagctctatggttccagttcaccattggctccttgcctctctatgctgtagtttttgtgggttactgggcttatgggtcctcaacatcaggctacctcctcaacagtgtcacaggcccagtctgggtgaaagcggttgcaaatctgtcggcattttttcagacagtcatagcgctgcacatctttgctagccccatgtatgaattcctggacacaaaatatggaagtgggcgtggtggcccttttgagatccacaacgtggcgttcagagtagcagtcagaggaggctacctgacggtgaacacgctggtggccgcggtgctcccattcctcggcgacttcatgagcctgacgggcgccctcagcaccttcccgctgacgtttgtgctcgcaaatcacatgtacctgatggtgaaggggcctaagctgggtgccatccagaaatcatggcactggctcaatgttcttgggttcactgcgctggctgttgcagcggcggtctccgcaataaggctcatcatgcgtgattccagcacctaccacttcttcgctgatctttgagatcgatcgttttcttttctttttgttggaatgctgagccagagctagtattttttcattttcagagaattattatccatgtatgtaaggatgacgcatatatatattgaatagatgatttaatatcaggtcagagcagacaaggaggtatggtgtcgatgcacgacttgtagaggatgcggaggtagtcgagcagggcatcctggttggcgtcgtccaccggctccatctcgaagctccacaccaccagcgttgcgcctccgccgtagtccaggaggctgatggtgttgcgggagccggcgaggccgacgttgccgtcctccatgaggtaggtgtaggagcgggcggtgtggtccatggccaccagcctctccctcacccacgacgacccctgctgctgctgggggaacatgaggccgccgcgcacgaggcgcacgtagcccggcacgtcctcgtcaccggccaccgcggtgcacgactccaccatgggcatccactcgcgcagccgagacgtggaggacaccagctcccacacgcgggccacgggcgcgctcaccacgccgctcgctgcgccgcgccacgccttggacgccgcttcatctgactgtccgtgcccatccatggccaagaaccgtcagctccggggccagcggatatagcaagggggtcgctggaaagtcaagctacatggctgcaaaaccaaagctcacctaaaaataaggacaaacat

SEQ ID NO: 67722 - DNA, 2669 bp, Zea Mays
cggagatcggatcgaactgcctgtgcagtctccctccctccctccctccctccctccctcatgtccatatataccaaaaaatctccgccgcgccgccattagctagctctcgtcgtcttcgttcctccgcaaataatttgttactcaagccgaaggaggacgagggcgacgggattggctaatcaaatcgaccgatctagtggctggtgcccaggagaagggacgcgggcagtgcggctcgtcgtggtcagcagcttgtggcgaccggtcgccagggaatcaatcaattcaatcagaaagttgcaattttgattgagctcgattcgtcatccacaagacattagggaatcgaaccaccacaaagcaagaaggcagtccagtgcagagagagagagagagagaccaagaagagaaagagaaagggaaagagaagcaaagcaatggatccaccgcatcaccgtgctgtgctgcggcggcctcgtcctcctcctcctccctcctgccctttttataggccgcctccgcttcgtcgtcttggcaagacctgcccccgcgcctgcaatcctacgacaacagggcgccgctcctcctgcccgtcaagatcatggacgccgccgccgacgacaagccggaaatctccgacgatacggcccaccagattagcgttgatccttggtatcaagttggcttcgtcctcacaaccggggtcaacagcgcatacgttctaggatactctggatcaatcatggtccctctaggctggatcggcggcacatgcggcctcctcctagctgccgccatatccatgtacgctaatgctcttcttgcacggcttcatgaagtcggtggcaaacgccatatcagatacagagaccttgctggacacatatatgtacattaaccttttcatgatcaacactggctttatcatcttagctggacaagctctcaaggccacgtatggactgttcagtgatgatggagttctgaaactcccttactgcattgcgatatcaggattcgtctgtgctcttttcgccattggaatcccttatttatctgccctcaggatttggttggggttctccacgcttttcagcctcatgtatattgtgatagcagttgtgctgtcgtcgagagatgggataaccgcacctgcaagggattacagcatccccaaatcatcgcagtcaactcgagtcttcactacgataggttccatagcagaccttgtgtttgcttacaacaccggcatgctgccagaaattcaggtgagcattttctttttctggataacattttctgttattgttgccttactatttgtgatatattattacaggcaaccatcaggcctcctgtggtgaagaacatggagaaagctctatggttccagttcaccattggctccttgcctctctatgctgtagtttttgtgggttactgggcttatgggtcctcaacatcaggctacctcctcaacagtgtcacaggcccagtctgggtgaaagcggttgcaaatctgtcggcattttttcagacagtcatagcgctgcacatctttgctagccccatgtatgaattcctggacacaaaatatggaagtgggcgtggtggcccttttgagatccacaacgtggcgttcagagtagcagtcagaggaggctacctgacggtgaacacgctggtggccgcggtgctcccattcctcggcgacttcatgagcctgacgggcgccctcagcaccttcccgctgacgtttgtgctcgcaaatcacatgtacctgatggtgaaggggcctaagctgggtgccatccagaaatcatggcactggctcaatgttcttgggttcactgcgctggctgttgcagcggcggtctccgcaataaggctcatcatgcgtgattccagcacctaccacttcttcgctgatctttgagatcgatcgttttcttttctttttgttggaatgctgagccagagctagtattttttcattttcagagaattattatccatgtatgtaaggatgacgcatatatatattgaatagatgatttaatatcaggtcagagcagacaaggaggtatggtgtcgatgcacgacttgtagaggatgcggaggtagtcgagcagggcatcctggttggcgtcgtccaccggctccatctcgaagctccacaccaccagcgttgcgcctccgccgtagtccaggaggctgatggtgttgcgggagccggcgaggccgacgttgccgtcctccatgaggtaggtgtaggagcgggcggtgtggtccatggccaccagcctctccctcacccacgacgacccctgctgctgctgggggaacatgaggccgccgcgcacgaggcgcacgtagcccggcacgtcctcgtcaccggccaccgcggtgcacgactccaccatgggcatccactcgcgcagccgagacgtggaggacaccagctcccacacgcgggccacgggcgcgctcaccacgccgctcgctgcgccgcgccacgccttggacgccgcttcatctgactgtccgtgcccatccatggccaagaaccgtcagctccggggccagcggatatagcaagggggtcgctggaaagtcaagctacatggctgcaaaaccaaagctcacctaaaaataaggacaaacat

SEQ ID NO: 67723 - DNA, 3056 bp, Zea Mays
ctccgtaggcaaggcaaggggggcaaggctctaacggagatcggatcgaactgcctgtgcagtctccctccctccctccctccctccctccctcatgtccatatataccaaaaaatctccgccgcgccgccattagctagctctcgtcgtcttcgttcctccgcaaataatttgttactcaagccgaaggaggacgagggcgacgggattggctaatcaaatcgaccgatctagtggctggtgcccaggagaagggacgcgggcagtgcggctcgtcgtggtcagcagcttgtggcgaccggtcgccagggaatcaatcaattcaatcagaaagttgcaattttgattgagctcgattcgtcatccacaagacattagggaatcgaaccaccacaaagcaagaaggcagtccagtgcagagagagagagagagagaccaagaagagaaagagaaagggaaagagaagcaaagcaatggatccctctgctagctctgcatacaaacaccatgtggtggtatgtattagagatggtgctgattgcctgcccatgcccaggattgcgtgagccatcgtcactctgctctgcctgatcctgttgtgctaaacatgccagtcagcacacgtattcagatttctttttcctgtcttgtgctgtgttgctgcattactcctatcaggcatcttgtatgtatcacgaggaagaaagacacgtatgcagcagcaggcattcaattgcaatagatagattttcttctaattgattgatacatgcaaccctccatcagtattcaatggacatgttgccaccacttttaaataaataaataaatgaaaaatgatgcgagctacttttggtgttgggggaagccaccgcatcaccgtgctgtgctgcggcggcctcgtcctcctcctcctccctcctgccctttttataggccgcctccgcttcgtcgtcttggcaagacctgcccccgcgcctgcaatcctacgacaacagggcgccgctcctcctgcccgtcaagatcatggacgccgccgccgacgacaagccggaaatctccgacgatacggcccaccagattagcgttgatccttggtatcaagttggcttcgtcctcacaaccggggtcaacagcgcatacgttctaggatactctggatcaatcatggtccctctaggctggatcggcggcacatgcggcctcctcctagctgccgccatatccatgtacgctaatgctcttcttgcacggcttcatgaagtcggtggcaaacgccatatcagatacagagaccttgctggacacatatatggaccgaaaatttacgggcttacatgggctctgcagtacattaaccttttcatgatcaacactggctttatcatcttagctggacaagctctcaaggccacgtatggactgttcagtgatgatggagttctgaaactcccttactgcattgcgatatcaggattcgtctgtgctcttttcgccattggaatcccttatttatctgccctcaggatttggttggggttctccacgcttttcagcctcatgtatattgtgatagcagttgtgctgtcgtcgagagatgggataaccgcacctgcaagggattacagcatccccaaatcatcgcagtcaactcgagtcttcactacgataggttccatagcagaccttgtgtttgcttacaacaccggcatgctgccagaaattcaggcaaccatcaggcctcctgtggtgaagaacatggagaaagctctatggttccagttcaccattggctccttgcctctctatgctgtagtttttgtgggttactgggcttatgggtcctcaacatcaggctacctcctcaacagtgtcacaggcccagtctgggtgaaagcggttgcaaatctgtcggcattttttcagacagtcatagcgctgcacatctttgctagccccatgtatgaattcctggacacaaaatatggaagtgggcgtggtggcccttttgagatccacaacgtggcgttcagagtagcagtcagaggaggctacctgacggtgaacacgctggtggccgcggtgctcccattcctcggcgacttcatgagcctgacgggcgccctcagcaccttcccgctgacgtttgtgctcgcaaatcacatgtacctgatggtgaaggggcctaagctgggtgccatccagaaatcatggcactggctcaatgttcttgggttcactgcgctggctgttgcagcggcggtctccgcaataaggctcatcatgcgtgattccagcacctaccacttcttcgctgatctttgagatcgatcgttttcttttctttttgttggaatgctgagccagagctagtattttttcattttcagagaattattatccatgtatgtaaggatgacgcatatatatattgaatagatgatttaatatcaggtcagagcagacaaggaggtatggtgtcgatgcacgacttgtagaggatgcggaggtagtcgagcagggcatcctggttggcgtcgtccaccggctccatctcgaagctccacaccaccagcgttgcgcctccgccgtagtccaggaggctgatggtgttgcgggagccggcgaggccgacgttgccgtcctccatgaggtaggtgtaggagcgggcggtgtggtccatggccaccagcctctccctcacccacgacgacccctgctgctgctgggggaacatgaggccgccgcgcacgaggcgcacgtagcccggcacgtcctcgtcaccggccaccgcggtgcacgactccaccatgggcatccactcgcgcagccgagacgtggaggacaccagctcccacacgcgggccacgggcgcgctcaccacgccgctcgctgcgccgcgccacgccttggacgccgcttcatctgactgtccgtgcccatccatggccaagaaccgtcagctccggggccagcggatatagcaagggggtcgctggaaagtcaagctacatggctgcaaaaccaaagctcacctaaaaataaggacaaacat

SEQ ID NO: 67724 - DNA, 2601 bp, Zea Mays
cctcctcctcctcctccgtaggcaaggcaaggggggcaaggctctaacggagatcggatcgaactgcctgtgcagtctccctccctccctccctccctccctccctcatgtccatatataccaaaaaatctccgccgcgccgccattagctagctctcgtcgtcttcgttcctccgcaaataatttgttactcaagccgaaggaggacgagggcgacgggattggctaatcaaatcgaccgatctagtggctggtgcccaggagaagggacgcgggcagtgcggctcgtcgtggtcagcagcttgtggcgaccggtcgccagggaatcaatcaattcaatcagaaagttgcaattttgattgagctcgattcgtcatccacaagacattagggaatcgaaccaccacaaagcaagaaggcagtccagtgcagagagagagagagagagaccaagaagagaaagagaaagggaaagagaagcaaagcaatggatgccgcctccgcttcgtcgtcttggcaagacctgcccccgcgcctgcaatcctacgacaacagggcgccgctcctcctgcccgtcaagatcatggacgccgccgccgacgacaagccggaaatctccgacgatacggcccaccagattagcgttgatccttggtatcaagttggcttcgtcctcacaaccggggtcaacagcgcatacgttctaggatactctggatcaatcatggtccctctaggctggatcggcggcacatgcggcctcctcctagctgccgccatatccatgtacgctaatgctcttcttgcacggcttcatgaagtcggtggcaaacgccatatcagatacagagaccttgctggacacatatatggaccgaaaatttacgggcttacatgggctctgcagtacattaaccttttcatgatcaacactggctttatcatcttagctggacaagctctcaaggccacgtatggactgttcagtgatgatggagttctgaaactcccttactgcattgcgatatcaggattcgtctgtgctcttttcgccattggaatcccttatttatctgccctcaggatttggttggggttctccacgcttttcagcctcatgtatattgtgatagcagttgtgctgtcgtcgagagatgggataaccgcacctgcaagggattacagcatccccaaatcatcgcagtcaactcgagtcttcactacgataggttccatagcagaccttgtgtttgcttacaacaccggcatgctgccagaaattcaggcaaccatcaggcctcctgtggtgaagaacatggagaaagctctatggttccagttcaccattggctccttgcctctctatgctgtagtttttgtgggttactgggcttatgggtcctcaacatcaggctacctcctcaacagtgtcacaggcccagtctgggtgaaagcggttgcaaatctgtcggcattttttcagacagtcatagcgctgcacccccatgtatgaattcctggacacaaaatatggaagtgggcgtggtggcccttttgagatccacaacgtggcgttcagagtagcagtcagaggaggctacctgacggtgaacacgctggtggccgcggtgctcccattcctcggcgacttcatgagcctgacgggcgccctcagcaccttcccgctgacgtttgtgctcgcaaatcacatgtacctgatggtgaaggggcctaagctgggtgccatccagaaatcatggcactggctcaatgttcttgggttcactgcgctggctgttgcagcggcggtctccgcaataaggctcatcatgcgtgattccagcacctaccacttcttcgctgatctttgagatcgatcgttttcttttctttttgttggaatgctgagccagagctagtattttttcattttcagagaattattatccatgtatgtaaggatgacgcatatatatattgaatagatgatttaatatcaggtcagagcagacaaggaggtatggtgtcgatgcacgacttgtagaggatgcggaggtagtcgagcagggcatcctggttggcgtcgtccaccggctccatctcgaagctccacaccaccagcgttgcgcctccgccgtagtccaggaggctgatggtgttgcgggagccggcgaggccgacgttgccgtcctccatgaggtaggtgtaggagcgggcggtgtggtccatggccaccagcctctccctcacccacgacgacccctgctgctgctgggggaacatgaggccgccgcgcacgaggcgcacgtagcccggcacgtcctcgtcaccggccaccgcggtgcacgactccaccatgggcatccactcgcgcagccgagacgtggaggacaccagctcccacacgcgggccacgggcgcgctcaccacgccgctcgctgcgccgcgccacgccttggacgccgcttcatctgactgtccgtgcccatccatggccaagaaccgtcagctccggggccagcggatatagcaagggggtcgctggaaagtcaagctacatggctgcaaaaccaaagctcacctaaaaataaggacaaacat

SEQ ID NO: 67725 - DNA, 2770 bp, Zea Mays
gtgagttgttgcgcttgcgtgcggtgcgtggttggggattttggcaagcaaacaaaacaatgatgcagcaacggaatgcgagaaatctgcgtcgctctcctcctcctcctcctcctccgtaggcaaggcaaggggggcaaggctctaacggagatcggatcgaactgcctgtgcagtctccctccctccctccctccctccctccctcatgtccatatataccaaaaaatctccgccgcgccgccattagctagctctcgtcgtcttcgttcctccgcaaataatttgttactcaagccgaaggaggacgagggcgacgggattggctaatcaaatcgaccgatctagtggctggtgcccaggagaagggacgcgggcagtgcggctcgtcgtggtcagcagcttgtggcgaccggtcgccagggaatcaatcaattcaatcagaaagttgcaattttgattgagctcgattcgtcatccacaagacattagggaatcgaaccaccacaaagcaagaaggcagtccagtgcagagagagagagagagagaccaagaagagaaagagaaagggaaagagaagcaaagcaatggatccaccgcatcaccgtgctgtgctgcggcggcctcgtcctcctcctcctccctcctgccctttttataggccgcctccgcttcgtcgtcttggcaagacctgcccccgcgcctgcaatcctacgacaacagggcgccgctcctcctgcccgtcaagatcatggacgccgccgccgacgacaagccggaaatctccgacgatacggcccaccagattagcgttgatccttggtatcaagttggcttcgtcctcacaaccggggtcaacagcgcatacgttctaggatactctggatcaatcatggtccctctaggctggatcggcggcacatgcggcctcctcctagctgccgccatatccatgtacgctaatgctcttcttgcacggcttcatgaagtcggtggcaaacgccatatcagatacagagaccttgctggacacatatatggaccgaaaatttacgggcttacatgggctctgcagtacattaaccttttcatgatcaacactggctttatcatcttagctggacaagctctcaaggccacgtatggactgttcagtgatgatggagttctgaaactcccttactgcattgcgatatcaggattcgtctgtgctcttttcgccattggaatcccttatttatctgccctcaggatttggttggggttctccacgcttttcagcctcatgtatattgtgatagcagttgtgctgtcgtcgagagatgggataaccgcacctgcaagggattacagcatccccaaatcatcgcagtcaactcgagtcttcactacgataggttccatagcagaccttgtgtttgcttacaacaccggcatgctgccagaaattcaggcaaccatcaggcctcctgtggtgaagaacatggagaaagctctatggttccagttcaccattggctccttgcctctctatgctgtagtttttgtgggttactgggcttatgggtcctcaacatcaggctacctcctcaacagtgtcacaggcccagtctgggtgaaagcggttgcaaatctgtcggcattttttcagacagtcatagcgctgcacccccatgtatgaattcctggacacaaaatatggaagtgggcgtggtggcccttttgagatccacaacgtggcgttcagagtagcagtcagaggaggctacctgacggtgaacacgctggtggccgcggtgctcccattcctcggcgacttcatgagcctgacgggcgccctcagcaccttcccgctgacgtttgtgctcgcaaatcacatgtacctgatggtgaaggggcctaagctgggtgccatccagaaatcatggcactggctcaatgttcttgggttcactgcgctggctgttgcagcggcggtctccgcaataaggctcatcatgcgtgattccagcacctaccacttcttcgctgatctttgagatcgatcgttttcttttctttttgttggaatgctgagccagagctagtattttttcattttcagagaattattatccatgtatgtaaggatgacgcatatatatattgaatagatgatttaatatcaggtcagagcagacaaggaggtatggtgtcgatgcacgacttgtagaggatgcggaggtagtcgagcagggcatcctggttggcgtcgtccaccggctccatctcgaagctccacaccaccagcgttgcgcctccgccgtagtccaggaggctgatggtgttgcgggagccggcgaggccgacgttgccgtcctccatgaggtaggtgtaggagcgggcggtgtggtccatggccaccagcctctccctcacccacgacgacccctgctgctgctgggggaacatgaggccgccgcgcacgaggcgcacgtagcccggcacgtcctcgtcaccggccaccgcggtgcacgactccaccatgggcatccactcgcgcagccgagacgtggaggacaccagctcccacacgcgggccacgggcgcgctcaccacgccgctcgctgcgccgcgccacgccttggacgccgcttcatctgactgtccgtgcccatccatggccaagaaccgtcagctccggggccagcggatatagcaagggggtcgctggaaagtcaagctacatggctgcaaaaccaaagctcacctaaaaataaggacaaacat

SEQ ID NO: 67726 - DNA, 2411 bp, Zea Mays
atcgagacaaaatatctaccggggatgtggtggtggatgctcgggcattcgtcaaaccactcatcatcccatcccatcccatccaagggaatccgatcaatcccggactcgtcctcccggccaaccctagcttcccttctcttcccctcccccgatggacccgccgccaaccagggacagaggggaggagctggagcctgaaacccgcgccttccccgacgccgacgacccggagacctcccgatctgaacgcgaagagggtatccctccaccgccaccgccaccgcctctgcgccagcagctcatgggggcttgccgcgccgacgagcgcctcaggccgctcctcaccctcaacgtctcctgcggcgcagcggacgaccgactcatcgcacacctcgcgcagcacttcgaggtgtcggaggtgggcatgctcgcgcgttgcctctgtgttcccctcgtttccctgcgcgttggcaaggttcagagggaaggggccctcctctgcccaacacacattagatgctgttggaatgatgaagaagtgatcctgtagctttctctatgtctctgcttccaggaaaaaaagagggaagctgaaccttgttcttctgccatcatctagcatgcggcttacctttgtttgtgatgatggttatccagagcaactagctctcttgagcaatggctttgaattttctgaagttatgattgaagaaatatcagctgataattctggacgctctttcctaatcagaatttcagaatctaaagtgttttactactggtgtgctgagaagtcgaaggaacatggaatggaacttcttgcaaagatgaaaaaccttttggacgggaggccaacactctctgatctcactggcatctctaattcacgacttgatgcttttgccactcatttacatgcttatcttcttgcatcaagtatcggtgatgttacatcattgggctcacttaatgacttcctgagtacttcaagatcacatgatcaatatttacagctccagtcagatttttccaaaacttccaggttccgtgcctcggctgctagtgcaattaagccaagctctgtctatcaagccagcctaagtccgagatctggcacttttaaagatggggtaccaagggcttcatgtgcaagggttgttgggagggacaagctgaagcgtcgtgtggaatggttaggcccgttaactgctccgcttgatacgaatcctttgacaatcaaccctgattctgccagtgagaagtgtgatgcagattgttcaaagaacaatgttagctcagttccgttggacctgcctctttcgtttcccctgttgccttctatttactcccttggcactcgtccggttcctgaggtttctttggagaaacagtttaagccttactattgctggtgcccaccatgcccatcatcgctgcaatacactgtcacccatttgcatctgccagctacacctgtagatccgttgcccctaccacctttgagttcactgctagcaagtgagcagccaccttcttcaacagtttctgtaaagctggatacaactgatctcccttcccttaatcttccgtccatactgcattcaccacttattcccctacatggtccacaagtgccaacattcacaccattgatgtccgatcccattgtgcatgtcccagtcattgatgtttgttcggcgggtcaggcctatctagtgagttgtgggccgtctataacttcagcagttcccctgctcccgagcttgaagcctctgctgccagaagcagagtcgttagtcgagagaagcgcaagggaaacactgatgaggctcatagcttcgacaccacctgcaagcaatcctctacctggaagtatatcctgggcgaataacaatgtgaagaagcatgttgatgtgtgtcccaatgaaaaagcatccggtacgtcttgtgttgctgctgtgtttggaagtgggattgcacacgctgaggatgaagttccaagcggaggtgattcacaagagccgtttgccgaatacgatggtaccagcaatgaatgtgatgtacatcattggcagaaattctagcttggctgcatcagcatggtaaatagggttttgaggattcgggggtttgatgtcctgtacgcagcagcagccttaaaagtttctgtgcccagccagcatctctatttggtttgcaaatgtaattactagtttgtactgtcttgtttttggcaaacttgctgcgagcctcgtgcttagtttggtttatttatttatgaactttaggcctgttcgaagcacccagtttgtaagaaaatggattatataaactgaagtgattccaaatatatcagtttatgtctcagtttataaaaattggattaccagtttctaaaaaaccaagaa

SEQ ID NO: 67727 - DNA, 3677 bp, Zea Mays
atcgagacaaaatatctaccggggatgtggtggtggatgctcgggcattcgtcaaaccactcatcatcccatcccatcccatccaagggaatccgatcaatcccggactcgtcctcccggccaaccctagcttcccttctcttcccctcccccgatggacccgccgccaaccagggacagaggggaggagctggagcctgaaacccgcgccttccccgacgccgacgacccggagacctcccgatctgaacgcgaagagggtatccctccaccgccaccgccaccgcctctgcgccagcagctcatgggggcttgccgcgccgacgagcgcctcaggccgctcctcaccctcaacgtctcctgcggcgcagcggacgaccgactcatcgcacacctcgcgcagcacttcgaggtgtcggaggtgggcatgctcgcgcgttgcctctgtgttcccctcgtttccctgcgcgttggcaaggttcagagggaaggggccctcctctgcccaacacacattaggttggtactctcactcaatctctacttcgcttcatcatcatatatgacactgatactcactcggtccttaagatagcagtgcccgcttgacccttatgatttcgcttgatgcactgtctctttcgtgattagcatttcgcatctcacatgatttgccagctttcctctttctcaacttgtatattcttctcgcttgcagctagcctttatacatatatacatattaattaatgttacacaggttagccagttgatctgatgtttctataactgtatgtgctcactatacgatttagcctcttctttcacatttaagtaacatgcttgtgataattagatcgcttccttggaagcatatttttcaccaccaattgagcatgaatcagcctcctatactctgtatacttgcaaccaggaacttgtcttgtggtctcataggatcctaaactctcatattgtaccatttattgagatgacaaacttgccctactaaaaaactttgtactgcacctcgatactcaacttagcttctgatttcatgtgaaagcactgtagtatgttgattatataatctggtatttcaaatcttttaagttttgcatgttattgaccaatatgtccttacatagatgctgttggaatgatgaagaagtgatcctgtagctttctctatgtctctgcttccaggaaaaaaaggcatgccactgtatctatatgatgtgatattaatgccaagtctatgcaattgcattttttgtatcccatgggcgtacactggcgcatctcaagttaccataccactagatttcatgatataataattcatctgactaattctatatacaaatggcacgattcaatacattgttggcggggagggggctgccatctacagtcatcaacagcaatttttgttcatctctgctcattatttggtcttatgtccttttctccctttataccagtatcttaatacacttatacctgttgaaatgtggatcatgtggttggtgccctgtgttgttatacagcactctttagtttctaattaataaaaaaatattgcttcttttatcctctttgctttttatgcgagtatacaggtgtgcccatctttatttcatgacacataattacttgttagaagagatgtttgctgaattatcgcacctaatttagaatgctgtgcatcagcgagtgttcatgttgattctagggttacataattcgttttactagagatggcactattcaccctgccaaataaatttatctttcacttgtaggtaatttgggcgtttgtcataatctctgatatatgaggaaagagaagagggaagctgaaccttgttcttctgccatcatctagcatgcggcttacctttgtttgtgatgatggttatccagagcaactagctctcttgagcaatggctttgaattttctgaagttatgattgaagaaatatcagctgataattctggacgctctttcctaatcagaatttcagaatctaaagtgttttactactggtgtgctgagaagtcgaaggaacatggaatggaacttcttgcaaagatgaaaaaccttttggacgggaggccaacactctctgatctcactggcatctctaattcacgacttgatgcttttgccactcatttacatgcttatcttcttgcatcaagtatcggtgatgttacatcattgggctcacttaatgacttcctgagtacttcaagatcacatgatcaatatttacagctccagtcagatttttccaaaacttccaggttccgtgcctcggctgctagtgcaattaagccaagctctgtctatcaagccagcctaagtccgagatctggcacttttaaagatggggtaccaagggcttcatgtgcaagggttgttgggagggacaagctgaagcgtcgtgtggaatggttaggcccgttaactgctccgcttgatacgaatcctttgacaatcaaccctgattctgccagtgagaagtgtgatgcagattgttcaaagaacaatgttagctcagttccgttggacctgcctctttcgtttcccctgttgccttctatttactcccttggcactcgtccggttcctgaggtttctttggagaaacagtttaagccttactattgctggtgcccaccatgcccatcatcgctgcaatacactgtcacccatttgcatctgccagctacacctgtagatccgttgcccctaccacctttgagttcactgctagcaagtgagcagccaccttcttcaacagtttctgtaaagctggatacaactgatctcccttcccttaatcttccgtccatactgcattcaccacttattcccctacatggtccacaagtgccaacattcacaccattgatgtccgatcccattgtgcatgtcccagtcattgatgtttgttcggcgggtcaggcctatctagtgagttgtgggccgtctataacttcagcagttcccctgctcccgagcttgaagcctctgctgccagaagcagagtcgttagtcgagagaagcgcaagggaaacactgatgaggctcatagcttcgacaccacctgcaagcaatcctctacctggaagtatatcctgggcgaataacaatgtgaagaagcatgttgatgtgtgtcccaatgaaaaagcatccggtacgtcttgtgttgctgctgtgtttggaagtgggattgcacacgctgaggatgaagttccaagcggaggtgattcacaagagccgtttgccgaatacgatggtaccagcaatgaatgtgatgtacatcattggcagaaattctagcttggctgcatcagcatggtaaatagggttttgaggattcgggggtttgatgtcctgtacgcagcagcagccttaaaagtttctgtgcccagccagcatctctatttggtttgcaaatgtaattactagtttgtactgtcttgtttttggcaaacttgctgcgagcctcgtgcttagtttggtttatttatttatgaactttaggcctgttcgaagcacccagtttgtaagaaaatggattatataaactgaagtgattccaaatatatcagtttatgtctcagtttataaaaattggattaccagtttctaaaaaaccaagaa

SEQ ID NO: 67728 - DNA, 3048 bp, Zea Mays
atcgagacaaaatatctaccggggatgtggtggtggatgctcgggcattcgtcaaaccactcatcatcccatcccatcccatccaagggaatccgatcaatcccggactcgtcctcccggccaaccctagcttcccttctcttcccctcccccgatggacccgccgccaaccagggacagaggggaggagctggagcctgaaacccgcgccttccccgacgccgacgacccggagacctcccgatctgaacgcgaagagggtatccctccaccgccaccgccaccgcctctgcgccagcagctcatgggggcttgccgcgccgacgagcgcctcaggccgctcctcaccctcaacgtctcctgcggcgcagcggacgaccgactcatcgcacacctcgcgcagcacttcgaggtgtcggaggtgggcatgctcgcgcgttgcctctgtgttcccctcgtttccctgcgcgttggcaaggttcagagggaaggggccctcctctgcccaacacacattagatgctgttggaatgatgaagaagtgatcctgtagctttctctatgtctctgcttccaggaaaaaaaggcatgccactgtatctatatgatgtgatattaatgccaagtctatgcaattgcattttttgtatcccatgggcgtacactggcgcatctcaagttaccataccactagatttcatgatataataattcatctgactaattctatatacaaatggcacgattcaatacattgttggcggggagggggctgccatctacagtcatcaacagcaatttttgttcatctctgctcattatttggtcttatgtccttttctccctttataccagtatcttaatacacttatacctgttgaaatgtggatcatgtggttggtgccctgtgttgttatacagcactctttagtttctaattaataaaaaaatattgcttcttttatcctctttgctttttatgcgagtatacaggtgtgcccatctttatttcatgacacataattacttgttagaagagatgtttgctgaattatcgcacctaatttagaatgctgtgcatcagcgagtgttcatgttgattctagggttacataattcgttttactagagatggcactattcaccctgccaaataaatttatctttcacttgtaggtaatttgggcgtttgtcataatctctgatatatgaggaaagagaagagggaagctgaaccttgttcttctgccatcatctagcatgcggcttacctttgtttgtgatgatggttatccagagcaactagctctcttgagcaatggctttgaattttctgaagttatgattgaagaaatatcagctgataattctggacgctctttcctaatcagaatttcagaatctaaagtgttttactactggtgtgctgagaagtcgaaggaacatggaatggaacttcttgcaaagatgaaaaaccttttggacgggaggccaacactctctgatctcactggcatctctaattcacgacttgatgcttttgccactcatttacatgcttatcttcttgcatcaagtatcggtgatgttacatcattgggctcacttaatgacttcctgagtacttcaagatcacatgatcaatatttacagctccagtcagatttttccaaaacttccaggttccgtgcctcggctgctagtgcaattaagccaagctctgtctatcaagccagcctaagtccgagatctggcacttttaaagatggggtaccaagggcttcatgtgcaagggttgttgggagggacaagctgaagcgtcgtgtggaatggttaggcccgttaactgctccgcttgatacgaatcctttgacaatcaaccctgattctgccagtgagaagtgtgatgcagattgttcaaagaacaatgttagctcagttccgttggacctgcctctttcgtttcccctgttgccttctatttactcccttggcactcgtccggttcctgaggtttctttggagaaacagtttaagccttactattgctggtgcccaccatgcccatcatcgctgcaatacactgtcacccatttgcatctgccagctacacctgtagatccgttgcccctaccacctttgagttcactgctagcaagtgagcagccaccttcttcaacagtttctgtaaagctggatacaactgatctcccttcccttaatcttccgtccatactgcattcaccacttattcccctacatggtccacaagtgccaacattcacaccattgatgtccgatcccattgtgcatgtcccagtcattgatgtttgttcggcgggtcaggcctatctagtgagttgtgggccgtctataacttcagcagttcccctgctcccgagcttgaagcctctgctgccagaagcagagtcgttagtcgagagaagcgcaagggaaacactgatgaggctcatagcttcgacaccacctgcaagcaatcctctacctggaagtatatcctgggcgaataacaatgtgaagaagcatgttgatgtgtgtcccaatgaaaaagcatccggtacgtcttgtgttgctgctgtgtttggaagtgggattgcacacgctgaggatgaagttccaagcggaggtgattcacaagagccgtttgccgaatacgatggtaccagcaatgaatgtgatgtacatcattggcagaaattctagcttggctgcatcagcatggtaaatagggttttgaggattcgggggtttgatgtcctgtacgcagcagcagccttaaaagtttctgtgcccagccagcatctctatttggtttgcaaatgtaattactagtttgtactgtcttgtttttggcaaacttgctgcgagcctcgtgcttagtttggtttatttatttatgaactttaggcctgttcgaagcacccagtttgtaagaaaatggattatataaactgaagtgattccaaatatatcagtttatgtctcagtttataaaaattggattaccagtttctaaaaaaccaagaa

SEQ ID NO: 67729 - DNA, 3565 bp, Zea Mays
atcgagacaaaatatctaccggggatgtggtggtggatgctcgggcattcgtcaaaccactcatcatcccatcccatcccatccaagggaatccgatcaatcccggactcgtcctcccggccaaccctagcttcccttctcttcccctcccccgatggacccgccgccaaccagggacagaggggaggagctggagcctgaaacccgcgccttccccgacgccgacgacccggagacctcccgatctgaacgcgaagagggtatccctccaccgccaccgccaccgcctctgcgccagcagctcatgggggcttgccgcgccgacgagcgcctcaggccgctcctcaccctcaacgtctcctgcggcgcagcggacgaccgactcatcgcacacctcgcgcagcacttcgaggtgtcggaggtgggcatgctcgcgcgttgcctctgtgttcccctcgtttccctgcgcgttggcaaggttcagagggaaggggccctcctctgcccaacacacattaggtaatttgggcgtttgtcataatctctgatatatgaggaaagagaaggtagtttctttcatggccttgcaatatcagttacctgcattgataatgaataacctcatattgcattatttggtgagactgatcaggattcctacttatgcttgctatatcataacgatcatctgcaaaattcttgttatcattcgaatgttctgctgttgcttgacaatccctaggataattagtttgtgcaatattctacttcttggtttaccttgaacagatgtctatatggccacactggtgcttggtctataaacaattacctggctttccaaatccatccttaaataattttgtgattaatagctgtgtttttttaactgtgttgttggagcccttatggtttctacttaaatattgtcatgaagttttttttttggggggggggggggtccatctttcactttttttgccctaacggggatcattggtgttaactgccctggtattttttgcttactctttaattttcgttttgatgctttgtaatcacaaagcaattttatttttctgatgtagaagcaaaatcacaatataatagcctttatttatgttatggatctagattacttgtatggaagttattttattgtctttgagggaacggccatttttatatatttggttcttatatgaattcacctgaaaaattaaaagctgcaatatgttgaacatttggttcctagacttttacagtttcttctaatggaaaggcagttgtgctgctgtggttcaaaccaggttcttaagtccctttttttaatgcaaagggattgttgcttaaatgtagttgggccgacctatgaaaattttacacgagcctgtgttctctacttttgtaaatttaataagcttatgcctcaatggaatattttaccatcttattaggttcttgacaaggctactgttttgtcacattggtccatgtacctttttaagtgataactaaaactctaagaggctttagttttttctcttaaatttcctgatctgagtcagtgagttttgtggatgtcaaaattagtccgtttccttttctttgctagcattgtgctgtatgctaatgcttgcattttttatttgaagtattcattttgatctatggtttccatttcattgtctatgccttgatcagctaaaatttcactcatgtgggaacctccaacactggagggaagctgaaccttgttcttctgccatcatctagcatgcggcttacctttgtttgtgatgatggttatccagagcaactagctctcttgagcaatggctttgaattttctgaagttatgattgaagaaatatcagctgataattctggacgctctttcctaatcagaatttcagaatctaaagtgttttactactggtgtgctgagaagtcgaaggaacatggaatggaacttcttgcaaagatgaaaaaccttttggacgggaggccaacactctctgatctcactggcatctctaattcacgacttgatgcttttgccactcatttacatgcttatcttcttgcatcaagtatcggtgatgttacatcattgggctcacttaatgacttcctgagtacttcaagatcacatgatcaatatttacagctccagtcagatttttccaaaacttccaggttccgtgcctcggctgctagtgcaattaagccaagctctgtctatcaagccagcctaagtccgagatctggcacttttaaagatggggtaccaagggcttcatgtgcaagggttgttgggagggacaagctgaagcgtcgtgtggaatggttaggcccgttaactgctccgcttgatacgaatcctttgacaatcaaccctgattctgccagtgagaagtgtgatgcagattgttcaaagaacaatgttagctcagttccgttggacctgcctctttcgtttcccctgttgccttctatttactcccttggcactcgtccggttcctgaggtttctttggagaaacagtttaagccttactattgctggtgcccaccatgcccatcatcgctgcaatacactgtcacccatttgcatctgccagctacacctgtagatccgttgcccctaccacctttgagttcactgctagcaagtgagcagccaccttcttcaacagtttctgtaaagctggatacaactgatctcccttcccttaatcttccgtccatactgcattcaccacttattcccctacatggtccacaagtgccaacattcacaccattgatgtccgatcccattgtgcatgtcccagtcattgatgtttgttcggcgggtcaggcctatctagtgagttgtgggccgtctataacttcagcagttcccctgctcccgagcttgaagcctctgctgccagaagcagagtcgttagtcgagagaagcgcaagggaaacactgatgaggctcatagcttcgacaccacctgcaagcaatcctctacctggaagtatatcctgggcgaataacaatgtgaagaagcatgttgatgtgtgtcccaatgaaaaagcatccggtacgtcttgtgttgctgctgtgtttggaagtgggattgcacacgctgaggatgaagttccaagcggaggtgattcacaagagccgtttgccgaatacgatggtaccagcaatgaatgtgatgtacatcattggcagaaattctagcttggctgcatcagcatggtaaatagggttttgaggattcgggggtttgatgtcctgtacgcagcagcagccttaaaagtttctgtgcccagccagcatctctatttggtttgcaaatgtaattactagtttgtactgtcttgtttttggcaaacttgctgcgagcctcgtgcttagtttggtttatttatttatgaactttaggcctgttcgaagcacccagtttgtaagaaaatggattatataaactgaagtgattccaaatatatcagtttatgtctcagtttataaaaattggattaccagtttctaaaaaaccaagaa

SEQ ID NO: 67730 - DNA, 2463 bp, Zea Mays
ctttcatcgagacaaaatatctaccggggatgtggtggtggatgctcgggcattcgtcaaaccactcatcatcccatcccatcccatccaagggaatccgatcaatcccggactcgtcctcccggccaaccctagcttcccttctcttcccctcccccgatggacccgccgccaaccagggacagaggggaggagctggagcctgaaacccgcgccttccccgacgccgacgacccggagacctcccgatctgaacgcgaagagggtatccctccaccgccaccgccaccgcctctgcgccagcagctcatgggggcttgccgcgccgacgagcgcctcaggccgctcctcaccctcaacgtctcctgcggcgcagcggacgaccgactcatcgcacacctcgcgcagcacttcgaggtgtcggaggtgggcatgctcgcgcgttgcctctgtgttcccctcgtttccctgcgcgttggcaaggttcagagggaaggggccctcctctgcccaacacacattagatgctgttggaatgatgaagaagtgatcctgtagctttctctatgtctctgcttccaggaaaaaaaggtaatttgggcgtttgtcataatctctgatatatgaggaaagagaagagggaagctgaaccttgttcttctgccatcatctagcatgcggcttacctttgtttgtgatgatggttatccagagcaactagctctcttgagcaatggctttgaattttctgaagttatgattgaagaaatatcagctgataattctggacgctctttcctaatcagaatttcagaatctaaagtgttttactactggtgtgctgagaagtcgaaggaacatggaatggaacttcttgcaaagatgaaaaaccttttggacgggaggccaacactctctgatctcactggcatctctaattcacgacttgatgcttttgccactcatttacatgcttatcttcttgcatcaagtatcggtgatgttacatcattgggctcacttaatgacttcctgagtacttcaagatcacatgatcaatatttacagctccagtcagatttttccaaaacttccaggttccgtgcctcggctgctagtgcaattaagccaagctctgtctatcaagccagcctaagtccgagatctggcacttttaaagatggggtaccaagggcttcatgtgcaagggttgttgggagggacaagctgaagcgtcgtgtggaatggttaggcccgttaactgctccgcttgatacgaatcctttgacaatcaaccctgattctgccagtgagaagtgtgatgcagattgttcaaagaacaatgttagctcagttccgttggacctgcctctttcgtttcccctgttgccttctatttactcccttggcactcgtccggttcctgaggtttctttggagaaacagtttaagccttactattgctggtgcccaccatgcccatcatcgctgcaatacactgtcacccatttgcatctgccagctacacctgtagatccgttgcccctaccacctttgagttcactgctagcaagtgagcagccaccttcttcaacagtttctgtaaagctggatacaactgatctcccttcccttaatcttccgtccatactgcattcaccacttattcccctacatggtccacaagtgccaacattcacaccattgatgtccgatcccattgtgcatgtcccagtcattgatgtttgttcggcgggtcaggcctatctagtgagttgtgggccgtctataacttcagcagttcccctgctcccgagcttgaagcctctgctgccagaagcagagtcgttagtcgagagaagcgcaagggaaacactgatgaggctcatagcttcgacaccacctgcaagcaatcctctacctggaagtatatcctgggcgaataacaatgtgaagaagcatgttgatgtgtgtcccaatgaaaaagcatccggtacgtcttgtgttgctgctgtgtttggaagtgggattgcacacgctgaggatgaagttccaagcggaggtgattcacaagagccgtttgccgaatacgatggtaccagcaatgaatgtgatgtacatcattggcagaaattctagcttggctgcatcagcatggtaaatagggttttgaggattcgggggtttgatgtcctgtacgcagcagcagccttaaaagtttctgtgcccagccagcatctctatttggtttgcaaatgtaattactagtttgtactgtcttgtttttggcaaacttgctgcgagcctcgtgcttagtttggtttatttatttatgaactttaggcctgttcgaagcacccagtttgtaagaaaatggattatataaactgaagtgattccaaatatatcagtttatgtctcagtttataaaaattggattaccagtttctaaaaaaccaagaa

SEQ ID NO: 67731 - DNA, 1872 bp, Zea Mays
ggatctgctaatccatccaactccaagcaaatggaatatgcctttgccttgcacccaagaacagtttctgtagtttcggctgcgagcctgaccgagacagacacacaccagagggagagggagacggagagaagggcgagcggcactagcaagcatggcggcggccgtcctagcgcccaagccgcctcctccgctgcctaccagggcctttccttcctcatccccctcgcggtttgcccctgccttcatctccccgcgtcatcccctgagaagattgctcctccgccggagtccaggccccgccgcatcgcccttttcgtcgagccgtctcccttcgcctacgtctccggctacaagaaccgcttccagaacttcatcaagtacctacgggagatgggcgacgaggtgattgtggtcaccacgcacgagggcgtgcctcaggaattccacggagccaagctaattggctcatggagcttcccttgcccctggtatcaaaaggttccgctgtcgctggccctcagtcctcgaatcatcgcagaagttgctagattcaagcctgacattattcacgcctcttcacctgggataatggtatttggcgcgcttatcatagcaaagttgctctgcgtccctctggtaatgtcataccacacccacgttccaatttatatacccagatatactttcagctggcttgtcaagcccatgtggctaataataaaattcttgcaccgagctgcagacctcacactggtaccatctgttgctatcggcagggatcttcaagctgctcgtgttacagcagccaataaaatacgcctttggaacaagggtgttgactcagaaagcttccatcctcgtttccgcaacatggaaatgcgttcaaggctaacgaatggtgaaccagaaaagccacttgtattttatgttggacgcttaggagttgagaaaagcttggattttcttaagagagtcatggaccgacttccaggagcaaggattgcatttattggagacggaccattcagagctgagctcgagcagatgttctcaggtatgccggtggtgttcacgggcacgttgcaaggggaggagctatcacaggcctatgccagtggggatgtgtttgtgatgccttccgagtcagagacactggggtttgtggtgctggaggccatgtcatcaggagttccggtagtcggggctcgcgccggaggaatacctgatatcatacctgaggatcaggaggggaggaccagctttttgtacacaccaggggatgtggatgactgtgttggcaagatcaagcggctcctgtcgagcgaggaactgagggaggccatggggagagctgccaggaaggagatggagaagtttgactggcgagcggcgacgaggaagatccgcaacgagcagtacagtgctgcaatctggttctggcgcaagaagagggcacaggtgctgcggcccctccaatgggtgctgcggctgctgaggcggacaatgccaggagctgccgatgccgcagcgaagcaatcctaggagaggggggctactatggttgatggtcctcttttttcccattccttagtataaaatgggctaaggaggccatggcagatgattggatatgtttcaggattagaggggaggaaggtcaagcttcaacattccaattcactgaagaatatataatgaattggtgtgcagtcagacaatgataataatatatcttgctctgtctttctagtatcaaaggaggtgaaacgaataaaagggtgtttcaaaattgaactaggagagtggttgcaaataaccccccccccctccttttttttggaagcttgtagagatattttcataagcttt

SEQ ID NO: 67732 - DNA, 1987 bp, Zea Mays
ggatctgctaatccatccaactccaagcaaatggaatatgcctttgccttgcacccaagaacagtttctgtagtttcggctgcgagcctgaccgagacagacacacaccagagggagagggagacggagagaagggcgagcggcactagcaagcatggcggcggccgtcctagcgcccaagccgcctcctccgctgcctaccagggcctttccttcctcatccccctcgcggtttgcccctgccttcatctccccgcgtcatcccctgagaagattgctcctccgccccattccgtgcgcctcatcgccgtcttccgtcttgatgccgaacccggacctcgagactgagcctgcccacgatggagatggagatggagatgaggcgccgccggagtccaggccccgccgcatcgcccttttcgtcgagccgtctcccttcgcctacgtctccggctacaagaaccgcttccagaacttcatcaagtacctacgggagatgggcgacgaggtgattgtggtcaccacgcacgagggcgtgcctcaggaattccacggagccaagctaattggctcatggagcttcccttgcccctggtatcaaaaggttccgctgtcgctggccctcagtcctcgaatcatcgcagaagttgctagattcaagcctgacattattcacgcctcttcacctgggataatggtatttggcgcgcttatcatagcaaagttgctctgcgtccctctggtaatgtcataccacacccacgttccaatttatatacccagatatactttcagctggcttgtcaagcccatgtggctaataataaaattcttgcaccgagctgcagacctcacactggtaccatctgttgctatcggcagggatcttcaagctgctcgtgttacagcaggaatggtgaaccagaaaagccacttgtattttatgttggacgcttaggagttgagaaaagcttggattttcttaagagagtcatggaccgacttccaggagcaaggattgcatttattggagacggaccattcagagctgagctcgagcagatgttctcaggtatgccggtggtgttcacgggcacgttgcaaggggaggagctatcacaggcctatgccagtggggatgtgtttgtgatgccttccgagtcagagacactggggtttgtggtgctggaggccatgtcatcaggagttccggtagtcggggctcgcgccggaggaatacctgatatcatacctgaggatcaggaggggaggaccagctttttgtacacaccaggggatgtggatgactgtgttggcaagatcaagcggctcctgtcgagcgaggaactgagggaggccatggggagagctgccaggaaggagatggagaagtttgactggcgagcggcgacgaggaagatccgcaacgagcagtacagtgctgcaatctggttctggcgcaagaagagggcacaggtgctgcggcccctccaatgggtgctgcggctgctgaggcggacaatgccaggagctgccgatgccgcagcgaagcaatcctaggagaggggggctactatggttgatggtcctcttttttcccattccttagtataaaatgggctaaggaggccatggcagatgattggatatgtttcaggattagaggggaggaaggtcaagcttcaacattccaattcactgaagaatatataatgtacgtttaggactgttaggttgtaaatcgtcaaagtgtctatgtaatgcttcttcttggcatgctacactatatagtactaatattgatcctttaacaggaattggtgtgcagtcagacaatgataataatatatcttgctctgtctttctagtatcaaaggaggtgaaacgaataaaagggtgtttcaaaattgaactaggagagtggttgcaaataaccccccccccctccttttttttggaagcttgtagagatattttcataagcttt

SEQ ID NO: 67733 - DNA, 1447 bp, Zea Mays
ttcatcaagtccatccgagaggctaaccaaatcgtcttccccttcatcgatcacaagcagcaggtcttcgtcgatgcaacaatcctcggccgcctcgatggcaatggaggaagacgacgactacgagccgccgttgatggccacgtacaagcatctgttggacagtcacccgcaccgacaactgggcgccggcgccgcgcaagacgacgaggattgcttcctcctcccggtgatcgacctttccagcctcctgccgccggtgcatcatcgcaagcagtcatcatcagcagcagctgcagagcagtgccgggcgtccatcgtgcgcgccgcctccgagtggggcttcttccaggtgaccaaccacggcgtgccgcaggttctgctggacgagctgcaccaggcgcaggccggcgtcttccgccggcccttccaactcaaggcgcaccagccgctgctggacttctcgccggagagctaccgctggggcacgcccaccgccacgtgcctggagcagctctcgtggtccgaggcctaccacatccccacaacgacgaccacgaccggtaacgacgacaagacccggctagtggtcgaggaggtgtcgacggcgatgtcgaagctggcgcagcggctggcggggatcctcgtcgcggagctgggcgaagacagcgcggcggcggtggtgtcgcggtgcacgcggagcacctgcttcctgcggctgaaccggtacccgccgtgcgcggcggcggccagcggcgtcgtctacgggctgtgcccacactcggacagcgacttcctgaccatactccaccaggacggcgtcggcggcctccagctcgtcaaggacgggcagtgggtagccgtgaagcccagccccggcgcgctcatcgtcaatgtgggcgacctcctgcaggcgtggagcaacgaccggtaccggagcgtcgagcaccgggtgatggccagcgccacgagggagcggttctccgccgccttcttcctgtgccccagctacgacacgctcatccggccgcgctgcggcgccggcggacctcctcctcgctatgagagcttcaccttcggggagtaccggaaccagatcagggaggacgtcaggctcacgggccgaaagctcggcctgcaacgcttccgcaaagcagagtagtggactactataatgttgggcttcaatatacttatttgataactacaagtgacatagcatatatataagtaagtattatgagcccagtagtctaaatgggcctctagaaaaaaatatagggtccttattatctggtgtataaacgaaccaaccacctcagctcacactacctcttgtaatcttttaattaagcaattagattattgctctccatgtatatttggaaatggagaggatatatgaaggaatgtacatagatatggctctagctactctctgtctcag

SEQ ID NO: 67734 - DNA, 1957 bp, Zea Mays
ttcatcaagtccatccgagaggctaaccaaatcgtcttccccttcatcgatcacaagcagcaggttcgatcgatcgacactaataatatgaatagctctctctcggttaagttgttccttttccccacctagctatttggcttatttgttccatctatcaatctttatgcatatatgttcatagcagctagcatatatatatgcatgtctaaagagtttgtagcttgtgcatgcagcatgcatatcctccatccaggatcattgagatgacggcctaccgatcggcccataagtttttttcttcaattttcttttttcactctcagtttgtttcaggccggacgatattcctttacttttcccatcatcaagtaattaacaagctaggaatgaatatacagtatataaagtacctattcgatatcttacatctttgtaattttttctattttcttttttttttttgggtaaactcgagatgcatgctttaattctacttcgacaaagttagaatatcttataattcgaaacgaagtcagtacaacacaaagggctgagctaataagataattatgcgtcatcctagagattatattggaggatgatatgtatatatgcagttttatttatgtttccttttaaaaaaactgtatgctagctaaacgaacttccatctgctgaaggtttttaggaggaggaatggtttttcgttctggccggcatgcactattgcaagtcagcgtgccaacagccaagagatagcagaagggtttaaacattggtaaaagaaataaaagaactaaccgagccgtatactttttcattgagcatgggatatttgtgggtaaagtaattatgtcggtaattagaggggggggggtctaatctatatttttttagctaaacaggtcaatttaactctacgtaataactttgcttcaacaaaaatggtggagttgtgagaccatctaaggcctccgattcttttggaacaaaggaaaattgaaggaattaaaattctattggaattttttctaagtggccatttggattaaaagactgagttcttataaaatttctatggaatggcccattattgtagtgagattttggaggatttctaacataaggttcaacctcttggaaacttttatttgtgtctctcttttctaattcttgtattcttcctatgttgcatccaaatgctctattataattttttctgtgtttttaattcttgtatgactgtaagtgtcataaaactctattgctacattttcctgttcctttgtttttatcaatcctgcattctaaagaaggcatggcattctagggttttgtggaactaatctacaatggagtttgtggaatagtcttaaatactccatctgtccttaagtaaatcaatttctagacttatcttaagtcaaacctttttatgttccaccaaattaacctacaaaagagttaaatgcttgagcagattttgaacttatcaagtaattaatgtgtaattcagattcacaaactttgcaaacacattttaaagtccctaaacttattaagtggttgacagcacacccctactcataaaaatggtgcattgcgggtctattttctggagcatacggaccacgtgctatgattcaccatttaacaagatcgaagacctaaaagtgagttttcaaagttcttgcaatgggcctaattaagctgcattctttgacaaattcaaccatgtgctatatatggtgcaccatttaacaagatcaaagacctaaaaatgacttttcaaagttcatacaacggacctaaaagttgcattccttaacaaattcaattcaagggccgcacatgcatgcatttaactcgcctacaaatgtccatttgttgtttccccaagacttgcttcccaatatatatatatatagtacgtgtctagttaacattatcaggt

SEQ ID NO: 67735 - DNA, 3649 bp, Zea Mays
tggcttgttcactttggtttcgtcgccggtgctagctagttggtaggcagcaaacatgcatgcatggccagtcttcgtcttcatgctcctccgcagctgcagctgctgctgcagaagtgatggagagctgctagctaggagaaagaggggcctgggagacatcgatgaacgataagcgaccgtttcttttgttttgttggtaataactgactgcagtgacgccttctgctctaggttttgccgtcaattcgatccgctgggtgtatgtgcgaccaccagccaagagctagcggagcaaggctggtggatggactctggagcaagctgctctagtctgtgcttgcttgctgctccctcggtccttcctcccacaacagaggcgatgcaagcaggcgtaatcgtccaatccaccagcttgcattgctcttttattatatattcgtatataagtagtataggtgtagacgcaagcacgcaccagacctttcccacttcttctgcagcagcagatcaggtgaggacgtgaggtgatggcgtcctccgccgccaccaccaccaccaccctcctccgtctgctttgcctctgcaccgtcctgctagtcgccatgcaggcggcggcggctcgcccgcccaacgtcaccatcggctccctcttcgcctttgactccgtcatcggaaggtccgccaggtccgccatccagctcgccgtcgacgacgtcaaccgcgaccccaccgtgctcaacggcaccaccctcaccgtcgtcttccaggacacaaagtgcagcggattcgcaggcacaatccaagcaggcctggagctgatggagaaggaggtggtggccgtggtgggcccgcagtcctcggtcatcgcgcacgtcgtctcccacgtcgccaaccagctgcgcgtgccgctgctgtccttcgccgccaccgacccggcgctcgcctccacgcagtacccctacttcgtgcgcaccgtgcacgacgaccgcttccagatggccgccatcgctgacgtcgtctcgcacttcggatggagggaggtcaccgccgtctacgtcgacgacgactacggccgcggcggcgtcatcgcgctcgccgacgcgctggaggccacgcgtgccagggtgtcctacagggccgccttcccgctgggcgccgaccgcgccacgctcgccgacatcctccagcgcgccaacttcatggagtcgcgcgtcttcatcgtccacgctagcccggactcgggcctcaacgtcttcgccgccgcgcgggggctcggcatgatggtctcggggtacacctggatcgcgaccgactggctcgccaccgccgccatcgatgctgctggcgccgcctccaactccagcaacatacagggcgtcctcacgctgcgacagtacaccccggactctgacgccaaggcgtcgctcctctccaggctcgccgccgctgatccaaccagcaacaatgccaccgccagcgtcaacacgtacggcctcttcgcctacgactccgtatggatggcggcgtacgccatcgatcagttcctcggcgacgccggtggcggcaacgtctccttctccgccgaccccaccatccgcgatgccaacggcagcgcgctgggtctcagcgcgctcagggtgttcgaccagggcgagcagctactcgggaaggtcatgctctccaacttcaccggcgtcacgggccacgtggagttccagttcgacgccggtgtgaatagcagcggaaccctcgtcaaccctgcctatgagatcctcaacgtcggtggcacgggcgtccgccgtgtcgcctactggtccaactacacgcgcctgtcggtggacgcacccaagcagctcggcgacggcgtgcctccgcccaacagcaccagcacgacggcccaacagcagatgtccaacgtcatctggcccggtggcacgacggccacgccgcgcgggtgggtgttcgccgacaacggcaagccgctgacgatcggcgtgccctaccggacgtcgtacaaggagtttgtgtccaaggacgagacaagccccgacggcgtgagcggctactgcgtggacgtgttcaaggcggcggtggccctgctcccgtacccggtgccggtgtcgttcgtcctgttcggcgacggcgtcgagaaccccagctacaacgagctggtgcagaaggtggcggacggctacttcgacgcggcggtgggcgacatctcgatcgtcacgaaccgaacgcgggtggtggacttcacgcagccgtacatcgactccgggctcatgatcgtgtccacggtgaagtccagcagctccgacgagtgggccttcctcaagcccttcacaccggagctttgggccactgttgtcgccttctgcatcttcgtcggcgccgtggtgtggatcctggagcaccggcacaacgacgagtttcgcgggccgctgaagaagcagatggtcaccatcttctggttcagcttttcctccatgttcttcacgcagagagaggacaccgtcagtgttcctggtcgcttcgtcgtcatcatgtggctcttcgtggtgctcatcatcacccagagctacacagccagcctgacgtccatcctgacagtgcagcagctgtcgacgggaatccagggcctgagcgacctcctcgcctccaacgaccccatcggttaccaggtcggctccttcgctgggagctacatgaacaaggagctgggcgtcgcggcgacacgcctccgggagctggaccccgacgactacgccgacagcctgcagcgcgggcccagaggcggcggcgtggcggccatcgtcgacgagctgccctacatggagctcttcctctccagcaactgccagttccagacggtgggccaggagttcaccaagagcggatggggattcgcgttcccgcttgactccccgctggcggtggacctgtccacggccatcctgacgctgtcggagaacggcgacctgcagcggatccacgacaattggctcaacacggggacgtgcgactcgcagaacaacggcgtgggcggcgccgaaaggctcagcctgcgcaactttggggggctcttccttatctgcggcgtcgcctgcgtcatcgccctgctcatccacttcgtcaggatacttttccagttctgccagtaccgcagacacggggccgccgacggcgcccaagaagaggacgagaacgacggcgacgacgacagggacggcgacagcgacaaggagaagagccagcgccggcccgccaggcagaccagcatccgggacctcatgtccttcgtggacatggaggaggccgaggtcaagagggccatccggagcaggtctggcaagtccatgggccggtcccggagcgacacgtctgatgcaccgtcctcgtcgccggtgtaacgtacaagagcttttatatcggttttccaacaccggaccggagagcagctcgatggaagagagagaccgagtcttgagtggagagctagggtcagctggtccagactaccctgagcgattgagttagggcactcgtagaccatcttgaccttctctctgttaacaatttaaacattcctgtgtttaatttagttcatgaatataatataataaatttacagtgatattatattata

SEQ ID NO: 67736 - DNA, 3400 bp, Zea Mays
attttcctccgcttcttcttgattcactggtggtgcacaggtgctgggcactcgcccaagttttcttttttttgccgtcggtgctcgcttgttgagttgttgttcctttctttgtttcccaaaatcgtatctttctgtcaacgctgttgccatgtccggaccggagtcaggggccagctgaggcgacaaccataagccctcacccttaccctcagctgctgcttcttggcttgggcttgaagcagatcaagggaggaggagaaggagatggcgtcgcccttgtcttcctcctcctccagcaccagcaccagcaccagcacgctcctccggctgatctgcctctgcaccgccttgccagtcgccctgcaggcggcggcggcgcgcccgcccaacgtcaccgtcggcgccctcttcaccttcgactccgtcatcggaaggtctgccaggaccgccatccagctcgccgtcgacgacgtcaaccgcgaccccgccgtgctgagggacaccaacctcagcgtcatcttccaggacaccaagtgcagcggattcgtcggcacaatccaagccctggagctgatggagaggcatgtggtggccgtggtgggcccccagtcctcgggcatcgcgcacgtcgtctcccacgtcgccaaccagctgcgcgtcccgctgctgtccttcgccgccaccgacccggcgctcgcctcctcgcagtacccctacttcgtccgcgccacgcacgacgaccgcttccagatggccgctgtcgccgacgtcgtcgcgcaccacggctggcgggaggtcacggcggtctacgtcgacaacgactacggccgcggcggcgtcgtcgcgctcggagacgcgctcgaggccctgcgcgccagggtctcctacagggccgcgttcccgccgggcgccgaccgcgccgcgctcgccgacctcctcgtgcgggccaacatgatggagtcgcgcgtcttcgtcgtccacgccagccctgactcgggactcgacgtcttcgccgccgcgaggtcgctcgacatgatggccaccggctacgtctggatcgccaccgactggctcgccgccgccatcgatgctgctggtgctggtgctgctgctgctgctggtaatatacagggtgtcctcatgctgcgccagtacaccccggactcggacgccaaggcgtcgctcgtctccaggttcgcggccaaacagtacatcaacgcgtacggcctcttcgcctacgattccgtctggatggcggcgcgcgccatcgaccagttcctcgacgacaacgccagcggcggtaacgtctccttctccgccgaccgcaacatccgcgacgccaacggcagcgcgctgggcctcagcgcgctcagggtgttcgaccagggcgagcagctgcttcggaaggtcatgctcgccaacttcactggcgtcacgggcagcgtccggttccagttggacgccgatgggagcgggggcgcgaccctcatcaaccccgcctacgagatcctcaacgtcggtggcacgggcgtccgccgggtcgcctactggtccaactacacgcgcctgtcggtggaggcgcccaggctgctcgccgacggagggccgccgcccaactccaataacacgaccacccagcagcagcagcagatgtacagcgtcatctggcccggtgacaccacggctaagccgcgcggatgggtattccccaacaacggcaagccgctgcggatcggcgtgccgtaccggacgacgtacaagcagttcgtgtccaaggaccggtccagccccgacggcgtcagcggctactgcgtggacgtgttcaatgcggcggtggcgctgctcccgtacccggtgccggcgtcgttcgtcctgttcggcgacggcgtcaagaaccccagctacaacgatctggtgcagagggtggctgacggcttcttcgacgcggcggtgggcgacatctccatcgtcacgaaccggacgcgggtggtggacttcacgcagccgtacgtggagtccggccttgtcatcgtgtccacggtgaaggccaagaactccaacgagtgggccttcctcaagcccttcacgccggggatgtgggccatcatcggcgccttcttcctcttcgtcggcgccgtggtgtggatcctggagcacaggttcaacccagagttccgggggtcaccgaggaggcagatggtcaccatcttctggagagaacaccgtgagcactcttggccgcttcgtcctcatcatctggctcttcgtggtgctcatcatcaactccagctacacggccagcctgacgtccatcctgacggtgcagcagctgtccacgggcatccagggcctggacagcctcctctccagcaacgaccccatcggctaccaggtcggctccttcgcccggagctacatgatggacgagctgggcgtcccagcgtcgcgcctccgggagctggccatcgacggctacgccggcagcctgcagcgcgggcccagcaacggcggcgtggcggccatcgtcgacgagctgccgtacgtggagctcttcctctccaccaactgccagttcaggacggtgggccaggagttcaccaagagcggatggggattcgcgttccagcgagactcccccctggcggtggacctgtcgacggccatcctgacgctgtcagagaacggcgacctgcagcggatccacgacaagtggctcagcccagggacgtgcgcgtcgcagagcaccgacggcgtgggcgccgacaggctcaatctgggcagcttctggggcctcttcctcatctgcggcgtcgcctgcttcgtcgccctcctcatctacttcgccaggatactctgccagttctgcaagtaccacggccacgggaccaccgacggtgccggcccgttccccgtcccggagaggagcctgcggcggcccgccaggctcaccagcatccgggacctcatgtcctttgtcgacatgaaggaggccgaggtgaagagggccatccggagcaggtccgacaggcgactcgacgggtccatgggcggcaggagctacacctccgaagggccgtccttgtcacggccgtcctccatgtcgccggtgtaagacgggccggcggcgttcttcttcaagacacgttttttgtttgtgctgatctgacttaggtagttggagcctggaggcgacgatctgaaatcgatgaaaccgtgcgtatgcacaaattgctattcaacgaacatacacacacacacgatctttcggaagatagaatctgtaggtgctagtatgcaacgtagttctcccctagaattgcaggggtattatgtacaaaagtttcaggtttttatggacagctaaagttgaaatgagaatttcttttctatacatata

SEQ ID NO: 67737 - DNA, 3475 bp, Zea Mays
aacaaatcacgattacacatacggttagatctaaatttaacaaaccaagaaggctacttgcatacttacatctaattacggcttgcatattagttattgcccgggctaaaaagccctatcacgacatacataaatgcatagcactactgctcccctttttgctggattcttccattttcctccgcttcttcttgattcactggtggtgcacaggggccagctgaggcgacaaccataagccctcacccttaccctcagctgctgcttcttggcttgggcttgaagcagatcaagggaggaggagaaggagatggcgtcgcccttgtcttcctcctcctccagcaccagcaccagcaccagcacgctcctccggctgatctgcctctgcaccgccttgccagtcgccctgcaggcggcggcggcgcgcccgcccaacgtcaccgtcggcgccctcttcaccttcgactccgtcatcggaaggtctgccaggaccgccatccagctcgccgtcgacgacgtcaaccgcgaccccgccgtgctgagggacaccaacctcagcgtcatcttccaggacaccaagtgcagcggattcgtcggcacaatccaagccctggagctgatggagaggcatgtggtggccgtggtgggcccccagtcctcgggcatcgcgcacgtcgtctcccacgtcgccaaccagctgcgcgtcccgctgctgtccttcgccgccaccgacccggcgctcgcctcctcgcagtacccctacttcgtccgcgccacgcacgacgaccgcttccagatggccgctgtcgccgacgtcgtcgcgcaccacggctggcgggaggtcacggcggtctacgtcgacaacgactacggccgcggcggcgtcgtcgcgctcggagacgcgctcgaggccctgcgcgccagggtctcctacagggccgcgttcccgccgggcgccgaccgcgccgcgctcgccgacctcctcgtgcgggccaacatgatggagtcgcgcgtcttcgtcgtccacgccagccctgactcgggactcgacgtcttcgccgccgcgaggtcgctcgacatgatggccaccggctacgtctggatcgccaccgactggctcgccgccgccatcgatgctgctggtgctggtgctgctgctgctgctggtaatatacagggtgtcctcatgctgcgccagtacaccccggactcggacgccaaggcgtcgctcgtctccaggttcgcggccaaacagtacatcaacgcgtacggcctcttcgcctacgattccgtctggatggcggcgcgcgccatcgaccagttcctcgacgacaacgccagcggcggtaacgtctccttctccgccgaccgcaacatccgcgacgccaacggcagcgcgctgggcctcagcgcgctcagggtgttcgaccagggcgagcagctgcttcggaaggtcatgctcgccaacttcactggcgtcacgggcagcgtccggttccagttggacgccgatgggagcgggggcgcgaccctcatcaaccccgcctacgagatcctcaacgtcggtggcacgggcgtccgccgggtcgcctactggtccaactacacgcgcctgtcggtggaggcgcccaggctgctcgccgacggagggccgccgcccaactccaataacacgaccacccagcagcagcagcagatgtacagcgtcatctggcccggtgacaccacggctaagccgcgcggatgggtattccccaacaacggcaagccgctgcggatcggcgtgccgtaccggacgacgtacaagcagttcgtgtccaaggaccggtccagccccgacggcgtcagcggctactgcgtggacgtgttcaatgcggcggtggcgctgctcccgtacccggtgccggcgtcgttcgtcctgttcggcgacggcgtcaagaaccccagctacaacgatctggtgcagagggtggctgacggcttcttcgacgcggcggtgggcgacatctccatcgtcacgaaccggacgcgggtggtggacttcacgcagccgtacgtggagtccggccttgtcatcgtgtccacggtgaaggccaagaactccaacgagtgggccttcctcaagcccttcacgccggggatgtgggccatcatcggcgccttcttcctcttcgtcggcgccgtggtgtggatcctggagcacaggttcaacccagagttccgggggtcaccgaggaggcagatggtcaccatcttctggttcagcttctctacgatgttcttcgcgcacagagagaacaccgtgagcactcttggccgcttcgtcctcatcatctggctcttcgtggtgctcatcatcaactccagctacacggccagcctgacgtccatcctgacggtgcagcagctgtccacgggcatccagggcctggacagcctcctctccagcaacgaccccatcggctaccaggtcggctccttcgcccggagctacatgatggacgagctgggcgtcccagcgtcgcgcctccgggagctggccatcgacggctacgccggcagcctgcagcgcgggcccagcaacggcggcgtggcggccatcgtcgacgagctgccgtacgtggagctcttcctctccaccaactgccagttcaggacggtgggccaggagttcaccaagagcggatggggattcgcgttccagcgagactcccccctggcggtggacctgtcgacggccatcctgacgctgtcagagaacggcgacctgcagcggatccacgacaagtggctcagcccagggacgtgcgcgtcgcagagcaccgacggcgtgggcgccgacaggctcaatctgggcagcttctggggcctcttcctcatctgcggcgtcgcctgcttcgtcgccctcctcatctacttcgccaggatactctgccagttctgcaagtaccacggccacgggaccaccgacggtgccggcccgttccccgtcccggagaggagcctgcggcggcccgccaggctcaccagcatccgggacctcatgtcctttgtcgacatgaaggaggccgaggtgaagagggccatccggagcaggtccgacaggcgactcgacgggtccatgggcggcaggagctacacctccgaagggccgtccttgtcacggccgtcctccatgtcgccggtgtaagacgggccggcggcgttcttcttcaagacacgttttttgtttgtgctgatctgacttaggtagttggagcctggaggcgacgatctgaaatcgatgaaaccgtgcgtatgcacaaattgctattcaacgaacatacacacacacacgatctttcggaagatagaatctgtaggtgctagtatgcaacgtagttctcccctagaattgcaggggtattatgtacaaaagtttcaggtttttatggacagctaaagttgaaatgagaatttcttttctatacatata

SEQ ID NO: 67738 - DNA, 2243 bp, Zea Mays
tcactgttagcgtcatgatctgtatatctgatgtgaacaatgtacattggacatcaagactagtatgttatgtaggagtgcaatataatacaatataatataatataatacagggagtagtacatggatgttatggtggtatttatatatgcctattaatctatcaataccatatattcagaatttgtgatctgatgaattttggtagtgttgctcgtcatcaaggtttttgcacacggaggggaggggcttctgatcgtccatcctcgcctccatcagcttctccttgaggctctgcttcagcctgcctccccctccccctacccgctgtggcaatccagagccgcctgacgagctgcactgctcgcctgcgacggctggaggaggaagcggcggcggcggcccttccgcggtcacgctcgacatcctcctgtccgaataagacggcgaccagtcggcagctgtcctcccggtcttcttcctgctctcggtgatggcggacctccagagcctgcgtatgagcgcggtgttcttggttgaacgccggctcgcgcctgacgaacgagcctccgtcgtcaccccgccgttgccgttggccaccgaagctgagcggtcgctggtgccgacccagctgcaggaagccatttccaggtcggccgagctgccaccgtcggcgaacatgtcgtcgtcgtcgtcgtcgtcgccgtcgccgccgtcggccttggccaagaagaggtcggtcgcggggctgacggactgcagcatgtcgctggatttggacgacgcggggctcgcgggcctgctgttcctgcgcccgtcgccgtccctttccctttccgcagcggcagcatgttgcctttcgctttccttgcggcggaagtggtccgagcttgtggctgcagcggcgtcgcttatgaggcgcgcctcccgcagcacggcggagtgggaggctgactcgtcgcccttgttgcggaggaaggcctccatctccgcctgcaagcggttgaggtgcgtgtacttgttctcgagcgcgagcttggcgtcggacagcttcatctgcacgcgctcctcccgccacacctcggccatctgcagcatgcggcgctcctcctccatctcctcccgcatgcgcaggcactccccgcggagcagctccacctcggcctggtcctcctccacctcccgcgtgagctcggagcaggcgtcctccatcagctcccgcgccttgcgctccatctcgtagctctgcgcctgctgcttggccgccgcccgcgcctccgccaggtcgcgcagaagcctggcgttggcctgctccagctgcctccggtgcctccgctctgcgcctagctcgtcctggagggcggccacggcgtggcgggccttgtcccggacccgggacttccacgccgccttctcctcggccagcctccgcaggaagcggtccaggcgcttggtcataaggcgccgctcctcctccagctccctggcttcgcctcgcgccttctccagctccgcctccatgagcagcagcagaggggaagacattgctgatgtcgaggcgaagaagatgttatgcgagtggttggcatcccatttggtggccttctccatggacgaggagccgtccaagcacgcgtcgatcttgtctaggatgccattcctagtgctgctgctagtacatcggcaacggcagaggtggtggcttggcctcgtccggctccgtcccatgagcttttgctgcgggacagacaaaatagatcagtcttcatctacagaaacagatcgatccacataaagatgtcatctccgttcgtcccattatgtatacatgttgggttatcaattatcatggatacagagtgctcttcttgaaatggagtcagtcatctgcagcaatctttttttcttcttcccatttatcagatctcgaatcctggatgcatacctaatgatccaatccccagaatcacttaggagttaggagttatataagaaagagagaagaaaaaaaacatctttgggatgggatgattgttcagtaaaaaaaaataatcggcttttgaccagaaatcagaatacgtcaatattagtttcaaagttgcggtaacaaaacaatccaatccgtggcctcttgtgaatttgtttttccacccaaaagaaacagagggcaagaacacagatcaaatcagggagaatgggaatggcggggtgaagcacaaggaaggaaggcaggatcgcagcac

SEQ ID NO: 67739 - DNA, 3270 bp, Zea Mays
caaatctccctctcccctggtcggtcgtctgtgtctcggctccgttgttgcgctgcgctgccattctcccccctttccaattccatccgaatcgagaggcgcctccacatccacctccaccgatcctcaaaccctagatccgccggccatgtccgcgcgaggggtgcgcccgggggtgctgcaccacaaggagaacaatccggcggacgcgcagcctggaaagcgccagcgcaccgccgctggggccgggaggcagccgctcgccgctgcaccgccgccgcaggaggagcccatggtgttctcgggcagggaggacgtcgacgctctcctcaacgagaaaatgaaggggaagaacaagatggactacaaggggaagagcgagcaaatgatggaatacatcaagaagcttcgagcctgtaccaaatggcttcttgagcgggaagatgcaaatcttgttgaaatcgagaggatcactggtcagcttgacgcgacacacaagcaacactctgagatagtggctgtcttgaagaatactattgaagaaacaaaatcaatatgtgaggaacttcaaaaacaatgtgcatctctacaagaggctctaaagacagtggaggctgaaaaaatggatgccctgaggtctctaggagatgagagggaggccaggatgggtgtggaatctttgcggaatggacttctagaagatctgaacagggcaaagttggaggaaaaacgccttaatgatcagattaagatgcttcaggacacaaataaaaggcttcaagaatataacacaagcctgcaacaatacaattgcaaccttcaagcagatgcaacaaagaatgcggaaacaatagtaaagctgcaaaaggagaagaacactatggtcgagacaatgaatggtctgaaagatcatgctaactcagtaaaaatgcaactagacattgcaaggtctttgcaaaatgaagccacaaaacaaaagaccgatttattaaaggaagttgaaagtattagaatggagcttcaacgtgcaagggaggaccgtgacactaaatctgctcaagtagattctttgctggttgatattggaacatacaaagaaatgactggaaaatccgtcattgagttagatagcgccatggcaaaaacctctgccctagaggaaacatgttcgtctcaaaggaagatgatagagacattggaaattaagcttgcagctgccaatgaaaagttaaagaggtctaatatgacggcctcggaaaccatgaccgagtatgagaacatgaagaaaatgctggaaagtgttcagtctcgccttgaagaggccgagcaaacaattctggaaggagagaatttacgaaaaaagttacataatacaattcttgagttgaagggaaacatctcaacttgtccaaagtgccctagatggctataaggtctgcatatttgcctatgggcaaactggttctggtaaaacatatacaatgatgggcaaccctgagttagaagatcaaaaaggaatgataccacgatctctggagcaaatttttcaagctagccagacacttaactcacagggttggagatataagatgcaggcctcaatgttggagatttacaacgagactatacgcgacttgctagcaacgaatcgcatggctgttcaggatgttggtgcttcaaagtacagtatcaagcatgatactaatggtaacacgaatgtgtcggaccttacgatcattgacgtaactagtatcaacgaagtttcttctctccttaggcgggctgctcagagcagatcagttggtagaacacaaatgaatgaggaatcatcaagaagtcactgtgttttcactcttcggattttcggtgtaaatgagggaacggatcaacaagtgcaaggagtgctgaatcttatagatctagcaggcagtgagcgcctgaacaaaagtggtgccacgggtgatcggttgaaagagacagtggctatcaacaaaagcttgtcatgtttaagtgatgtcatcttctcgattgcaaagaaagaggaacacgttccatttcggaactcaaagctgacatatctgctccagccgtgtctcggaggggactcgaagacactgatgtttgtgaatctgtctcctgaagcgtcctcgacaggggagtctctttgctcattgcggtttgctgcaagggtgaactcctgtgagatcgggatccccaggcgccaaacccagatgcggagctcacaatgatgaaatacggcggaagcgagctgccagtgtaatgcttgtgtgtgtgttgatttggtgatgcaaccgatcatttgcatccccttgtctggaggtggtgtgagttgccaattttatttggtttgtggccttgttgattgcgctaacggctggcagcggtgggtgtgctggcctattatattaatcttaggacctgatctgatttgtatgttgggatgtgttgccattttcaatttttttgctttcattcgtagtcttgatttgtcgtttgcccaatgcccaatgcctctgagctgagctgggcgtgtatgtaaacaactgtgtacccgttgtcggacacgcacacagcctgacatgataattgtatttccctgctctgggaattctgcaataccccttgtgagtttcaagtattcatttacacatcatgatatatgaatgaaaaattgtggttctgctaggccatcttggccatgagctcctggaggatgagctttgtctcggcgtagcggtcgccgatcctggcgtcgtccttggctgtgacggcctcctggagcgtctcgaagctgtcgaagaggcggttggcgaggtcgacgaagggcggcttgtcttcggcggcggagatgagcttgtcgaagtcgtagtacatgaaggtggacttgaggcggaggtacttgttgacgtagttggaggcgtccttgcccagcaggtcctccagcgccagcaggtcgaaggccgtgctgcgcagccggagcgcgtgcccgtctccgcgttgttgatctcctctgccatgccactcatcgccgacacaattgtcagtgaaccaagtaaagttaagtggtggatggagcaggacggacgggacggcttactgttgacgatcttgggcacgggcaaggggaactcggtcagccaccagccgttgttggccggctcgtcgtcggtttcggcggcggaggcggcacgtgggcggagcaggacggcgcacgcgatgccgaggaggcaggctgacctcctggacggg

SEQ ID NO: 67740 - DNA, 3447 bp, Zea Mays
caaatctccctctcccctggtcggtcgtctgtgtctcggctccgttgttgcgctgcgctgccattctcccccctttccaattccatccgaatcgagaggcgcctccacatccacctccaccgatcctcaaaccctagatccgccggccatgtccgcgcgaggggtgcgcccgggggtgctgcaccacaaggagaacaatccggcggacgcgcagcctggaaagcgccagcgcaccgccgctggggccgggaggcagccgctcgccgctgcaccgccgccgcaggaggagcccatggtgttctcgggcagggaggacgtcgacgctctcctcaacgagaaaatgaaggggaagaacaagatggactacaaggggaagagcgagcaaatgatggaatacatcaagaagcttcgagcctgtaccaaatggcttcttgagcgggaagatgcaaatcttgttgaaatcgagaggatcactggtcagcttgacgcgacacacaagcaacactctgagatagtggctgtcttgaagaatactattgaagaaacaaaatcaatatgtgaggaacttcaaaaacaatgtgcatctctacaagaggctctaaagacagtggaggctgaaaaaatggatgccctgaggtctctaggagatgagagggaggccaggatgggtgtggaatctttgcggaatggacttctagaagatctgaacagggcaaagttggaggaaaaacgccttaatgatcagattaagatgcttcaggacacaaataaaaggcttcaagaatataacacaagcctgcaacaatacaattgcaaccttcaagcagatgcaacaaagaatgcggaaacaatagtaaagctgcaaaaggagaagaacactatggtcgagacaatgaatggtctgaaagatcatgctaactcagtaaaaatgcaactagacattgcaaggtctttgcaaaatgaagccacaaaacaaaagaccgatttattaaaggaagttgaaagtattagaatggagcttcaacgtgcaagggaggaccgtgacactaaatctgctcaagtagattctttgctggttgatattggaacatacaaagaaatgactggaaaatccgtcattgagttagatagcgccatggcaaaaacctctgccctagaggaaacatgttcgtctcaaaggaagatgatagagacattggaaattaagcttgcagctgccaatgaaaagttaaagaggtctaatatgacggcctcggaaaccatgaccgagtatgagaacatgaagaaaatgctggaaagtgttcagtctcgccttgaagaggccgagcaaacaattctggaaggagagaatttacgaaaaaagttacataatacaattcttgagttgaagggaaacatcagagtattttgtagagttaggcctttgctgccaaatgaatcaggagcagtatcatatccaaagaatggagaaaacttaggccgaggcattgagttgttacataatgggatattcgtttacttttgataaagtatttgatcattcggcgtcacaagaacatgtgttcatagaaatatctcaacttgtccaaagtgccctagatggctataaggtctgcatatttgcctatgggcaaactggttctggtaaaacatatacaatgatgggcaaccctgagttagaagatcaaaaaggaatgataccacgatctctggagcaaatttttcaagctagccagacacttaactcacagggttggagatataagatgcaggcctcaatgttggagatttacaacgagactatacgcgacttgctagcaacgaatcgcatggctgttcaggatgttggtgcttcaaagtacagtatcaagcatgatactaatggtaacacgaatgtgtcggaccttacgatcattgacgtaactagtatcaacgaagtttcttctctccttaggcgggctgctcagagcagatcagttggtagaacacaaatgaatgaggaatcatcaagaagtcactgtgttttcactcttcggattttcggtgtaaatgagggaacggatcaacaagtgcaaggagtgctgaatcttatagatctagcaggcagtgagcgcctgaacaaaagtggtgccacgggtgatcggttgaaagagacagtggctatcaacaaaagcttgtcatgtttaagtgatgtcatcttctcgattgcaaagaaagaggaacacgttccatttcggaactcaaagctgacatatctgctccagccgtgtctcggaggggactcgaagacactgatgtttgtgaatctgtctcctgaagcgtcctcgacaggggagtctctttgctcattgcggtttgctgcaagggtgaactcctgtgagatcgggatccccaggcgccaaacccagatgcggagctcacaatgatgaaatacggcggaagcgagctgccagtgtaatgcttgtgtgtgtgttgatttggtgatgcaaccgatcatttgcatccccttgtctggaggtggtgtgagttgccaattttatttggtttgtggccttgttgattgcgctaacggctggcagcggtgggtgtgctggcctattatattaatcttaggacctgatctgatttgtatgttgggatgtgttgccattttcaatttttttgctttcattcgtagtcttgatttgtcgtttgcccaatgcccaatgcctctgagctgagctgggcgtgtatgtaaacaactgtgtacccgttgtcggacacgcacacagcctgacatgataattgtatttccctgctctgggaattctgcaataccccttgtgagtttcaagtattcatttacacatcatgatatatgaatgaaaaattgtggttctgctaggccatcttggccatgagctcctggaggatgagctttgtctcggcgtagcggtcgccgatcctggcgtcgtccttggctgtgacggcctcctggagcgtctcgaagctgtcgaagaggcggttggcgaggtcgacgaagggcggcttgtcttcggcggcggagatgagcttgtcgaagtcgtagtacatgaaggtggacttgaggcggaggtacttgttgacgtagttggaggcgtccttgcccagcaggtcctccagcgccagcaggtcgaaggccgtgctgcgcagccggagcgcgtgcccgtctccgcgttgttgatctcctctgccatgccactcatcgccgacacaattgtcagtgaaccaagtaaagttaagtggtggatggagcaggacggacgggacggcttactgttgacgatcttgggcacgggcaaggggaactcggtcagccaccagccgttgttggccggctcgtcgtcggtttcggcggcggaggcggcacgtgggcggagcaggacggcgcacgcgatgccgaggaggcaggctgacctcctggacggg

SEQ ID NO: 67741 - DNA, 3100 bp, Zea Mays
caaatctccctctcccctggtcggtcgtctgtgtctcggctccgttgttgcgctgcgctgccattctcccccctttccaattccatccgaatcgagaggcgcctccacatccacctccaccgatcctcaaaccctagatccgccggccatgtccgcgcgaggggtgcgcccgggggtgctgcaccacaaggagaacaatccggcggacgcgcagcctggaaagcgccagcgcaccgccgctggggccgggaggcagccgctcgccgctgcaccgccgccgcaggaggagcccatggtgttctcgggcagggaggacgtcgacgctctcctcaacgagaaaatgaaggggaagaacaagatggactacaaggggaagagcgagcaaatgatggaatacatcaagaagcttcgagcctgtaccaaatggcttcttgagcgggaagatgcaaatcttgttgaaatcgagaggatcactggtcagcttgacgcgacacacaagcaacactctgagatagtggctgtcttgaagaatactattgaagaaacaaaatcaatatgtgaggaacttcaaaaacaatgtgcatctctacaagaggctctaaagacagtggaggctgaaaaaatggatgccctgaggtctctaggagatgagagggaggccaggatgggtgtggaatctttgcggaatggacttctagaagatctgaacagggcaaagttggaggaaaaacgccttaatgatcagattaagatgcttcaggacacaaataaaaggcttcaagaatataacacaagcctgcaacaatacaattgcaaccttcaagcagatgcaacaaagaatgcggaaacaatagtaaagctgcaaaaggagaagaacactatggtcgagacaatgaatggtctgaaagatcatgctaactcagtaaaaatgcaactagacattgcaaggtctttgcaaaatgaagccacaaaacaaaagaccgatttattaaaggaagttgaaagtattagaatggagcttcaacgtgcaagggaggaccgtgacactaaatctgctcaagtagattctttgctggttgatattggaacatacaaagaaatgactggaaaatccgtcattgagttagatagcgccatggcaaaaacctctgccctagaggaaacatgttcgtctcaaaggaagatgatagagacattggaaattaagcttgcagctgccaatgaaaagttaaagaggtctaatatgacggcctcggaaaccatgaccgagtatgagaacatgaagaaaatgctggaaagtgttcagtctcgccttgaagaggccgagcaaacaattctggaaggagagaatttacgaaaaaagttacataatacaattcttgagttgaagggaaacatcagagtattttgtagagttaggcctttgctgccaaatgaatcaggagcagtatcatatccaaagaatggagaaaacttaggccgaggcattgagttgttacataatgcacagggatattcgtttacttttgataaagtatttgatcattcggcgtcacaagaacatgtgttcatagaaatatctcaacttgtccaaagtgccctagatggctataaggtctgcatatttgcctatgggcaaactggttctggtaaaacatatacaatgatgggcaaccctgagttagaagatcaaaaaggaatgataccacgatctctggagcaaatttttcaagctagccagacacttaactcacagggttggagatataagatgcaggcctcaatgttggagatttacaacgagactatacgcgacttgctagcaacgaatcgcatggctgttcaggatgttggtgcttcaaagtacagtatcaagcatgatactaatggtaacacgaatgtgtcggaccttacgatcattgacgtaactagtatcaacgaagtttcttctctccttaggcgggctgctcagagcagttggtagaacacaaatgaatgaggaatcatcaagaagtcactgtgttttcactcttcggattttcggtgtaaatgagggaacggatcaacaagtgcaaggagtgctgaatcttatagatctagcaggcagtgagcgcctgaacaaaagtggtgccacgggtgatcggttgaaagagacagtggctatcaacaaaagcttgtcatgtttaagtgatgtcatcttctcgattgcaaagaaagaggaacacgttccatttcggaactcaaagctgacatatctgctccagccgtgtctcggaggggactcgaagacactgatgtttgtgaatctgtctcctgaagcgtcctcgacaggggagtctctttgctcattgcggtttgctgcaagggtgaactcctgtgagatcgggatccccaggcgccaaacccagatgcggagctcacaatgatgaaatacggcggaagcgagctgccagtgtaatgcttgtgtgtgtgttgatttggtgatgcaaccgatcatttgcatccccttgtctggaggtggtgtgagttgccaattttatttggtttgtggccttgttgattgcgctaacggctggcagcggtgggtgtgctggcctattatattaatcttaggacctgatctgatttgtatgttgggatgtgttgccattttcaatttttttgctttcattcgtagtcttgatttgtcgtttgcccaatgcccaatgcctctgagctgagctgggcgtgtatgtaaacaactgtgtacccgttgtcggacacgcacacagcctgacatgataattgtatttccctgctctgggaattctgcaataccccttgtgagtttcaagtattcatttacacatcatgatatatgaatgaaaaattgtggttctgctaggccatcttggccatgagctcctggaggatgagctttgtctcggcgtagcggtcgccgatcctggcgtcgtccttggctgtgacggcctcctggagcgtctcgaagctgtcgaagaggcggttggcgaggtcgacgaagggcggcttgtcttcggcggcggagatgagcttgtcgaagtcgtagtacatgaaggtggacttgaggcggaggtacttg

SEQ ID NO: 67742 - DNA, 4860 bp, Zea Mays
gtcacgacaaaataaagtgtgcatctcgaggagtcaatcgattgtagatccaggcacgcatgacatcacatcagttcagctagatgcctgaaggagaagttcagtagcacaccactacctcacaaaacagctcttctgctcgtgcaaaagtatccagggtccagatgggttcagacaagcagattggtagcccacgccaactcttggaaacactaaagatgggcagagttaggactatcctgacacatacatacccgtaccctcacgagcactccaggcatattatgactgcagtgattattgcctgtctcttctttatatcgtctgacaacatgcacacgctcatacataaactggataacaatatcaagtggtggtccatgtatgtttgcctcattggcttcttctatttcttctcatctccttttcttggaaggaccattcagcccagctactcaaattttaaccgctggtatgttgcttggatttgctttgcatccctgtaccatcttcctagcttccagtcaatgggggttgatatgcgcatgaacctctcgcttttcttgacaatatatttctcctcagtgcttttcatcattgcctttcatatcatatttattggtctctggtacattgggttggttgcacgcttggcaggaacgaggccaggcgtatggacaattctccagaactgtacagtaatcagcattgcatgttgtgtgttctacagtcattgtgggaatcttgctgtgcacaagagcaaatcttttggtagtagttctgatcccaatttgcttgcttttcttaaaaatgaaaacgggagtacctggatatcaaattttctccgtatgaatcagttgaaagatgagatatgttcgtcttggtttgctcctgttggatctgcaagtgactatcctattctggcaaaatgggttatctacggggaggtactgcctgcttctcctttattcatctattatttctagtcgcactttcttaaggtgacatccatgttgcacttctttgatcatgtttttctccagttagtttgcagcggatcctgtgctggcccatcggatgaaatctctcctttgtactcattatgggctacatttgttggcctctatatcgctaactttgttgtggagagatcaactgggtatgcctttagtttttcacactatacgtactaaggtcctgtttggaagcaacctagtttttaagaatctagtttggaaccacgtctgttttcataaaccagtttcttaaaaattgggtgcttccaaacatgacctaatattgctgaattagttgttgccacgtggaggctactaatatttctttctgataccttaagctctctctgtggatgactagtgattgtgtgggaaagtgaactgcttgattgatattgcatagaggtggtggttacatatatagacacataacccctaaccctaatgggccgacaacccaacagtggtgtcggcccacccacacgcacagacaatctaacatccccccctcgtagtcgcaacgggggcactgcacacgatgggactggagtagaagccgaaggtaggagccgacgggttgatatccccccacagtcgcaacgtcgtgagggtgtgaatgttgcggctggagtagacaccggtgtggactctgagaaggtgatatcccctagatgtcgaggtagccgaagtcgaggtggtcgtggtcgtggtcgggagacatgcaacaatagcttgtggttcgggaggggtcgacgttcgagcatcaacgatcggcaacgcgatacaacaaaagagcaccaacaaaccaaccttcttgcttcttcgatcgtccggacgtcgaggagccccgctagggaggccggcggcagcgcacgcgtctgcgccagtcatggtggccgcgcccgcgacagaatagaaggggtaaaggcggatctggtcggaaaggccacgtcggcgacagatccagccaggaagatggcaatccggccaaaggaacgacagatctagccgggaaggtcgaagcaacggtgaatccggccggcggcggggcggacaactgcgcctgctctcgtgctcgccagaggccggcggcggaggagcggagccggcgagtagaggagaggggacgccgacggccggagaggagaagaggccgtgtggtggcctgcatctgggatgtggccgcccctaggagggaaggatgagcctcctgggggggctgagatggcggctgtccctgtgggatgctggcggctgctgcggggttgggcgagaaaacactaaccctaacctagtctggtaccatgtaggaaagtgaattgcttgattgatatcacatagaggtggtggttacatatatagacacaaaaccctaaccctaatgggccggcagcccaacagtggtgccggcccccccacacacatagtttaacagattgtgcaattctaattcttggttatgttccgtaaatacttcaggtgggctcttacccacccgtcaacagatttggaggatgagaaactgaagaggcatatgaaaccagattttctggacatggtaccttggtattcagggacatcagctgatttattcaagacagcatttgatcttatggtctctgtgactctttttgttgggcgatttgacatgcgcatgatgcaggctgcaatgaaaggaccaacaggcaacactccaaatgatgacctattgtatgaccacttcaatgaaagggaagacctttggtttgactttgttgcagacaccggtgatggagggaattcatcatatacagttgcccgactgttagcccaaccatctattaggactgttatcggtggctctatgcatactcttccacgtgggaacttacttattatcggcggagatcttgcgtacccaaacccttcatcatttacatacgagaggcgcttctttaggccttttgagtatgctctgcaacctccaccttggtacagagatgaacatatagctttggataagcctgagcttcctcctggtgtatcaaagatgactgaatatgatggaccacagtgtttcataattcctggaaatcatgactggtttgatgggcttcatacttttatgagatatatatgtcataaaagctggttaggtggatggtttctgcctcagaagaagagttattttgcattgcatcttcccaagggttggtggatatttggtcttgatttatctctccatggcgatgttgatgtataccaattcaagttctttgctgatgtttgtcagaataagctgtgcaggttggagagaatgattctgtgattgtagtaacacatgagccaaactggcttcttgattggtactggaatgagactacaggcaagaatgtatcacacttaattcaggaatacctgaaaggaagatgtaaacttcgcatggcaggggatttacaccattttatgaggcactctgccactcgatcagaaaagaataattttgtgcaacacttgcttgttaatggatgtggtggtgcctttttgcacccaacacatgttttcagaaactttgagaggttctctggaaccacctatgaatgcaaggcagcttatccatcctatgatgagtctactgggattgcattgggtaacatattgaagttccgcaaaaagaattggcagtttgacatcattggcggttttatatacttcattttggtgttttcaatgttcccacagtaggaagtcttactttattgacggcgtcatattcattcgtaccatccaaactatcaaggaggagaagagctattataggcggcctccatgttttggcccatttaactgcagcactacttttaatgttgctgctggagttgggcattgaaatttgtattcgtaaccatttattggcaacttcaggttatcacactctgtatgaatggtatcgatccatggaaagtgagcattttccagatcctactggtcttcgtgctcgtttggagcaatggactctgggactgtatccagcatgtataaaatatcttatggcagcctttgacgtccctgaggtcatggctgtgacaagaataaatatatgcaagaacggaatgatgtctctttcgcggagtgttctgatcatgtactacacttctgtgtttatctatttctggattttctcgactccagttgtttctctcatatttggtagttacctatacatctgcatcaattggttccacatacactttgatgaagccttctcgtcgctgcgcatcgcaaactacaaatccttcacaaggttccatgttaagaaggatggtgatctagaaatatttactcttgcagttgacaaggtcccaaaggactggaagttggatccgaggtgggaatcagagggacgagggcctcatcagctcagccatgaccggaagcatccaagcaagtggaggtcagcctcatcaactgaccctgtgagatctgtacgggttgttgatcatttcaccatcgaaagaacaagaaccccagatatggagccctcttcctgattgtgcagcccttactattataaggagttgctactgctgctagaaaaattaacaataactagcttcaacacacagtattgtttttgtttccacatccagccaataggtggaccgaggtgatctgcccttgtcggcgtccccgctttactgacctcacctgcagcattgtaatctgtatagaaagaaaattcacctgctgcctattgcttgtattcaatcaaaggaactctaaaaaaaagagtgttacagaagaatgttttgagaaagcaaagggatgaatcgattcatcatcatttactaaagattgattctat

SEQ ID NO: 67743 - DNA, 4071 bp, Zea Mays
ccgatgcggatgcggatgccgatgccgatgccgaagcgcacctgtctcttctccttgccgaccctccacccccagccgaagtgaggccaccaatcacacagccgctccccccgctcgtcctcctcccctgcccctgcctccgcccccgcccccgcccccgccccgccacgccagcatttggattggattgccggcggccgagtggaggcggagatccatccggactccggtgagtccgttcccgctgccgtgcttgatccaggcacgcatgacatcacatcagttcagctagatgcctgaaggagaagttcagtagcacaccactacctcacaaaacagctcttctgctcgtgcaaaagtatccagggtccagatgggttcagacaagcagattggtagcccacgccaactcttggaaacactaaagatgggcagagttaggactatcctgacacatacatacccgtaccctcacgagcactccaggcatattatgactgcagtgattattgcctgtctcttctttatatcgtctgacaacatgcacacgctcatacataaactggataacaatatcaagtggtggtccatgtatgtttgcctcattggcttcttctatttcttctcatctccttttcttggaaggaccattcagcccagctactcaaattttaaccgctggtatgttgcttggatttgctttgcatccctgtaccatcttcctagcttccagtcaatgggggttgatatgcgcatgaacctctcgcttttcttgacaatatatttctcctcagtgcttttcatcattgcctttcatatcatatttattggtctctggtacattgggttggttgcacgcttggcaggaacgaggccaggcgtatggacaattctccagaactgtacagtaatcagcattgcatgttgtgtgttctacagtcattgtgggaatcttgctgtgcacaagagcaaatcttttggtagtagttctgatcccaatttgcttgcttttcttaaaaatgaaaacgggagtacctggatatcaaattttctccgtatgaatcagttgaaagatgagatatgttcgtcttggtttgctcctgttggatctgcaagtgactatcctattctggcaaaatgggttatctacggggagttagtttgcagcggatcctgtgctggcccatcggatgaaatctctcctttgtactcattatgggctacatttgttggcctctatatcgctaactttgttgtggagagatcaactgggtgggctcttacccacccgtcaacagatttggaggatgagaaactgaagaggcatatgaaaccagattttctggacatggtaccttggtattcagggacatcagctgatttattcaagacagcatttgatcttatggtctctgtgactctttttgttgggcgatttgacatgcgcatgatgcaggctgcaatgaaaggaccaacaggcaacactccaaatgatgacctattgtatgaccacttcaatgaaagggaagacctttggtttgactttgttgcagacaccggtgatggagggaattcatcatatacagttgcccgactgttagcccaaccatctattaggactgttatcggtggctctatgcatactcttccacgtgggaacttacttattatcggcggagatcttgcgtacccaaacccttcatcatttacatacgagaggcgcttctttaggccttttgagtatgctctgcaacctccaccttggtacagagatgaacatatagctttggataagcctgagcttcctcctggtgtatcaaagatgactgaatatgatggaccacagtgtttcataattcctggaaatcatgactggtttgatgggcttcatacttttatgagatatatatgtcataaaagctggttaggtggatggtttctgcctcagaagaagagttattttgcattgcatcttcccaagggttggtggatatttggtcttgatttatctctccatggcgatgttgatgtataccaattcaagttctttgctgatgtttgtcagaataaggtgcattttcttcgcttgctcatcttttttttctttaaactcctttcatttccttatttttggtttcacgtgggacaacatgcgttagtaattgcttctagtgttcaaccatgtatgccggttattattttcatttacagtaaacacaagaagagttgttgcatattctttgtagtcttaggctgataggctcttagccccatttgctttctacttggaaggaatccctcttacggccttacctttccagaacatctcttggaacttggaagttgaaggtaatatttacagatttaattgattgacttcaatactaaagctgtgcaggttggagagaatgattctgtgattgtagtaacacatgagccaaactggcttcttgattggtactggaatgagactacaggcaagaatgtatcacacttaattcaggaatacctgaaaggaagatgtaaacttcgcatggcaggggatttacaccattttatgaggcactctgccactcgatcagaaaagaataattttgtgcaacacttgcttgttaatggatgtggtggtgcctttttgcacccaacacatgttttcagaaactttgagaggttctctggaaccacctatgaatgcaaggcagcttatccatcctatgatgagtctactgggattgcattgggtaacatattgaagttccgcaaaaagaattggcagtttgacatcattggcggttttatatacttcattttggtgttttcaatgttcccacagtgtaatcttgttcgtatcttaaatgaagaaacttggtctgggcgtctgaaaagcttctcaggcacaatatggagtgctttgctttatatttttgagcactcttatgtctcttcagtaggaagtcttactttattgacggcgtcatattcattcgtaccatccaaactatcaaggaggagaagagctattataggcggcctccatgttttggcccatttaactgcagcactacttttaatgttgctgctggagttgggcattgaaatttgtattcgtaaccatttattggcaacttcaggttatcacactctgtatgaatggtatcgatccatggaaagtgagcattttccagatcctactggtcttcgtgctcgtttggagcaatggactctgggactgtatccagcatgtataaaatatcttatggcagcctttgacgtccctgaggtcatggctgtgacaagaataaatatatgcaagaacggaatgatgtctctttcgcggagtgttctgatcatgtactacacttctgtgtttatctatttctggattttctcgactccagttgtttctctcatatttggtagttacctatacatctgcatcaattggttccacatacactttgatgaagccttctcgtcgctgcgcatcgcaaactacaaatccttcacaaggttccatgttaagaaggatggtgatctagaaatatttactcttgcagttgacaaggtcccaaaggactggaagttggatccgaggtgggaatcagagggacgagggcctcatcagctcagccatgaccggaagcatccaagcaagtggaggtcagcctcatcaactgaccctgtgagatctgtacgggttgttgatcatttcaccatcgaaagaacaagaaccccagatatggagccctcttcctgattgtgcagcccttactattataaggagttgctactgctgctagaaaaattaacaataactagcttcaacacacagtattgtttttgtttccacatccagccaataggtggaccgaggtgatctgcccttgtcggcgtccccgctttactgacctcacctgcagcattgtaatctgtatagaaagaaaattcacctgctgcctattgcttgtattcaatcaaaggaactctaaaaaaaagagtgttacagaagaatgttttgagaaagcaaagggatgaatcgattcatcatcatttactaaagattgattctat

SEQ ID NO: 67744 - DNA, 4994 bp, Zea Mays
ccgatgcggatgcggatgccgatgccgatgccgaagcgcacctgtctcttctccttgccgaccctccacccccagccgaagtgaggccaccaatcacacagccgctccccccgctcgtcctcctcccctgcccctgcctccgcccccgcccccgcccccgccccgccacgccagcatttggattggattgccggcggccgagtggaggcggagatccatccggactccggtgagtccgttcccgctgccgtgcttgatccaggcacgcatgacatcacatcagttcagctagatgcctgaaggagaagttcagtagcacaccactacctcacaaaacagctcttctgctcgtgcaaaagtatccagggtccagatgggttcagacaagcagattggtagcccacgccaactcttggaaacactaaagatgggcagagttaggactatcctgacacatacatacccgtaccctcacgagcactccaggcatattatgactgcagtgattattgcctgtctcttctttatatcgtctgacaacatgcacacgctcatacataaactggataacaatatcaagtggtggtccatgtatgtttgcctcattggcttcttctatttcttctcatctccttttcttggaaggaccattcagcccagctactcaaattttaaccgctggtatgttgcttggatttgctttgcatccctgtaccatcttcctagcttccagtcaatgggggttgatatgcgcatgaacctctcgcttttcttgacaatatatttctcctcagtgcttttcatcattgcctttcatatcatatttattggtctctggtacattgggttggttgcacgcttggcaggaacgaggccaggcgtatggacaattctccagaactgtacagtaatcagcattgcatgttgtgtgttctacagtcattgtgggaatcttgctgtgcacaagagcaaatcttttgttgaaagatgagatatgttcgtcttggtttgctcctgttggatctgcaagtgactatcctattctggcaaaatgggttatctacggggagttagtttgcagcggatcctgtgctggcccatcggatgaaatctctcctttgtactcattatgggctacatttgttggcctctatatcgctaactttgttgtggagagatcaactgggtatgcctttagtttttcacactatacgtactaaggtcctgtttggaagcaacctagtttttaagaatctagtttggaaccacgtctgttttcataaaccagtttcttaaaaattgggtgcttccaaacatgacctaatattgctgaattagttgttgccacgtggaggctactaatatttctttctgataccttaagctctctctgtggatgactagtgattgtgtgggaaagtgaactgcttgattgatattgcatagaggtggtggttacatatatagacacataacccctaaccctaatgggccgacaacccaacagtggtgtcggcccacccacacgcacagacaatctaacatccccccctcgtagtcgcaacgggggcactgcacacgatgggactggagtagaagccgaaggtaggagccgacgggttgatatccccccacagtcgcaacgtcgtgagggtgtgaatgttgcggctggagtagacaccggtgtggactctgagaaggtgatatcccctagatgtcgaggtagccgaagtcgaggtggtcgtggtcgtggtcgggagacatgcaacaatagcttgtggttcgggaggggtcgacgttcgagcatcaacgatcggcaacgcgatacaacaaaagagcaccaacaaaccaaccttcttgcttcttcgatcgtccggacgtcgaggagccccgctagggaggccggcggcagcgcacgcgtctgcgccagtcatggtggccgcgcccgcgacagaatagaaggggtaaaggcggatctggtcggaaaggccacgtcggcgacagatccagccaggaagatggcaatccggccaaaggaacgacagatctagccgggaaggtcgaagcaacggtgaatccggccggcggcggggcggacaactgcgcctgctctcgtgctcgccagaggccggcggcggaggagcggagccggcgagtagaggagaggggacgccgacggccggagaggagaagaggccgtgtggtggcctgcatctgggatgtggccgcccctaggagggaaggatgagcctcctgggggggctgagatggcggctgtccctgtgggatgctggcggctgctgcggggttgggcgagaaaacactaaccctaacctagtctggtaccatgtaggaaagtgaattgcttgattgatatcacatagaggtggtggttacatatatagacacaaaaccctaaccctaatgggccggcagcccaacagtggtgccggcccccccacacacatagtttaacagattgtgcaattctaattcttggttatgttccgtaaatacttcaggtgggctcttacccacccgtcaacagatttggaggatgagaaactgaagaggcatatgaaaccagattttctggacatggtaccttggtattcagggacatcagctgatttattcaagacagcatttgatcttatggtctctgtgactctttttgttgggcgatttgacatgcgcatgatgcaggctgcaatgaaaggaccaacaggcaacactccaaatgatgacctattgtatgaccacttcaatgaaagggaagacctttggtttgactttgttgcagacaccggtgatggagggaattcatcatatacagttgcccgactgttagcccaaccatctattaggactgttatcggtggctctatgcatactcttccacgtgggaacttacttattatcggcggagatcttgcgtacccaaacccttcatcatttacatacgagaggcgcttctttaggccttttgagtatgctctgcaacctccaccttggtacagagatgaacatatagctttggataagcctgagcttcctcctggtgtatcaaagatgactgaatatgatggaccacagtgtttcataattcctggaaatcatgactggtttgatgggcttcatacttttatgagatatatatgtcataaaagctggttaggtggatggtttctgcctcagaagaagagttattttgcattgcatcttcccaagggttggtggatatttggtcttgatttatctctccatggcgatgttgatgtataccaattcaagttctttgctgatgtttgtcagaataaggttggagagaatgattctgtgattgtagtaacacatgagccaaactggcttcttgattggtactggaatgagactacaggcaagaatgtatcacacttaattcaggaatacctgaaaggaagatgtaaacttcgcatggcaggggatttacaccattttatgaggcactctgccactcgatcagaaaagaataattttgtgcaacacttgcttgttaatggatgtggtggtgcctttttgcacccaacacatgttttcagaaactttgagaggttctctggaaccacctatgaatgcaaggcagcttatccatcctatgatgagtctactgggattgcattgggtaacatattgaagttccgcaaaaagaattggcagtttgacatcattggcggttttatatacttcattttggtgttttcaatgttcccacagtgtaatcttgttcgtatcttaaatgaagaaacttggtctgggcgtctgaaaagcttctcaggcacaatatggagtgctttgctttatatttttgagcactcttatgtctcttcagtaggaagtcttactttattgacggcgtcatattcattcgtaccatccaaactatcaaggaggagaagagctattataggcggcctccatgttttggcccatttaactgcagcactacttttaatgttgctgctggagttgggcattgaaatttgtattcgtaaccatttattggcaacttcaggttatcacactctgtatgaatggtatcgatccatggaaagtgagcattttccagatcctactggtcttcgtgctcgtttggagcaatggactctgggactgtatccagcatgtataaaatatcttatggcagcctttgacgtccctgaggtcatggctgtgacaagaataaatatatgcaagaacggaatgatgtctctttcgcggagtgttctgatcatgtactacacttctgtgtttatctatttctggattttctcgactccagttgtttctctcatatttggtagttacctatacatctgcatcaattggttccacatacactttgatgaagccttctcgtcgctgcgcatcgcaaactacaaatccttcacaaggttccatgttaagaaggatggtgatctagaaatatttactcttgcagttgacaaggtcccaaaggactggaagttggatccgaggtgggaatcagagggacgagggcctcatcagctcagccatgaccggaagcatccaagcaagtggaggtcagcctcatcaactgaccctgtgagatctgtacgggttgttgatcatttcaccatcgaaagaacaagaaccccagatatggagccctcttcctgattgtgcagcccttactattataaggagttgctactgctgctagaaaaattaacaataactagcttcaacacacagtattgtttttgtttccacatccagccaataggtggaccgaggtgatctgcccttgtcggcgtccccgctttactgacctcacctgcagcattgtaatctgtatagaaagaaaattcacctgctgcctattgcttgtattcaatcaaaggaactctaaaaaaaagagtgttacagaagaatgttttgagaaagcaaagggatgaatcgattcatcatcatttactaaagattgattctat

SEQ ID NO: 67745 - DNA, 3725 bp, Zea Mays
ccgatgcggatgcggatgccgatgccgatgccgaagcgcacctgtctcttctccttgccgaccctccacccccagccgaagtgaggccaccaatcacacagccgctccccccgctcgtcctcctcccctgcccctgcctccgcccccgcccccgcccccgccccgccacgccagcatttggattggattgccggcggccgagtggaggcggagatccatccggactccgatccaggcacgcatgacatcacatcagttcagctagatgcctgaaggagaagttcagtagcacaccactacctcacaaaacagctcttctgctcgtgcaaaagtatccagggtccagatgggttcagacaagcagattggtagcccacgccaactcttggaaacactaaagatgggcagagttaggactatcctgacacatacatacccgtaccctcacgagcactccaggcatattatgactgcagtgattattgcctgtctcttctttatatcgtctgacaacatgcacacgctcatacataaactggataacaatatcaagtggtggtccatgtatgtttgcctcattggcttcttctatttcttctcatctccttttcttggaaggaccattcagcccagctactcaaattttaaccgctggtatgttgcttggatttgctttgcatccctgtaccatcttcctagcttccagtcaatgggggttgatatgcgcatgaacctctcgcttttcttgacaatatatttctcctcagtgcttttcatcattgcctttcatatcatatttattggtctctggtacattgggttggttgcacgcttggcaggaacgaggccaggcgtatggacaattctccagaactgtacagtaatcagcattgcatgttgtgtgttctacagtcattgtgggaatcttgctgtgcacaagagcaaatcttttggtagtagttctgatcccaatttgcttgcttttcttaaaaatgaaaacgggagtacctggatatcaaattttctccgtatgaatcagttgaaagatgagatatgttcgtcttggtttgctcctgttggatctgcaagtgactatcctattctggcaaaatgggttatctacggggagttagtttgcagcggatcctgtgctggcccatcggatgaaatctctcctttgtactcattatgggctacatttgttggcctctatatcgctaactttgttgtggagagatcaactgggtgggctcttacccacccgtcaacagatttggaggatgagaaactgaagaggcatatgaaaccagattttctggacatggtaccttggtattcagggacatcagctgatttattcaagacagcatttgatcttatggtctctgtgactctttttgttgggcgatttgacatgcgcatgatgcaggctgcaatgaaaggaccaacaggcaacactccaaatgatgacctattgtatgaccacttcaatgaaagggaagacctttggtttgactttgttgcagacaccggtgatggagggaattcatcatatacagttgcccgactgttagcccaaccatctattaggactgttatcggtggctctatgcatactcttccacgtgggaacttacttattatcggcggagatcttgcgtacccaaacccttcatcatttacatacgagaggcgcttctttaggccttttgagtatgctctgcaacctccaccttggtacagagatgaacatatagctttggataagcctgagcttcctcctggtgtatcaaagatgactgaatatgatggaccacagtgtttcataattcctggaaatcatgactggtttgatgggcttcatacttttatgagatatatatgtcataaaagctggttaggtggatggtttctgcctcagaagaagagttattttgcattgcatcttcccaagggttggtggatatttggtcttgatttatctctccatggcgatgttgatgtataccaattcaagttctttgctgatgtttgtcagaataagctgtgcaggttggagagaatgattctgtgattgtagtaacacatgagccaaactggcttcttgattggtactggaatgagactacaggcaagaatgtatcacacttaattcaggaatacctgaaaggaagatgtaaacttcgcatggcaggggatttacaccattttatgaggcactctgccactcgatcagaaaagaataattttgtgcaacacttgcttgttaatggatgtggtggtgcctttttgcacccaacacatgttttcagaaactttgagaggttctctggaaccacctatgaatgcaaggcagcttatccatcctatgatgagtctactgggattgcattgggtaacatattgaagttccgcaaaaagaattggcagtttgacatcattggcggttttatatacttcattttggtgttttcaatgttcccacagtgtaatcttgttcgtatcttaaatgaagaaacttggtctgggcgtctgaaaagcttctcaggcacaatatggagtgctttgctttatatttttgagcactcttatgtctcttcagtaggaagtcttactttattgacggcgtcatattcattcgtaccatccaaactatcaaggaggagaagagctattataggcggcctccatgttttggcccatttaactgcagcactacttttaatgttgctgctggagttgggcattgaaatttgtattcgtaaccatttattggcaacttcaggttatcacactctgtatgaatggtatcgatccatggaaagtgagcattttccagatcctactggtcttcgtgctcgtttggagcaatggactctgggactgtatccagcatgtataaaatatcttatggcagcctttgacgtccctgaggtcatggctgtgacaagaataaatatatgcaagaacggaatgatgtctctttcgcggagtgttctgatcatgtactacacttctgtgtttatctatttctggattttctcgactccagttgtttctctcatatttggtagttacctatacatctgcatcaattggttccacatacactttgatgaagccttctcgtcgctgcgcatcgcaaactacaaatccttcacaaggttccatgttaagaaggatggtgatctagaaatatttactcttgcagttgacaaggtcccaaaggactggaagttggatccgaggtgggaatcagagggacgagggcctcatcagctcagccatgaccggaagcatccaagcaagtggaggtcagcctcatcaactgaccctgtgagatctgtacgggttgttgatcatttcaccatcgaaagaacaagaaccccagatatggagccctcttcctgattgtgcagcccttactattataaggagttgctactgctgctagaaaaattaacaataactagcttcaacacacagtattgtttttgtttccacatccagccaataggtggaccgaggtgatctgcccttgtcggcgtccccgctttactgacctcacctgcagcattgtaatctgtatagaaagaaaattcacctgctgcctattgcttgtattcaatcaaaggaactctaaaaaaaagagtgttacagaagaatgttttgagaaagcaaagggatgaatcgattcatcatcatttactaaagattgattctat

SEQ ID NO: 67746 - DNA, 3538 bp, Zea Mays
ccgatgcggatgcggatgccgatgccgatgccgaagcgcacctgtctcttctccttgccgaccctccacccccagccgaagtgaggccaccaatcacacagccgctccccccgctcgtcctcctcccctgcccctgcctccgcccccgcccccgcccccgccccgccacgccagcatttggattggattgccggcggccgagtggaggcggagatccatccggactccggtgagtccgttcccgctgccgtgcttgatccaggcacgcatgacatcacatcagttcagctagatgcctgaaggagaagttcagtagcacaccactacctcacaaaacagctcttctgctcgtgcaaaagtatccagggtccagatgggttcagacaagcagattggtagcccacgccaactcttggaaacactaaagatgggcagagttaggactatcctgacacatacatacccgtaccctcacgagcactccaggcatattatgactgcagtgattattgcctgtctcttctttatatcgtctgacaacatgcacacgctcatacataaactggataacaatatcaagtggtggtccatgtatgtttgcctcattggcttcttctatttcttctcatctccttttcttggaaggaccattcagcccagctactcaaattttaaccgctggtatgttgcttggatttgctttgcatccctgtaccatcttcctagcttccagtcaatgggggttgatatgcgcatgaacctctcgcttttcttgacaatatatttctcctcagtgcttttcatcattgcctttcatatcatatttattggtctctggtacattgggttggttgcacgcttggcaggaacgaggccaggcgtatggacaattctccagaactgtacagtaatcagcattgcatgttgtgtgttctacagtcattgtgggaatcttgctgtgcacaagagcaaatcttttgttgaaagatgagatatgttcgtcttggtttgctcctgttggatctgcaagtgactatcctattctggcaaaatgggttatctacggggagtttgcagcggatcctgtgctggcccatcggatgaaatctctcctttgtactcattatgggctacatttgttggcctctatatcgctaactttgttgtggagagatcaactgggtgggctcttacccacccgtcaacagatttggaggatgagaaactgaagaggcatatgaaaccagattttctggacatggtaccttggtattcagggacatcagctgatttattcaagacagcatttgatcttatggtctctgtgactctttttgttgggcgatttgacatgcgcatgatgcaggctgcaatgaaaggaccaacaggcaacactccaaatgatgacctattgtatgaccacttcaatgaaagggaagacctttggtttgactttgttgcagacaccggtgatggagggaattcatcatatacagttgcccgactgttagcccaaccatctattaggactgttatcggtggctctatgcatactcttccacgtgggaacttacttattatcggcggagatcttgcgtacccaaacccttcatcatttacatacgagaggcgcttctttaggccttttgagtatgctctgcaacctccaccttggtacagagatgaacatatagctttggataagcctgagcttcctcctggtgtatcaaagatgactgaatatgatggaccacagtgtttcataattcctggaaatcatgactggtttgatgggcttcatacttttatgagatatatatgtcataaaagctggttaggtggatggtttctgcctcagaagaagagttattttgcattgcatcttcccaagggttggtggatatttggtcttgatttatctctccatggcgatgttgatgtataccaattcaagttctttgctgatgtttgtcagaataaggttggagagaatgattctgtgattgtagtaacacatgagccaaactggcttcttgattggtactggaatgagactacaggcaagaatgtatcacacttaattcaggaatacctgaaaggaagatgtaaacttcgcatggcaggggatttacaccattttatgaggcactctgccactcgatcagaaaagaataattttgtgcaacacttgcttgttaatggatgtggtggtgcctttttgcacccaacacatgttttcagaaactttgagaggttctctggaaccacctatgaatgcaaggcagcttatccatcctatgatgagtctactgggattgcattgggtaacatattgaagttccgcaaaaagaattggcagtttgacatcattggcggttttatatacttcattttggtgttttcaatgttcccacagtgtaatcttgttcgtatcttaaatgaagaaacttggtctgggcgtctgaaaagcttctcaggcacaatatggagtgctttgctttatatttttgagcactcttatgtctcttcagtaggaagtcttactttattgacggcgtcatattcattcgtaccatccaaactatcaaggaggagaagagctattataggcggcctccatgttttggcccatttaactgcagcactacttttaatgttgctgctggagttgggcattgaaatttgtattcgtaaccatttattggcaacttcaggttatcacactctgtatgaatggtatcgatccatggaaagtgagcattttccagatcctactggtcttcgtgctcgtttggagcaatggactctgggactgtatccagcatgtataaaatatcttatggcagcctttgacgtccctgaggtcatggctgtgacaagaataaatatatgcaagaacggaatgatgtctctttcgcggagtgttctgatcatccttctcgtcgctgcgcatcgcaaactacaaatccttcacaaggttccatgttaagaaggatggtgatctagaaatatttactcttgcagttgacaaggtcccaaaggactggaagttggatccgaggtgggaatcagagggacgagggcctcatcagctcagccatgaccggaagcatccaagcaagtggaggtcagcctcatcaactgaccctgtgagatctgtacgggttgttgatcatttcaccatcgaaagaacaagaaccccagatatggagccctcttcctgattgtgcagcccttactattataaggagttgctactgctgctagaaaaattaacaataactagcttcaacacacagtattgtttttgtttccacatccagccaataggtggaccgaggtgatctgcccttgtcggcgtccccgctttactgacctcacctgcagcattgtaatctgtatagaaagaaaattcacctgctgcctattgcttgtattcaatcaaaggaactctaaaaaaaagagtgttacagaagaatgttttgagaaagcaaagggatgaatcgattcatcatcatttactaaagattgattctat

SEQ ID NO: 67747 - DNA, 3804 bp, Zea Mays
ggaagcttttgggatggacggctgagatggatcagagcacaacggaacagcagcagagggatatcctctcctctctcgtgtctcccaccgatgcggatgcggatgccgatgccgatgccgaagcgcacctgtctcttctccttgccgaccctccacccccagccgaagtgaggccaccaatcacacagccgctccccccgctcgtcctcctcccctgcccctgcctccgcccccgcccccgcccccgccccgccacgccagcatttggattggattgccggcggccgagtggaggcggagatccatccggactccgatccaggcacgcatgacatcacatcagttcagctagatgcctgaaggagaagttcagtagcacaccactacctcacaaaacagctcttctgctcgtgcaaaagtatccagggtccagatgggttcagacaagcagattggtagcccacgccaactcttggaaacactaaagatgggcagagttaggactatcctgacacatacatacccgtaccctcacgagcactccaggcatattatgactgcagtgattattgcctgtctcttctttatatcgtctgacaacatgcacacgctcatacataaactggataacaatatcaagtggtggtccatgtatgtttgcctcattggcttcttctatttcttctcatctccttttcttggaaggaccattcagcccagctactcaaattttaaccgctggtatgttgcttggatttgctttgcatccctgtaccatcttcctagcttccagtcaatgggggttgatatgcgcatgaacctctcgcttttcttgacaatatatttctcctcagtgcttttcatcattgcctttcatatcatatttattggtctctggtacattgggttggttgcacgcttggcaggaacgaggccaggcgtatggacaattctccagaactgtacagtaatcagcattgcatgttgtgtgttctacagtcattgtgggaatcttgctgtgcacaagagcaaatcttttggtagtagttctgatcccaatttgcttgcttttcttaaaaatgaaaacgggagtacctggatatcaaattttctccgtatgaatcagttgaaagatgagatatgttcgtcttggtttgctcctgttggatctgcaagtgactatcctattctggcaaaatgggttatctacggggagttagtttgcagcggatcctgtgctggcccatcggatgaaatctctcctttgtactcattatgggctacatttgttggcctctatatcgctaactttgttgtggagagatcaactgggtgggctcttacccacccgtcaacagatttggaggatgagaaactgaagaggcatatgaaaccagattttctggacatggtaccttggtattcagggacatcagctgatttattcaagacagcatttgatcttatggtctctgtgactctttttgttgggcgatttgacatgcgcatgatgcaggctgcaatgaaaggaccaacaggcaacactccaaatgatgacctattgtatgaccacttcaatgaaagggaagacctttggtttgactttgttgcagacaccggtgatggagggaattcatcatatacagttgcccgactgttagcccaaccatctattaggactgttatcggtggctctatgcatactcttccacgtgggaacttacttattatcggcggagatcttgcgtacccaaacccttcatcatttacatacgagaggcgcttctttaggccttttgagtatgctctgcaacctccaccttggtacagagatgaacatatagctttggataagcctgagcttcctcctggtgtatcaaagatgactgaatatgatggaccacagtgtttcataattcctggaaatcatgactggtttgatgggcttcatacttttatgagatatatatgtcataaaagctggttaggtggatggtttctgcctcagaagaagagttattttgcattgcatcttcccaagggttggtggatatttggtcttgatttatctctccatggcgatgttgatgtataccaattcaagttctttgctgatgtttgtcagaataaggttggagagaatgattctgtgattgtagtaacacatgagccaaactggcttcttgattggtactggaatgagactacaggcaagaatgtatcacacttaattcaggaatacctgaaaggaagatgtaaacttcgcatggcaggggatttacaccattttatgaggcactctgccactcgatcagaaaagaataattttgtgcaacacttgcttgttaatggatgtggtggtgcctttttgcacccaacacatgttttcagaaactttgagaggttctctggaaccacctatgaatgcaaggcagcttatccatcctatgatgagtctactgggattgcattgggtaacatattgaagttccgcaaaaagaattggcagtttgacatcattggcggttttatatacttcattttggtgttttcaatgttcccacagtgtaatcttgttcgtatcttaaatgaagaaacttggtctgggcgtctgaaaagcttctcaggcacaatatggagtgctttgctttatatttttgagcactcttatgtctcttcagtaggaagtcttactttattgacggcgtcatattcattcgtaccatccaaactatcaaggaggagaagagctattataggcggcctccatgttttggcccatttaactgcagcactacttttaatgttgctgctggagttgggcattgaaatttgtattcgtaaccatttattggcaacttcaggttatcacactctgtatgaatggtatcgatccatggaaagtgagcattttccagatcctactggtcttcgtgctcgtttggagcaatggactctgggactgtatccagcatgtataaaatatcttatggcagcctttgacgtccctgaggtcatggctgtgacaagaataaatatatgcaagaacggaatgatgtctctttcgcggagtgttctgatcatgtactacacttctgtgtttatctatttctggattttctcgactccagttgtttctctcatatttggtagttacctatacatctgcatcaattggttccacatacactttgatgaagccttctcgtcgctgcgcatcgcaaactacaaatccttcacaaggttccatgttaagaaggatggtgatctagaaatatttactcttgcagttgacaaggtcccaaaggactggaagttggatccgaggtgggaatcagagggacgagggcctcatcagctcagccatgaccggaagcatccaagcaagtggaggtcagcctcatcaactgaccctgtgagatctgtacgggttgttgatcatttcaccatcgaaagaacaagaaccccagatatggagccctcttcctgattgtgcagcccttactattataaggagttgctactgctgctagaaaaattaacaataactagcttcaacacacagtattgtttttgtttccacatccagccaataggtggaccgaggtgatctgcccttgtcggcgtccccgctttactgacctcacctgcagcattgtaatctgtatagaaagaaaattcacctgctgcctattgcttgtattcaatcaaaggaactctaaaaaaaagagtgttacagaagaatgttttgagaaagcaaagggatgaatcgattcatcatcatttactaaagattgattctat

SEQ ID NO: 67748 - DNA, 3999 bp, Zea Mays
attatgcatgatatatattaatatatttgttttataaaactttaactattaaaaaagcgccgaacacggtagtacagaagttggtcgtaggagggacaccggttccaacttccaacatcgccagccagcccagcttggtgatgccgcaatgtcatgtcaccaaccacaaccagcgtcagctcctccacgtacagtacataataagctaacagtccattccgtgcgcagccacaaagctagcttatttcccttcccttcacgcggcaagcggcggccggccttccgccgccatggccaccaccaccgcgcccgtcctcctcgtcttcctcgttgccattgccacgtccgtcgccccctcattccccatcctgacgatggcggcggacgcggacaacggcaccacccacctgagcttcttcatgcacgacatcacgtcgggcgccagcccgaccgcggtgaaggtgatcaaggggcccggcgcggggtccaccccgacggcgccggcgctgggcatgacgttcggcgacaccatggtgatcgacgacccgctgacggaggaggcgtcgcccgcgtccgccgcgctgggccgcatgcagggcttctacatgctggcgtcccagaccggggcggcgcttatggtgtgcgccaacctgctgctcacgtcgggggcccacaacgggagcacgctcgccgtgctgggccgcgacgacaccggccaggacgtccgggagatccccgtcgtcggcggcaccgggacgttccggatggccacgggctacgtgctgtggaagacgccggatgggatcaacggcaccgacgccaccgtccagctggatgtctacgtcaccacggacggcaacggcaccacggacgccggcgacgccgacggcggaggcggatccccgtccgcagggtcagggtcgtcggggtcgtcgggaggctccaagtccacctccggtgccgagagtaggaggaggaggatgaccggcgggtgggtcgtcgccgtagtggttgcggtggttggatccttctgggtttggtgagcaacgacctgttgacgaaggatgggggtgggtgggtggtgtgtgagtggggtggtggtcccacatgctggtgggtgagagtgggtgcatgtgctctgctgcggcatgtcggttgccggcatcattcctatctatctgtattggacttgttctagagcttttgcttttcgcaaaaaaaaagacatgcgggtcattatgttaaagtcagaagagttttctttacaacgacgatctttatgaactgttaaagatatgagacagatatcgagcatcatccatagagagcaggaaaatgatctacatttgatggagcatcctacgagtcaggtcaggcagagctgacgagcaactccgcagcagcagtcttgctcggcgccggcacggacgcgtgcacgtccagttgcagcacggcgtgcactgaggactccaccctggccgtgctccacagcacgtggcccgcggcccggcggagcgcccccgtcccgccgaccacggcgagctccctcaccggctgcgaggtgtcgtcgcggccggccaccacgagcgtgctcccgttgtagggccccgcggcgagcatgagcgtgacggcgaccacgaacaccgggcggctcatggagcccgtcatgtaggtcccctgcgcgcggccgacgggcgcggagccggcggcgaggcccgccgtcaggaggtcgtccaccgccaccgtgtcgccgaagcagttgcccgggtgcatcgacgggttctccgggcccggccgggcccttcaccagccgcaccgccgtctgccccggcccgcccacgatgtcgtgcatgtacaggcgcagccgcacggggcgccggcgggccgacaccgccgacggcgacgccaagagggccagagcgacgccggctactacgagcaggaggctcctgttgcttgcggttgcggcgaccgagctgctgacgcggatggccatgggggcatgcatggacgagcccgataagctgagagcctgagagtgatgcgatctgcaagaggaatcggtgttcaatgcaagtttaagggctcaagtgattccaagggacagagatgggggctagcctgcattaaaaccagtaggacaagggatggccggactcgctctcgctccatccatccatcagtggagtgaagtgaataattcaacaccagcaaaacacacacaagttcgttcgcagcaagtaatggcgagaacgagagagaagctgacgctcctggtggccgcagtcgccgtgggcctcctgctagccggcggcgcgggcgcgggcgtggcgtcggcggcgcgtggccgtgaggggcggcggcgcgtgcacctgcggctgtacatgcacgacgtgatcggcgggccgaaccggacggccatccgcctcatctggggcgtgggcccgccgcacgcgtccatgccggggcgcaccttcggcgacacggtggccatcgacgacctcgtcacggacgggcccggcgtcggcgcagactccaggcccgtcggccgggcgcagggcacctacatgctgagctcgcagcacgaggaggtgatcgtggtcagcatcaccgtcgtcctcaccgcggggccgtacaacggcagcaccctcgtggtggccggccgcgacaggatctacgaccagacgagggagctcgcggtggtcggcggcaccgggggactccgcggggcctccgggtacgtgctgtggacgacggccaaggtgtggtcggaggtgcacatggtgctggagctcgacgtgcacgcgtccgtgccactgcccgacgaggaccacgacgacaacgacgttcttgttcttggcagtagggatgcgtagtaagatagacatggtctgtatctgtccctgtctaccaccgatcccatcaatgaataaataaacaaatataaaaggagcttgaattttagctcagactatatattctcaatgcatgagaaatatattaattacagctttgaagaatctatatctactaattatttagggttttttaaggtggtgccctcgattttggtggtgtgctcagttttacatgcattgagaaccgtctgcagagctaaaattgaagctcattttatatttatttaatcataaatggaatcggaggttctcctagacagagatagatagagaaccacgcatgtctcacgtctactaattaagttactactcatccctgctgccaagaacaaggtcgttgtcgtcgtcgtcgtcgtccggcagtggcagtggcacggacgcgtgcacgtcgatctccagcgccatgtgcacctccgaccacaccttggccgtcctccacagcacgtacccggaggcgccgcggaggtccccggtgccgccgaccaccgcgagctccctcgtctcgtcctgtacgcggtcgcggccggccaccacgatcgtgctgccgttgtatggccccgcggtgagcgcgagcgtgacgtccacgacgagcaccgcccctcccgctgcgagctgagcatgtaggtgccctgcccgcgcgcggccgacgggcgcggagccgatgtctgggccctccgtgaggactgtcgtcgatggccgccgtgtcgccgaaggaccgccccggcatggtcgcgtgcggcgggcccacgccccagaccagctggatcgccgtctgccccggcccccggatcacgtcgtgcatgtacacccgcaggtggacgcgacgccggccgcgcatcgctgctgccgctgccgctgccgctgccgccgccgccgtgtccacggcgacgacgacgaggcacacggctgcgacgagcagcagctgcctgctgcttggtgtgcccatatcttttttgtttggctatgacgtgtggtggtgtgtgattgactggctgatatatgtatcagcataccatgccagacgagcaataatgcacagcacctacctctcaaaggaaactgttgacactgccactgctac

SEQ ID NO: 67749 - DNA, 1530 bp, Zea Mays
ggcctgcccactccgactaatatcctggggccgcgcggctatgggcggagtgaaggaagcagggaagcatcagcagcgccgccgccatcactgctacgctgccggcgctagagccctaaaccctagctagggctaggccatccatggccgcctctccccagactctgtcagctcccccgcccgccgccgcggccgtcccgaacctcggcggcaagcgcaagaggcaacccaagggcaagaagaataagaagaacaaactcgcgcgctccgaccaggatgactccgtccgccgccgccgcaacaagccgagcgccaagttcctcaagctgctccgcaagcgggcccgcgactacaactccgacgacgaggatgaagctggtgacgaccggcagcaggagcacctgccgaatcctcaacgccgcgttgacgaggacgacgacgaggccctctctcactccgagccggaggagggcgaggacgaggacgaagaggagggggcctccagctcggccgtcacgaggttcgagcaaggctgcagggcgttccgcgtcgcctttctcaagatcatggccaagaaactccccgatgatcccctgggtccaatcctgtcagcgcacaagacattggtagccgccaagttagccgaggaggtggaggagcacaagcccaagcgggaggctcggaaggagaagcgcgtgagaaggggcatgtcatacctaaagaccacttggacagcaaagagaaggagctcatcaaggttgcaaccaagggggttgtcaggcttttcaatgcggtgagcaaggcacagaaatctcgaaaagatttgaacccatcaaggactaaagatgccacagttatagcaaaagaaagaaaaaacaccttcctatcagaactggagatgccatctcatcaagataaaaagaggaatacatcttcaaatttctcaaagcacgccgtcaaagatgaagatgaaccagcatgggcacctcttcgtgacacatacatgcttggttctaaattgaaggactgggacaaaatgaaggattcttccgctgtcagtgaggaaaaaaaggttccttcaatcgactcttctgatgaggaatagaaacatagttagtatggagcttgtatcttgttgtccgttgctggtaaaacgtgttgagatgggtgtatgtgtattcagattatcaattccacacctcactcacccttttctggagattttttttggttgcattgcatttgttctaaatctatagtatatatgcatcctttattatactggcattagtgatggatgtgaacaaaacaccagtatttagaactttgtcctttgtgcaattttatccaatgttggtccttgcctaccatcaaactgtactccatttcaaagtcgttccgatttttctaggtgcgtagttttttttgttatgcacgtatcttgatatgtaataaaattaatgtatcaagtctagaaattctaaaatgtgttttatttagaagaggaagtagtaagctgcagaaatctat

SEQ ID NO: 67750 - DNA, 1014 bp, Zea Mays
caggcctgcccactccgactaatatcctggggccgcgcggctatgggcggagtgaaggaagcagggaagcatcagcagcgccgccgccatcactgctacgctgccggcgctagagccctaaaccctagctagggctaggccatccatggccgcctctccccagactctgtcagctcccccggcaagcgcaagaggcaacccaagggcaagaagaataagaagaacaaactcgcgcgctccgaccaggatgactccgtccgccgccgccgcaacaagccgagcgccaagttcctcaagctgctccgcaagcgggcccgcgactacaactccgacgacgaggatgaagctggtgacgaccggcagcaggagcacctgccgaatcctcaacgccgcgttgacgaggacgacgacgaggccctctctcactccgagccggaggagggcgaggacgaggacgaagaggagggggcctccagctcggccgtcacgaggttcgagcaaggctgcagggcgttccgcgtcgcctttctcaagatcatggccaagaaactccccgatgatcccctgggtccaatcctgtcagcgcacaagacattggtagccgccaagttagccgaggaggtggaggagcacaagcccaagcgggaggctcggaaggagaagcgcgtggcagcagagaaggggcatgtcatacctaaagaccacttggacagcaaagagaaggagctcatcaaggttgcaaccaagggggttgtcaggcttttcaatgcggtgagcaaggcacagaaatctcgaaaagatttgaacccatcaaggactaaagatgccacagttatagcaaaagaaagaaaaaacaccttcctatcagaactggagatgccatctcatcaagataaaaagaggaatacatcttcaaatttctcaaagttaaaggaacataccacccactttccacatcgacatatattgattgatgcctgggaaatttttatttcgagttggcatgaatctcaa

SEQ ID NO: 67751 - DNA, 8299 bp, Zea Mays
gctcattgaggataagctgcggttactgatcatctagtcccatgtccaccgccgccgtgctcccgtcgccggcgtcgaccagacacccggccggcggtggcgccctgacggcggaccgcgcagcggcgctactggcgggctgcgcgtccgcaagccgcgccgccgagatccacgccgcggcggtgcgcgccagcgtggaccaggacaaagcagtggccttccggctccagcgcgcgtacgcggcgtccggccgcctggacctagccgtggcgctcctccggcgcacgcccgacccgaccgccgtcttctacacgtccgccatccacgcgcactcctcccggggcctccaccgcgcggcgctggcgctcctctccgagatgctgctgtcccaccacggcctcctccccaccgcgcacaccctctcggcctccctcccggcgtgcggcggcctcgcggtcgggcgcgcgctgcacgggtacgccgtgaagctggcgctctccggcgagccgtacgtggccaccgcgctgctgggcatgtacgcgcgcgccggggaggccgccgcggcgcgcgcgctgttcgacgggatgcggccggacccgcacgtggtgtcggtgacggcgatgctgagctgctacgccaagatgggccagctggacgacgcgcgcggcctgttcgacgcgctgccccgcaaggacctggtctgctggaacgccatgatggacgggtacacgcagcacgggcggcccagcgaggcgctccggctgttccggcagatgctgaggtccggggtggagccagacgaggtgtcggtggtgctggcgctctccgcggtggcgcagctgggcacggcggagtccgggaggtggctccactcgttcgtggcgaacggcggccgccgggcccgggtgcggctcaacgccagggtcggcacggcgctcgtcgacatgtactacaagtgcgggagcctggaggaggccgtggccgtgttccgcgacctcggcggcggcggcgacagggacgtggtggcgtggaacgccatgatcaacgggtacgcgatgcacgggcgcagccgggaggcgctggaggcgttcgggcagctgcgggcgcaggggctctggccgaccgacatcaccttcatcggcgtgctgaacgcctgcagccactccgggctcgtcgacgagggccgcgcgctgttggcggcaatggaggaagagtacggcatcgtgcccaaggtggagcactacggctgcatggtggaccttctgggccgcgccgggcgcgtcgaggaagcgttcgacctggtgcggagcatgaaggcgaagcccgacgcggcgatgtgggcgtcgctcctcggcgcctgccggctgcacaagaacctggcgctggggcagcgcgtcgccgactacctcgtggccaacgggctggccaactccggcacgtacgtgctgctgtcgaacatgtacgcggcggcggggaagtggcgggaggtggggcgggtgcggtcgatgatgagggcgagcggcgtgcagaaggagcccgggtgcagcgccgtggaggtcgggcggcgggtggtggagttcgttgccggggaccggagccacccgcggtcggcggagatctacgccaagctagaggaggtgaacagcatcgcgagggcgcgcgggcacgtgccgcacaccgagctggtgctgcacgacctcgacgacgcggccaaggagagggcgctggcggtgcacagcgagaagctcgcgctggcgttcgggctcattagcacgcctccccggacgggcatcaagatcgtgaagaacctccgcgcgtgcgccgactgccacgccgtgctgaagctggtgtcggaggcgacggggaggaagatcgtgttcagggacaggaacaggttccaccatttcgtcgacgggtcgtgcagctgtggggattactggtgaatgctgctagctcttgtgcacaaagtttgcagaaccaaccaaaaaacaaagaaaaagacattgccatccgtcctaaaattagtaaaaccggaggctttttttttttttgcgctggctggttgcaattgcaaagcagcggcgattaatgcagaccaccaaatgaatggcaagcagggatccctatttattaggccgatggaagcagaagctccagtcagtgagggacgaaagaagtcgcctaattctttcgatcgaattaggcgccttcttcgtcccacgctccgtctttatttgtaatctgaagcttacaggaacatttgagtggatcatggacggattggtaggcctcttgaaagtccgggtggtgaggggcatcaaccttgcctaccgcgacgcaagaggcagcgatccgtatgtcgtcctacgacttggcaagaagaaacttaagacgagcgtgaagaagagatctgtgaaccccatctggcacgaggagctaactctgaccgtcacagatcccagcctagctctgaagctggaggtgttcgacaaggacacgttcagcagggacgacccgatgggggacgcggagatcgacgtggcgccgctggtggaggcggcgaacgcgagcccggaggcgagcctgaggaacggcgccatcatcctgtcggtgcggccgagcgccacgaactgcctcgccgacgagagccacgtgtgctggaggaacggcaagttcgcgcaggacatgatcctccgcctcaggaacgtggagagcggggagattcagctgcagctgcagtgggtcagcatccctcctgctgcagccagcaggtgaaggaaggaagaacaggcgacacgaagcaatcgcattttcacctcttgtgaatgtcggattgtaaacttaatggggtctgggtcagtcagggtagttcatgtgttgcctattaatgtacagttggggacagcatgaaatccaagccaagtcactcaagtgttgtaggatccttcctgttcctgtttgtgtctggtctacaacaaaaatggtgcagtgcagtgcagccgtgcaggggataaaaaggccctccagatccagacaaaaggctggaggagtggtaggataccataccatgtggcacaatggaatgcatgcaatgcaagctgagctgagtatagaacaagcttcgttctcgtcagtgccagtgcacgctgatggggcgggcagttcaggttcagtgctgaatgaattgcaaaagctgcatgatctggcacgggtcgtcgtcgtctcgtcgccggccgccgggggcttctccaccgcaggcgcggcgatatcccaaaccagtggccgttgatccgcgtctcctcttatcctctcccacccaaaattctccacggtcgcaacgcgacaagttcacattatttattccaaacctttctgcctccagccagcagtcagcacagcagcggtagagtacaaatcctcgcctgcccccctgcttcctgcttttcgtcctcatccacccacaggccacagtccactcacaactcccccggaacggcggcggcggcgacggcggagaaacctctcgactacgaggagctgaacgagaacgtcaagagggtgcagtacgcggtgcgcggggagctgtacctccgcgcctccgagctgcagaaggagggcaagaagatcatcttcaccaacgtcggcaacccgcacgccctcggccagaaaccgctcaccttcccgcgccaggtggtggcgctgtgccaggctccgttcctcctcgacgatccccacgtcggcctcatgttcccggcggacgccatcgctagggccaagcactatctcgccatggcgcccggcggtctaggtgcgtacagtgactcccgcggcatcccgggaatcaggaaggaagttgccgacttcatccacaagcgtgatggatatcccagtgatccggaactcatctacctcacagacggtgccagcaaaggtgtgatgcagatcctgaacaccatcattagaaacgagatggacgggatcttggtccctgttcctcagtacccactttattccgccaccatttccctctatggtggttctctggtcccgtactacttggaagaagaggctaactggagcctcgactttgtgaatatccggcaaacagtggcggaggcacggtccaagggaatctctgttcgagcgatggtgatgataaatccaggaaatcccactggccaatgccttagtgaagcgaatataaaggaacttctgcaattttgctaccatgaaaacttagttctgcttgcagatgaagtgtatcaacagaacatttatcaagatgagcggccatttataagcgcaagaaaggttatgttcgacatgggtccgccaataagcagtgagcttcaggttgtttctttccacactgtgtcgaaagggtactggggagagtgcggacaacgtggtggatacttcgaaatgacaaatcttcctcccaagacagtagatgagatctacaaggttgcatcaatagcactgagtccaaacgttcctgggcaaatttttatgggagtaatggttaaccctcctaaacctggagatatctcgtacctgaagttcgctgctgaaagcaagtccatccatgaatctttgaggaggagagcacgcatgatgacagatggtttcaacagttgccgaaacgtcgtgtgcaatttcactgaaggagctatgtactctttcccccaaatacgtctgccaccgagagctattgaggcggcaagaagagccggcaaatcagcggacgtcttctactgcctcaagctcctggaggcgacaggaatctccactgtcccgggctctggttttgggcaaaaggaaggggtgttccaccttcggaccactatccttccagcggaggaagacttccctgccatcatgtcgagcttcaagaagttcaacgactcgttcatggaacagtacgagggctactccaggctgtgagcaggaagagaaacaagagattacagatctgaagaagagattattgattggaagcttattagttattgcggaggtgaaggggcagctggccttcgcggcgcccatggtggccaccagcatggcctactacgccatcccgctcgtctccgtcatgttcgccggccgcctcggcgacctgcagctcgccgccgccacgctcggcaactcctggggcaccgtcaccggcatcgcgctcatgaccgggctgagcggttcgctggagacgctgtgcgggcaagggtacggggccaaggcgtaccggacgatgggcgtgcacctgcaggcgtcgctgctcacctccgcgctggcctccgccgtcgtctccctcctctggatctactcggagccgctgctggtcttcctccgccaggacccggagacgtcgcgcctggccgcggacttcctccgccactccgtcccggcgctgttcgcctacggcttcatccagtgcgcgctccgcttcctgcaggcgcagtccgtggtggcgccgctcgtcgccttctcgctgctcccgctggcggcgcacgtcggcgtcgcgcacgcgctcgtcaacgtgctcggcatgggcttcgccggcgccgccgtggccacgtccgcctcgctctggctgtctttcctcatgctcgcggcgtacgtcatgctgtccgccaggttcagggagacgtggccggggttcacgaccgaggcgttccggcacgtcctgcccggaatgaagctcgccattccgtcagcggtcatggtctgcttcgagtactggtcgttcgagatccttgtgctgtttgcagggctgatgcctgactctcagctcagcacttccatcattgccatgtgccaaaacaccgaagccatatcatacatgatcacctatggcttcgccgctgtcatcagcacaagggtatccaacgagctgggagcccggaacatcgccaacgccaagaaggcgctcaccgtgtcgctgacgctgtccctgatgctgggggtggcgttcctgctgctcctgggcctcggccatgacctctgggtgcgcctcttcaccaccagcgaggtcgtggtcagcgccttcgcctccatgacaccgctgctcatcggctccgtcgtgctggactccacgcagggggtgctctgcggcgtcgccaggggctgtgggtggcagcacctggcggcgtggaccaacctggtggccttctatgtcatcggcttgccgctcgccatcctcttcggattcacgctcggcttccaaaccaaggggctgtggatggggcagatatgcggcctcctctgccagaactgcgtcctctttttcatcaccctgcgaaccaactgggaggagttagacctgaccatgttcaacaaggacaacgattttgtctgctaggaatccagaaagagtttttcttttcttttttgccatgtgctgttgctgaaatgttgaaccatcagcaacaggcttcgacagagctgcctggtatgtttgctcatcagccatcatcaattcatcatcagtgtgtaacattacagattgtacctgtagtaatacaatacacaggaattgaagatgcatgcgtccatcaatccctcaagactctcttcctagctagacagtatccaccactaagagaaacatgtctaattcctaccaaggactggacaccctagctctaggtgatgtgtaacttccaaagacgacgtccttcattcactccagagctcagtggtctcatgtttcttgagaatacagccaccttttttttgctctagactccaaggctccaatttagtaacgtaagtagtagtgcagaataactcaagtaccatgcatatagaacaacccagcacgtgaccccaaccaagctccccagctgtggtttacatcaaacagccaaggactgcacaagccatggctgctttcgggccaacaagatgacgtgaagggactgtctcccatgctccgcgcaaagattagctcgcctgttttgatgctccatatgcgaacagtgcagtcctccccacctgtcaacgaatgaacatgttttctgaaatgaggatttcatgccctcccttgaattaatcttgctaacttcacatatatgaaccaactagcacacagacgattctgtaaatcaaaactcaacctatacaatatgtaattcaacgataatctatactccttggtgcggcatttaggctatcaagtaagaacacaaacaaactattgtgtaagtttttactggtcaataaccacttcaaagagcatcccctagcgctaaatggcaaaagaaaagaacatttatttatttgcatatagccaaatacacagctaaaatgaacaaacctgacataagtaaggtctcagatggatcaacagcaagtggtaaaagtgtgtgtgagttcacatgcccctcgtacgactgtatacctcccttctgaatgaggcgaagatcgaagagtttgatctgtacaacaaaataaaaggtctttgctcttgcatgtcgacttcaaattcttaatcataaagaggtgcaaaagtacatgcggactttgtagacaatgacttcagataagataactaataactggttcacagcaattggttgttgtttgccctctaaataattgatatatccatgccgaatttgttattcgattcgatccatgacattttagttcagtatgtgtctgccattgtaataaagatgaaataaaaacctgtgaaattaaatttatgcatgacattcaagtgtcaactttcgaatctggcacattacatgattacaacagataagtgggaaaagactaaacacaactctaattgaaaatattgttaccacgtcgacgtgtggtgtcagcaaacaattctagttttgaaatccatcaatcctagcagatcctgagcaaagtgtgtgtttgagggtttgccacctaatctagctagagctattttgctcgctagtgatgatttatcattggagtttaacccgggctagaggcatttcaatcttccttgccgctgttgattagagttttctaggtcaggtcgtcgtcaccttgggtaaaggtgttattgttgtatgtgtgtgggtcggtgttgagtctgtgcagatttgtaagggctcttgcccatttttttgtattctaaatataatgataagatgtttgagaaaaaaatcttgctcataacactaaaaaatggtctaagtataacttacagatccatccatggagcttcctaagaagtagttctcatctgatgagagtgaaaccaagctgtgcaacaatgtcactttcagtactagggaacataaacattgtccaaaaa

SEQ ID NO: 67752 - DNA, 8462 bp, Zea Mays
cagaaatcagaatcgaagagatcaattataaaataaaatatgtaaaataatataatactatcgcttttacggcttctgcgctcattgaggataagctgcggttactgatcatctagtcccatgtccaccgccgccgtgctcccgtcgccggcgtcgaccagacacccggccggcggtggcgccctgacggcggaccgcgcagcggcgctactggcgggctgcgcgtccgcaagccgcgccgccgagatccacgccgcggcggtgcgcgccagcgtggaccaggacaaagcagtggccttccggctccagcgcgcgtacgcggcgtccggccgcctggacctagccgtggcgctcctccggcgcacgcccgacccgaccgccgtcttctacacgtccgccatccacgcgcactcctcccggggcctccaccgcgcggcgctggcgctcctctccgagatgctgctgtcccaccacggcctcctccccaccgcgcacaccctctcggcctccctcccggcgtgcggcggcctcgcggtcgggcgcgcgctgcacgggtacgccgtgaagctggcgctctccggcgagccgtacgtggccaccgcgctgctgggcatgtacgcgcgcgccggggaggccgccgcggcgcgcgcgctgttcgacgggatgcggccggacccgcacgtggtgtcggtgacggcgatgctgagctgctacgccaagatgggccagctggacgacgcgcgcggcctgttcgacgcgctgccccgcaaggacctggtctgctggaacgccatgatggacgggtacacgcagcacgggcggcccagcgaggcgctccggctgttccggcagatgctgaggtccggggtggagccagacgaggtgtcggtggtgctggcgctctccgcggtggcgcagctgggcacggcggagtccgggaggtggctccactcgttcgtggcgaacggcggccgccgggcccgggtgcggctcaacgccagggtcggcacggcgctcgtcgacatgtactacaagtgcgggagcctggaggaggccgtggccgtgttccgcgacctcggcggcggcggcgacagggacgtggtggcgtggaacgccatgatcaacgggtacgcgatgcacgggcgcagccgggaggcgctggaggcgttcgggcagctgcgggcgcaggggctctggccgaccgacatcaccttcatcggcgtgctgaacgcctgcagccactccgggctcgtcgacgagggccgcgcgctgttggcggcaatggaggaagagtacggcatcgtgcccaaggtggagcactacggctgcatggtggaccttctgggccgcgccgggcgcgtcgaggaagcgttcgacctggtgcggagcatgaaggcgaagcccgacgcggcgatgtgggcgtcgctcctcggcgcctgccggctgcacaagaacctggcgctggggcagcgcgtcgccgactacctcgtggccaacgggctggccaactccggcacgtacgtgctgctgtcgaacatgtacgcggcggcggggaagtggcgggaggtggggcgggtgcggtcgatgatgagggcgagcggcgtgcagaaggagcccgggtgcagcgccgtggaggtcgggcggcgggtggtggagttcgttgccggggaccggagccacccgcggtcggcggagatctacgccaagctagaggaggtgaacagcatcgcgagggcgcgcgggcacgtgccgcacaccgagctggtgctgcacgacctcgacgacgcggccaaggagagggcgctggcggtgcacagcgagaagctcgcgctggcgttcgggctcattagcacgcctccccggacgggcatcaagatcgtgaagaacctccgcgcgtgcgccgactgccacgccgtgctgaagctggtgtcggaggcgacggggaggaagatcgtgttcagggacaggaacaggttccaccatttcgtcgacgggtcgtgcagctgtggggattactggtgaatgctgctagctcttgtgcacaaagtttgcagaaccaaccaaaaaacaaagaaaaagacattgccatccgtcctaaaattagtaaaaccggaggctttttttttttttgcgctggctggttgcaattgcaaagcagcggcgattaatgcagaccaccaaatgaatggcaagcagggatccctatttattaggccgatggaagcagaagctccagtcagtgagggacgaaagaagtcgcctaattctttcgatcgaattaggcgccttcttcgtcccacgctccgtctttatttgtaatctgaagcttacaggaacatttgagtggatcatggacggattggtaggcctcttgaaagtccgggtggtgaggggcatcaaccttgcctaccgcgacgcaagaggcagcgatccgtatgtcgtcctacgacttggcaagaaggttgtattttttattttttttttgtttttggcactgctgccaatttcattagcgtttgaatgcagaaattaagtgttgtgtcatggttctgcatgcacgcagaaacttaagacgagcgtgaagaagagatctgtgaaccccatctggcacgaggagctaactctgaccgtcacagatcccagcctagctctgaagctggaggtgttcgacaaggacacgttcagcagggacgacccgatgggggacgcggagatcgacgtggcgccgctggtggaggcggcgaacgcgagcccggaggcgagcctgaggaacggcgccatcatcctgtcggtgcggccgagcgccacgaactgcctcgccgacgagagccacgtgtgctggaggaacggcaagttcgcgcaggacatgatcctccgcctcaggaacgtggagagcggggagattcagctgcagctgcagtgggtcagcatccctcctgctgcagccagcaggtgaaggaaggaagaacaggcgacacgaagcaatcgcattttcacctcttgtgaatgtcggattgtaaacttaatggggtctgggtcagtcagggtagttcatgtgttgcctattaatgtacagttggggacagcatgaaatccaagccaagtcactcaagtgttgtaggatccttcctgttcctgtttgtgtctggtctacaacaaaaatggtgcagtgcagtgcagccgtgcaggggataaaaaggccctccagatccagacaaaaggctggaggagtggtaggataccataccatgtggcacaatggaatgcatgcaatgcaagctgagctgagtatagaacaagcttcgttctcgtcagtgccagtgcacgctgatggggcgggcagttcaggttcagtgctgaatgaattgcaaaagctgcatgatctggcacgggtcgtcgtcgtctcgtcgccggccgccgggggcttctccaccgcaggcgcggcgatatcccaaaccagtggccgttgatccgcgtctcctcttatcctctcccacccaaaattctccacggtcgcaacgcgacaagttcacattatttattccaaacctttctgcctccagccagcagtcagcacagcagcggtagagtacaaatcctcgcctgcccccctgcttcctgcttttcgtcctcatccacccacaggccacagtccactcacaactcccccggaacggcggcggcggcgacggcggagaaacctctcgactacgaggagctgaacgagaacgtcaagagggtgcagtacgcggtgcgcggggagctgtacctccgcgcctccgagctgcagaaggagggcaagaagatcatcttcaccaacgtcggcaacccgcacgccctcggccagaaaccgctcaccttcccgcgccaggtggtggcgctgtgccaggctccgttcctcctcgacgatccccacgtcggcctcatgttcccggcggacgccatcgctagggccaagcactatctcgccatggcgcccggcggtctaggtgcgtacagtgactcccgcggcatcccgggaatcaggaaggaagttgccgacttcatccacaagcgtgatggatatcccagtgatccggaactcatctacctcacagacggtgccagcaaaggtgtgatgcagatcctgaacaccatcattagaaacgagatggacgggatcttggtccctgttcctcagtacccactttattccgccaccatttccctctatggtggttctctggtcccgtactacttggaagaagaggctaactggagcctcgactttgtgaatatccggcaaacagtggcggaggcacggtccaagggaatctctgttcgagcgatggtgatgataaatccaggaaatcccactggccaatgccttagtgaagcgaatataaaggaacttctgcaattttgctaccatgaaaacttagttctgcttgcagatgaagtgtatcaacagaacatttatcaagatgagcggccatttataagcgcaagaaaggttatgttcgacatgggtccgccaataagcagtgagcttcaggttgtttctttccacactgtgtcgaaagggtactggggagagtgcggacaacgtggtggatacttcgaaatgacaaatcttcctcccaagacagtagatgagatctacaaggttgcatcaatagcactgagtccaaacgttcctgggcaaatttttatgggagtaatggttaaccctcctaaacctggagatatctcgtacctgaagttcgctgctgaaaggttaaacatgctgcccctcagaagttttagcctgcctccagtttcaacagaaaaaatggacctttgcgagatattcaagtccatccatgaatctttgaggaggagagcacgcatgatgacagatggtttcaacagttgccgaaacgtcgtgtgcaatttcactgaaggagctatgtactctttcccccaaatacgtctgccaccgagagctattgaggcggcaagaagagccggcaaatcagcggacgtcttctactgcctcaagctcctggaggcgacaggaatctccactgtcccgggctctggttttgggcaaaaggaaggggtgttccaccttcggaccactatccttccagcggaggaagacttccctgccatcatgtcgagcttcaagaagttcaacgactcgttcatggaacagtacgagggctactccaggctgtgagcaggaagagaaacaagagattacagatctgaagaagagattattgattggaagcttattagttattgcggaggtgaaggggcagctggccttcgcggcgcccatggtggccaccagcatggcctactacgccatcccgctcgtctccgtcatgttcgccggccgcctcggcgacctgcagctcgccgccgccacgctcggcaactcctggggcaccgtcaccggcatcgcgctcatgaccgggctgagcggttcgctggagacgctgtgcgggcaagggtacggggccaaggcgtaccggacgatgggcgtgcacctgcaggcgtcgctgctcacctccgcgctggcctccgccgtcgtctccctcctctggatctactcggagccgctgctggtcttcctccgccaggacccggagacgtcgcgcctggccgcggacttcctccgccactccgtcccggcgctgttcgcctacggcttcatccagtgcgcgctccgcttcctgcaggcgcagtccgtggtggcgccgctcgtcgccttctcgctgctcccgctggcggcgcacgtcggcgtcgcgcacgcgctcgtcaacgtgctcggcatgggcttcgccggcgccgccgtggccacgtccgcctcgctctggctgtctttcctcatgctcgcggcgtacgtcatgctgtccgccaggttcagggagacgtggccggggttcacgaccgaggcgttccggcacgtcctgcccggaatgaagctcgccattccgtcagcggtcatggtctgcttcgagtactggtcgttcgagatccttgtgctgtttgcagggctgatgcctgactctcagctcagcacttccatcattgccatgtgccaaaacaccgaagccatatcatacatgatcacctatggcttcgccgctgtcatcagcacaagggtatccaacgagctgggagcccggaacatcgccaacgccaagaaggcgctcaccgtgtcgctgacgctgtccctgatgctgggggtggcgttcctgctgctcctgggcctcggccatgacctctggggggtgctctgcggcgtcgccaggggctgtgggtggcagcacctggcggcgtggaccaacctggtggccttctatgtcatcggcttgccgctcgccatcctcttcggattcacgctcggcttccaaaccaaggggctgtggatggggcagatatgcggcctcctctgccagaactgcgtcctctttttcatcaccctgcgaaccaactgggaggagttagacctgaccatgttcaacaaggacaacgattttgtctgctaggaatccagaaagagtttttcttttcttttttgccatgtgctgttgctgaaatgttgaaccatcagcaacaggcttcgacagagctgcctggtatgtttgctcatcagccatcatcaattcatcatcagtgtgtaacattacagattgtacctgtagtaatacaatacacaggaattgaagatgcatgcgtccatcaatccctcaagactctcttcctagctagacagtatccaccactaagagaaacatgtctaattcctaccaaggactggacaccctagctctaggtgatgtgtaacttccaaagacgacgtccttcattcactccagagctcagtggtctcatgtttcttgagaatacagccaccttttttttgctctagactccaaggctccaatttagtaacgtaagtagtagtgcagaataactcaagtaccatgcatatagaacaacccagcacgtgaccccaaccaagctccccagctgtggtttacatcaaacagccaaggactgcacaagccatggctgctttcgggccaacaagatgacgtgaagggactgtctcccatgctccgcgcaaagattagctcgcctgttttgatgctccatatgcgaacagtgcagtcctccccacctgtcaacgaatgaacatgttttctgaaatgaggatttcatgccctcccttgaattaatcttgctaacttcacatatatgaaccaactagcacacagacgattctgtaaatcaaaactcaacctatacaatatgtaattcaacgataatctatactccttggtgcggcatttaggctatcaagtaagaacacaaacaaactattgtgtaagtttttactggtcaataaccacttcaaagagcatcccctagcgctaaatggcaaaagaaaagaacatttatttatttgcatatagccaaatacacagctaaaatgaacaaacctgacataagtaaggtctcagatggatcaacagcaagtggtaaaagtgtgtgtgagttcacatgcccctcgtacgactgtatacctcccttctgaatgaggcgaagatcgaagagtttgatctgtacaacaaaataaaaggtctttgctcttgcatgtcgacttcaaattcttaatcataaagaggtgcaaaagtacatgcggactttgtagacaatgacttcagataagataactaataactggttcacagcaattggttgttgtttgccctctaaataattgatatatccatgccgaatttgttattcgattcgatccatgacattttagttcagtatgtgtctgccattgtaataaagatgaaataaaaacctgtgaaattaaatttatgcatgacattcaagtgtcaactttcgaatctggcacattacatgattacaacagataagtgggaaaagactaaacacaactctaattgaaaatattgttaccacgtcgacgtgtggtgtcagcaaacaattctagttttgaaatccatcaatcctagcagatcctgagcaaagtgtgtgtttgagggtttgccacctaatctagctagagctattttgctcgctagtgatgatttatcattggagtttaacccgggctagaggcatttcaatcttccttgccgctgttgattagagttttctaggtcaggtcgtcgtcaccttgggtaaaggtgttattgttgtatgtgtgtgggtcggtgttgagtctgtgcagatttgtaagggctcttgcccatttttttgtattctaaatataatgataagatgtttgagaaaaaaatcttgctcataacactaaaaaatggtctaagtataacttacagatccatccatggagcttcctaagaagtagttctcatctgatgagagtgaaaccaagctgtgcaacaatgtcactttcagtactagggaacataaacattgtccaaaaa

SEQ ID NO: 67753 - DNA, 1359 bp, Zea Mays
cttcttagagttggattcccactcattttgttgcggattcgcttacatctacaaatctgaatccatccatcccgatcccgaccttgatttcttcgtttttttattggttcttcagttgccaaggccatatccctggtacctgattgactagtcgctgcttattgtcataaagctttttggagggtttgctggttgctgccatgacaagtccacctagggtgagcatggagatcactgatgaggtggtcaagagcatgaagatagggttggtctttcaaggctataatggcagaatttgttctatggactttcacagcaaggctaccaactatctcgtgacagctagcgatgatgaatcaatccgtttatacgatacccaagatgcagtgtgtttgaatactattaatagcaaaaaatatggggttggacttgtgtgcttcactgataacccatctattgtcttatattcatcgaacaatggctgggatgaatctctgcgtctgctctcaatgaatgataaccggtttattagatattataaaggtcaccttgatagggttgtctgcatcgcactttgctctggaaaagaaaactttctctcatgttcgcttgatcgtaccattctcttatgggaccatcgggctgaaaaaccgcagggcttactgcgcgcgcaaaggaggcctacagtttcgtacgacgcccagggcatggtatttgctgtcgcctatggtggccgcataaagatgtttgatattcggaaattcggaatggggccttttgcgaccttctctgtcggcactgatgattcggaagcccatgtcgtacagttcagcggtgatggcaggcggattctgttaaccactaaagctgggcgtgttcatgtgctagattcttttgaaggcaacagcattgcatcgtttcgcgcgaagccaatattaaccaattcgacactggaggcatcgttctgtcccgagggaaaccatatcgtatctggctccggtgatggtagtgtctatgcttggaacgttgagagcggaaaggttgcatgctgggaaagcacagatgtgaaaccgccgcgggtaaggtggtctccaggatccttgatgttcgtgacaggaacgtcggagctgtcctgctgggtgccggatttgtccaagctggagtccttcaccatcagccacaccaacaccaggtccagctcgtccctgtaggcttggaccgatttgcatgccgtgtggccggttgacgcgaaggaggaacaagaaagcatagcggagcatcttgtaccaattgagtttgtgatctgttcctgatggcccggtaagctactattgcaacgattgtggtctgcggcaacgg

SEQ ID NO: 67754 - DNA, 1396 bp, Zea Mays
gcagatgcccgctagtccctcgctttctctcttccacccgctcctcacgccgccacagcgccactgctccttcggcctagttgaggagagatacatccatcctggcctggattggctggtgctggtccttctgctggttcttcagttgccaaggccatatccctggtacctgattgactagtcgctgcttattgtcataaagctttttggagggtttgctggttgctgccatgacaagtccacctagggtgagcatggagatcactgatgaggtggtcaagagcatgaagatagggttggtctttcaaggctataatggcagaatttgttctatggactttcacagcaaggctaccaactatctcgtgacagctagcgatgatgaatcaatccgtttatacgatacccaagatgcagtttttcaggtgtttgaatactattaatagcaaaaaatatggggttggacttgtgtgcttcactgataacccatctattgtcttatattcatcgaacaatggctgggatgaatctctgcgtctgctctcaatgaatgataaccggtttattagatattataaaggtcaccttgatagggttgtctgcatcgcactttgctctggaaaagaaaactttctctcatgttcgcttgatcgtaccattctcttatgggaccatcgggctgaaaaaccgcagggcttactgcgcgcgcaaaggaggcctacagtttcgtacgacgcccagggcatggtatttgctgtcgcctatggtggccgcataaagatgtttgatattcggaaattcggaatggggccttttgcgaccttctctgtcggcactgatgattcggaagcccatgtcgtacagttcagcggtgatggcaggcggattctgttaaccactaaagctgggcgtgttcatgtgctagattcttttgaaggcaacagcattgcatcgtttcgcgcgaagccaatattaaccaattcgacactggaggcatcgttctgtcccgagggaaaccatatcgtatctggctccggtgatggtagtgtctatgcttggaacgttgagagcggaaaggttgcatgctgggaaagcacagatgtgaaaccgccgcgggtaaggtggtctccaggatccttgatgttcgtgacaggaacgtcggagctgtcctgctgggtgccggatttgtccaagctggagtccttcaccatcagccacaccaacaccaggtccagctcgtccctgtaggcttggaccgatttgcatgccgtgtggccggttgacgcgaaggaggaacaagaaagcatagcggagcatcttgtaccaattgagtttgtgatctgttcctgatggcccggtaagctactattgcaacgattgtggtctgcggcaacgg

SEQ ID NO: 67755 - DNA, 1380 bp, Zea Mays
gcagatgcccgctagtccctcgctttctctcttccacccgctcctcacgccgccacagcgccactgctccttcggcctagttgaggagagatacatccatcctggcctggattggctggtgctggtccttctgctgttgccaaggccatatccctggtacctgattgactagtcgctgcttattgtcataaagctttttggagggtttgctggttgctgccatgacaagtccacctagggtgagcatggagatcactgatgaggtggtcaagagcatgaagatagggttggtctttcaaggctataatggcagaatttgttctatggactttcacagcaaggctaccaactatctcgtgacagctagcgatgatgaatcaatccgtttatacgatacccaagatgcagtgtgtttgaatactattaatagcaaaaaatatggggttggacttgtgtgcttcactgataacccatctattgtcttatattcatcgaacaatggctgggatgaatctctgcgtctgctctcaatgaatgataaccggtttattagatattataaaggtcaccttgatagggttgtctgcatcgcactttgctctggaaaagaaaactttctctcatgttcgcttgatcgtaccattctcttatgggaccatcgggctgaaaaaccgcagggcttactgcgcgcgcaaaggaggcctacagtttcgtacgacgcccagggcatggtatttgctgtcgcctatggtggccgcataaagatgtttgatattcggaaattcggaatggggccttttgcgaccttctctgtcggcactgatgattcggaagcccatgtcgtacagttcagcggtgatggcaggcggattctgttaaccactaaagctgggcgtgttcatgtgctagattcttttgaaggcaacagcattgcatcgtttcgcgcgaagccaatattaaccaattcgacactggaggcatcgttctgtcccgagggaaaccatatcgtatctggctccggtgatggtagtgtctatgcttggaacgttgagagcggaaaggttgcatgctgggaaagcacagatgtgaaaccgccgcgggtaaggtggtctccaggatccttgatgttcgtgacaggaacgtcggagctgtcctgctgggtgccggatttgtccaagctggagtccttcaccatcagccacaccaacaccaggtccagctcgtccctgtaggcttggaccgatttgcatgccgtgtggccggttgacgcgaaggaggaacaagaaagcatagcggagcatcttgtaccaattgagtttgtgatctgttcctgatggcccggtaagctactattgcaacgattgtggtctgcggcaacgg

SEQ ID NO: 67756 - DNA, 1108 bp, Zea Mays
gcagatgcccgctagtccctcgctttctctcttccacccgctcctcacgccgccacagcgccactgctccttcggcctagttgaggagagatacatccatcctggcctggattggctggtgctggtccttctgctgaatggcagaatttgttctatggactttcacagcaaggctaccaactatctcgtgacagctagcgatgatgaatcaatccgtttatacgatacccaagatgcagtgtgtttgaatactattaatagcaaaaaatatggggttggacttgtgtgcttcactgataacccatctattgtcttatattcatcgaacaatggctgggatgaatctctgcgtctgctctcaatgaatgataaccggtttattagatattataaaggtcaccttgatagggttgtctgcatcgcactttgctctggaaaagaaaactttctctcatgttcgcttgatcgtaccattctcttatgggaccatcgggctgaaaaaccgcagggcttactgcgcgcgcaaaggaggcctacagtttcgtacgacgcccagggcatgcccatgtcgtacagttcagcggtgatggcaggcggattctgttaaccactaaagctgggcgtgttcatgtgctagattcttttgaaggcaacagcattgcatcgtttcgcgcgaagccaatattaaccaattcgacactggaggcatcgttctgtcccgagggaaaccatatcgtatctggctccggtgatggtagtgtctatgcttggaacgttgagagcggaaaggttgcatgctgggaaagcacagatgtgaaaccgccgcgggtaaggtggtctccaggatccttgatgttcgtgacaggaacgtcggagctgtcctgctgggtgccggatttgtccaagctggagtccttcaccatcagccacaccaacaccaggtccagctcgtccctgtaggcttggaccgatttgcatgccgtgtggccggttgacgcgaaggaggaacaagaaagcatagcggagcatcttgtaccaattgagtttgtgatctgttcctgatggcccggtaagctactattgcaacgattgtggtctgcggcaacgg

SEQ ID NO: 67757 - DNA, 943 bp, Zea Mays
gcagatgcccgctagtccctcgctttctctcttccacccgctcctcacgccgccacagcgccactgctccttcggcctagttgaggagagatacatccatcctggcctggattggctggtgctggtccttctgctgaatggcagaatttgttctatggactttcacagcaaggctaccaactatctcgtgacagctagcgatgatgaatcaatccgtttatacgatacccaagatgcagtggcttactgcgcgcgcaaaggaggcctacagtttcgtacgacgcccagggcatggtatttgctgtcgcctatggtggccgcataaagatgtttgatattcggaaattcggaatggggccttttgcgaccttctctgtcggcactgatgattcggaagcccatgtcgtacagttcagcggtgatggcaggcggattctgttaaccactaaagctgggcgtgttcatgtgctagattcttttgaaggcaacagcattgcatcgtttcgcgcgaagccaatattaaccaattcgacactggaggcatcgttctgtcccgagggaaaccatatcgtatctggctccggtgatggtagtgtctatgcttggaacgttgagagcggaaaggttgcatgctgggaaagcacagatgtgaaaccgccgcgggtaaggtggtctccaggatccttgatgttcgtgacaggaacgtcggagctgtcctgctgggtgccggatttgtccaagctggagtccttcaccatcagccacaccaacaccaggtccagctcgtccctgtaggcttggaccgatttgcatgccgtgtggccggttgacgcgaaggaggaacaagaaagcatagcggagcatcttgtaccaattgagtttgtgatctgttcctgatggcccggtaagctactattgcaacgattgtggtctgcggcaacgg

SEQ ID NO: 67758 - DNA, 1323 bp, Zea Mays
gcagatgcccgctagtccctcgctttctctcttccacccgctcctcacgccgccacagcgccactgctccttcggcctagttgaggagagatacatccatcctggcctggattggctggtgctggtccttctgctggttcttcagttgccaaggccatatccctggtacctgattgactagtcgctgcttattgtcataaagctttttggagggtttgctggttgctgccatgacaagtccacctaggaatggcagaatttgttctatggactttcacagcaaggctaccaactatctcgtgacagctagcgatgatgaatcaatccgtttatacgatacccaagatgcagtgtgtttgaatactattaatagcaaaaaatatggggttggacttgtgtgcttcactgataacccatctattgtcttatattcatcgaacaatggctgggatgaatctctgcgtctgctctcaatgaatgataaccggtttattagatattataaaggtcaccttgatagggttgtctgcatcgcactttgctctggaaaagaaaactttctctcatgttcgcttgatcgtaccattctcttatgggaccatcgggctgaaaaaccgcagggcttactgcgcgcgcaaaggaggcctacagtttcgtacgacgcccagggcatggtatttgctgtcgcctatggtggccgcataaagatgtttgatattcggaaattcggaatggggccttttgcgaccttctctgtcggcactgatgattcggaagcccatgtcgtacagttcagcggtgatggcaggcggattctgttaaccactaaagctgggcgtgttcatgtgctagattcttttgaaggcaacagcattgcatcgtttcgcgcgaagccaatattaaccaattcgacactggaggcatcgttctgtcccgagggaaaccatatcgtatctggctccggtgatggtagtgtctatgcttggaacgttgagagcggaaaggttgcatgctgggaaagcacagatgtgaaaccgccgcgggtaaggtggtctccaggatccttgatgttcgtgacaggaacgtcggagctgtcctgctgggtgccggatttgtccaagctggagtccttcaccatcagccacaccaacaccaggtccagctcgtccctgtaggcttggaccgatttgcatgccgtgtggccggttgacgcgaaggaggaacaagaaagcatagcggagcatcttgtaccaattgagtttgtgatctgttcctgatggcccggtaagctactattgcaacgattgtggtctgcggcaacgg

SEQ ID NO: 67759 - DNA, 1190 bp, Zea Mays
gcagatgcccgctagtccctcgctttctctcttccacccgctcctcacgccgccacagcgccactgctccttcggcctagttgaggagagatacatccatcctggcctggattggctggtgctggtccttctgctgaatggcagaatttgttctatggactttcacagcaaggctaccaactatctcgtgacagctagcgatgatgaatcaatccgtttatacgatacccaagatgcagtcaaaaaatatggggttggacttgtgtgcttcactgataacccatctattgtcttatattcatcgaacaatggctgggatgaatctctgcgtctgctctcaatgaatgataaccggtttattagatattataaaggtcaccttgatagggttgtctgcatcgcactttgctctggaaaagaaaactttctctcatgttcgcttgatcgtaccattctcttatgggaccatcgggctgaaaaaccgcagggcttactgcgcgcgcaaaggaggcctacagtttcgtacgacgcccagggcatggtatttgctgtcgcctatggtggccgcataaagatgtttgatattcggaaattcggaatggggccttttgcgaccttctctgtcggcactgatgattcggaagcccatgtcgtacagttcagcggtgatggcaggcggattctgttaaccactaaagctgggcgtgttcatgtgctagattcttttgaaggcaacagcattgcatcgtttcgcgcgaagccaatattaaccaattcgacactggaggcatcgttctgtcccgagggaaaccatatcgtatctggctccggtgatggtagtgtctatgcttggaacgttgagagcggaaaggttgcatgctgggaaagcacagatgtgaaaccgccgcgggtaaggtggtctccaggatccttgatgttcgtgacaggaacgtcggagctgtcctgctgggtgccggatttgtccaagctggagtccttcaccatcagccacaccaacaccaggtccagctcgtccctgtaggcttggaccgatttgcatgccgtgtggccggttgacgcgaaggaggaacaagaaagcatagcggagcatcttgtaccaattgagtttgtgatctgttcctgatggcccggtaagctactattgcaacgattgtggtctgcggcaacgg

SEQ ID NO: 67760 - DNA, 1210 bp, Zea Mays
gcagatgcccgctagtccctcgctttctctcttccacccgctcctcacgccgccacagcgccactgctccttcggcctagttgaggagagatacatccatcctggcctggattggctggtgctggtccttctgctgaatggcagaatttgttctatggactttcacagcaaggctaccaactatctcgtgacagctagcgatgatgaatcaatccgtttatacgatacccaagatgcaggtgtttgaatactattaatagcaaaaaatatggggttggacttgtgtgcttcactgataacccatctattgtcttatattcatcgaacaatggctgggatgaatctctgcgtctgctctcaatgaatgataaccggtttattagatattataaaggtcaccttgatagggttgtctgcatcgcactttgctctggaaaagaaaactttctctcatgttcgcttgatcgtaccattctcttatgggaccatcgggctgaaaaaccgcagggcttactgcgcgcgcaaaggaggcctacagtttcgtacgacgcccagggcatggtatttgctgtcgcctatggtggccgcataaagatgtttgatattcggaaattcggaatggggccttttgcgaccttctctgtcggcactgatgattcggaagcccatgtcgtacagttcagcggtgatggcaggcggattctgttaaccactaaagctgggcgtgttcatgtgctagattcttttgaaggcaacagcattgcatcgtttcgcgcgaagccaatattaaccaattcgacactggaggcatcgttctgtcccgagggaaaccatatcgtatctggctccggtgatggtagtgtctatgcttggaacgttgagagcggaaaggttgcatgctgggaaagcacagatgtgaaaccgccgcgggtaaggtggtctccaggatccttgatgttcgtgacaggaacgtcggagctgtcctgctgggtgccggatttgtccaagctggagtccttcaccatcagccacaccaacaccaggtccagctcgtccctgtaggcttggaccgatttgcatgccgtgtggccggttgacgcgaaggaggaacaagaaagcatagcggagcatcttgtaccaattgagtttgtgatctgttcctgatggcccggtaagctactattgcaacgattgtggtctgcggcaacgg

SEQ ID NO: 67761 - DNA, 1257 bp, Zea Mays
accaaatagccctcgagaaccctatgctgctgtagccaagcagatgcccgctagtccctcgctttctctcttccacccgctcctcacgccgccacagcgccactgctccttcggcctagttgaggagagatacatccatcctggcctggattggctggtgctggtccttctgctgaatggcagaatttgttctatggactttcacagcaaggctaccaactatctcgtgacagctagcgatgatgaatcaatccgtttatacgatacccaagatgcagtttttcaggtgtttgaatactattaatagcaaaaaatatggggttggacttgtgtgcttcactgataacccatctattgtcttatattcatcgaacaatggctgggatgaatctctgcgtctgctctcaatgaatgataaccggtttattagatattataaaggtcaccttgatagggttgtctgcatcgcactttgctctggaaaagaaaactttctctcatgttcgcttgatcgtaccattctcttatgggaccatcgggctgaaaaaccgcagggcttactgcgcgcgcaaaggaggcctacagtttcgtacgacgcccagggcatggtatttgctgtcgcctatggtggccgcataaagatgtttgatattcggaaattcggaatggggccttttgcgaccttctctgtcggcactgatgattcggaagcccatgtcgtacagttcagcggtgatggcaggcggattctgttaaccactaaagctgggcgtgttcatgtgctagattcttttgaaggcaacagcattgcatcgtttcgcgcgaagccaatattaaccaattcgacactggaggcatcgttctgtcccgagggaaaccatatcgtatctggctccggtgatggtagtgtctatgcttggaacgttgagagcggaaaggttgcatgctgggaaagcacagatgtgaaaccgccgcgggtaaggtggtctccaggatccttgatgttcgtgacaggaacgtcggagctgtcctgctgggtgccggatttgtccaagctggagtccttcaccatcagccacaccaacaccaggtccagctcgtccctgtaggcttggaccgatttgcatgccgtgtggccggttgacgcgaaggaggaacaagaaagcatagcggagcatcttgtaccaattgagtttgtgatctgttcctgatggcccggtaagctactattgcaacgattgtggtctgcggcaacgg

SEQ ID NO: 67762 - DNA, 1467 bp, Zea Mays
caaaatgctagcaaaatttctttggtgttgccaaacttgtgaaggcttgcggggatccaaaccaaatagccctcgagaaccctatgctgctgtagccaagcagatgcccgctagtccctcgctttctctcttccacccgctcctcacgccgccacagcgccactgctccttcggcctagttgaggagagatacatccatcctggcctggattggctggtgctggtccttctgctggttcttcagttgccaaggccatatccctggtacctgattgactagtcgctgcttattgtcataaagctttttggagggtttgctggttgctgccatgacaagtccacctagggtgagcatggagatcactgatgaggtggtcaagagcatgaagatagggttggtctttcaaggctataatggcagaatttgttctatggactttcacagcaaggctaccaactatctcgtgacagctagcgatgatgaatcaatccgtttatacgatacccaagatgcagtcaaaaaatatggggttggacttgtgtgcttcactgataacccatctattgtcttatattcatcgaacaatggctgggatgaatctctgcgtctgctctcaatgaatgataaccggtttattagatattataaaggtcaccttgatagggttgtctgcatcgcactttgctctggaaaagaaaactttctctcatgttcgcttgatcgtaccattctcttatgggaccatcgggctgaaaaaccgcagggcttactgcgcgcgcaaaggaggcctacagtttcgtacgacgcccagggcatggtatttgctgtcgcctatggtggccgcataaagatgtttgatattcggaaattcggaatggggccttttgcgaccttctctgtcggcactgatgattcggaagcccatgtcgtacagttcagcggtgatggcaggcggattctgttaaccactaaagctgggcgtgttcatgtgctagattcttttgaaggcaacagcattgcatcgtttcgcgcgaagccaatattaaccaattcgacactggaggcatcgttctgtcccgagggaaaccatatcgtatctggctccggtgatggtagtgtctatgcttggaacgttgagagcggaaaggttgcatgctgggaaagcacagatgtgaaaccgccgcgggtaaggtggtctccaggatccttgatgttcgtgacaggaacgtcggagctgtcctgctgggtgccggatttgtccaagctggagtccttcaccatcagccacaccaacaccaggtccagctcgtccctgtaggcttggaccgatttgcatgccgtgtggccggttgacgcgaaggaggaacaagaaagcatagcggagcatcttgtaccaattgagtttgtgatctgttcctgatggcccggtaagctactattgcaacgattgtggtctgcggcaacgg

SEQ ID NO: 67763 - DNA, 1567 bp, Zea Mays
caggcaaatggcttccatgcgcaaatgaactggtggacagcttactgatagcattgtacacaccaattttggtagctatcaaaatgctagcaaaatttctttggtgttgccaaacttgtgaaggcttgcggggatccaaaccaaatagccctcgagaaccctatgctgctgtagccaagcagatgcccgctagtccctcgctttctctcttccacccgctcctcacgccgccacagcgccactgctccttcggcctagttgaggagagatacatccatcctggcctggattggctggtgctggtccttctgctggttcttcagttgccaaggccatatccctggtacctgattgactagtcgctgcttattgtcataaagctttttggagggtttgctggttgctgccatgacaagtccacctagggtgagcatggagatcactgatgaggtggtcaagagcatgaagatagggttggtctttcaaggctataatggcagaatttgttctatggactttcacagcaaggctaccaactatctcgtgacagctagcgatgatgaatcaatccgtttatacgatacccaagatgcagtgtgtttgaatactattaatagcaaaaaatatggggttggacttgtgtgcttcactgataacccatctattgtcttatattcatcgaacaatggctgggatgaatctctgcgtctgctctcaatgaatgataaccggtttattagatattataaaggtcaccttgatagggttgtctgcatcgcactttgctctggaaaagaaaactttctctcatgttcgcttgatcgtaccattctcttatgggaccatcgggctgaaaaaccgcagggcttactgcgcgcgcaaaggaggcctacagtttcgtacgacgcccagggcatggtatttgctgtcgcctatggtggccgcataaagatgtttgatattcggaaattcggaatggggccttttgcgaccttctctgtcggcactgatgattcggaagcccatgtcgtacagttcagcggtgatggcaggcggattctgttaaccactaaagctgggcgtgttcatgtgctagattcttttgaaggcaacagcattgcatcgtttcgcgcgaagccaatattaaccaattcgacactggaggcatcgttctgtcccgagggaaaccatatcgtatctggctccggtgatggtagtgtctatgcttggaacgttgagagcggaaaggttgcatgctgggaaagcacagatgtgaaaccgccgcgggtaaggtggtctccaggatccttgatgttcgtgacaggaacgtcggagctgtcctgctgggtgccggatttgtccaagctggagtccttcaccatcagccacaccaacaccaggtccagctcgtccctgtaggcttggaccgatttgcatgccgtgtggccggttgacgcgaaggaggaacaagaaagcatagcggagcatcttgtaccaattgagtttgtgatctgttcctgatggcccggtaagctactattgcaacgattgtggtctgcggcaacgg

SEQ ID NO: 67764 - DNA, 1460 bp, Zea Mays
catttaatgctgctgatttggtagcaccactgcaccagtactctgtccatttgcgcagccaatatttttggcaggcaaatggcttccatgcgcaaatgaactggtggacagcttactgatagcattgtacacaccaattttggtagctatcaaaatgctagcaaaatttctttggtgttgccaaacttgtgaaggcttgcggggatccaaaccaaatagccctcgagaaccctatgctgctgtagccaagcagatgcccgctagtccctcgctttctctcttccacccgctcctcacgccgccacagcgccactgctccttcggcctagttgaggagagatacatccatcctggcctggattggctggtgctggtccttctgctgaatggcagaatttgttctatggactttcacagcaaggctaccaactatctcgtgacagctagcgatgatgaatcaatccgtttatacgatacccaagatgcagtgtgtttgaatactattaatagcaaaaaatatggggttggacttgtgtgcttcactgataacccatctattgtcttatattcatcgaacaatggctgggatgaatctctgcgtctgctctcaatgaatgataaccggtttattagatattataaaggtcaccttgatagggttgtctgcatcgcactttgctctggaaaagaaaactttctctcatgttcgcttgatcgtaccattctcttatgggaccatcgggctgaaaaaccgcagggcttactgcgcgcgcaaaggaggcctacagtttcgtacgacgcccagggcatggtatttgctgtcgcctatggtggccgcataaagatgtttgatattcggaaattcggaatggggccttttgcgaccttctctgtcggcactgatgattcggaagcccatgtcgtacagttcagcggtgatggcaggcggattctgttaaccactaaagctgggcgtgttcatgtgctagattcttttgaaggcaacagcattgcatcgtttcgcgcgaagccaatattaaccaattcgacactggaggcatcgttctgtcccgagggaaaccatatcgtatctggctccggtgatggtagtgtctatgcttggaacgttgagagcggaaaggttgcatgctgggaaagcacagatgtgaaaccgccgcgggtaaggtggtctccaggatccttgatgttcgtgacaggaacgtcggagctgtcctgctgggtgccggatttgtccaagctggagtccttcaccatcagccacaccaacaccaggtccagctcgtccctgtaggcttggaccgatttgcatgccgtgtggccggttgacgcgaaggaggaacaagaaagcatagcggagcatcttgtaccaattgagtttgtgatctgttcctgatggcccggtaagctactattgcaacgattgtggtctgcggcaacgg

SEQ ID NO: 67765 - DNA, 1701 bp, Zea Mays
accaaactagaaaaacaattgcgtggagaaaaggaagggccatgaaaagcacggctcaggaaaaacaacggcggacagcccgcctccaccgccgtggcgccgttcaccccgccccgcgttctctctccctcggcgacggctcgacgaccgccgcgccgccctacgctccagcctccatgtgcttcgcggggcccttcgccgtcgactaacacaccaccaccaccatgtacgaccgccccatctcttcccttcctgctctacgaagcctagcaccaaaccctaactgtttgttttattcggatttgttccaaactacaaatgtggtgtatgtagtattgtgtccactaactttgctctctttttttttccctttttctttttgcaaaaaaacatcgggtgtacatgtgttcacccgtgccgtttactgggtcggcagtcggccggcacctggcccaagggttgagcatggagatcacgaacgagatgcttaagagactgccgagactacgttcttcagttgccaaggccatatccctggtacctgattgactagtcgctgcttattgtcataaagctttttggagggtttgctggttgctgccatgacaagtccacctagggtgagcatggagatcactgatgaggtggtcaagagcatgaagatagggttggtctttcaaggctataatggcagaatttgttctatggactttcacagcaaggctaccaactatctcgtgacagctagcgatgatgaatcaatccgtttatacgatacccaagatgcagtgtgtttgaatactattaatagcaaaaaatatggggttggacttgtgtgcttcactgataacccatctattgtcttatattcatcgaacaatggctgggatgaatctctgcgtctgctctcaatgaatgataaccggtttattagatattataaaggtcaccttgatagggttgtctgcatcgcactttgctctggaaaagaaaactttctctcatgttcgcttgatcgtaccattctcttatgggaccatcgggctgaaaaaccgcagggcttactgcgcgcgcaaaggaggcctacagtttcgtacgacgcccagggcatggggccttttgcgaccttctctgtcggcactgatgattcggaagcccatgtcgtacagttcagcggtgatggcaggcggattctgttaaccactaaagctgggcgtgttcatgtgctagattcttttgaaggcaacagcattgcatcgtttcgcgcgaagccaatattaaccaattcgacactggaggcatcgttctgtcccgagggaaaccatatcgtatctggctccggtgatggtagtgtctatgcttggaacgttgagagcggaaaggttgcatgctgggaaagcacagatgtgaaaccgccgcgggtaaggtggtctccaggatccttgatgttcgtgacaggaacgtcggagctgtcctgctgggtgccggatttgtccaagctggagtccttcaccatcagccacaccaacaccaggtccagctcgtccctgtaggcttggaccgatttgcatgccgtgtggccggttgacgcgaaggaggaacaagaaagcatagcggagcatcttgtaccaattgagtttgtgatctgttcctgatggcccggtaagctactattgcaacgattgtggtctgcggcaacgg

SEQ ID NO: 67766 - DNA, 1380 bp, Zea Mays
accaaactagaaaaacaattgcgtggagaaaaggaagggccatgaaaagcacggctcaggaaaaacaacggcggacagcccgcctccaccgccgtggcgccgttcaccccgccccgcgttctctctccctcggcgacggctcgacgaccgccgcgccgccctacgctccagcctccatgtgcttcgcggggcccttcgccgtcgactaacacaccaccaccaccattcggccggcacctggcccaagggttgagcatggagatcacgaacgagatgcttaagagactgccgagactacaatggcagaatttgttctatggactttcacagcaaggctaccaactatctcgtgacagctagcgatgatgaatcaatccgtttatacgatacccaagatgcagtttttcaggtgtttgaatactattaatagcaaaaaatatggggttggacttgtgtgcttcactgataacccatctattgtcttatattcatcgaacaatggctgggatgaatctctgcgtctgctctcaatgaatgataaccggtttattagatattataaaggtcaccttgatagggttgtctgcatcgcactttgctctggaaaagaaaactttctctcatgttcgcttgatcgtaccattctcttatgggaccatcgggctgaaaaaccgcagggcttactgcgcgcgcaaaggaggcctacagtttcgtacgacgcccagggcatggtatttgctgtcgcctatggtggccgcataaagatgtttgatattcggaaattcggaatggggccttttgcgaccttctctgtcggcactgatgattcggaagcccatgtcgtacagttcagcggtgatggcaggcggattctgttaaccactaaagctgggcgtgttcatgtgctagattcttttgaaggcaacagcattgcatcgtttcgcgcgaagccaatattaaccaattcgacactggaggcatcgttctgtcccgagggaaaccatatcgtatctggctccggtgatggtagtgtctatgcttggaacgttgagagcggaaaggttgcatgctgggaaagcacagatgtgaaaccgccgcgggtaaggtggtctccaggatccttgatgttcgtgacaggaacgtcggagctgtcctgctgggtgccggatttgtccaagctggagtccttcaccatcagccacaccaacaccaggtccagctcgtccctgtaggcttggaccgatttgcatgccgtgtggccggttgacgcgaaggaggaacaagaaagcatagcggagcatcttgtaccaattgagtttgtgatctgttcctgatggcccggtaagctactattgcaacgattgtggtctgcggcaacgg

SEQ ID NO: 67767 - DNA, 1313 bp, Zea Mays
accaaactagaaaaacaattgcgtggagaaaaggaagggccatgaaaagcacggctcaggaaaaacaacggcggacagcccgcctccaccgccgtggcgccgttcaccccgccccgcgttctctctccctcggcgacggctcgacgaccgccgcgccgccctacgctccagcctccatgtgcttcgcggggcccttcgccgtcgactaacacaccaccaccaccattcggccggcacctggcccaagggttgagcatggagatcacgaacgagatgcttaagagactgccgagactacaatggcagaatttgttctatggactttcacagcaaggctaccaactatctcgtgacagctagcgatgatgaatcaatccgtttatacgatacccaagatgcagtgtgtttgaatactattaatagcaaaaaatatggggttggacttgtgtgcttcactgataacccatctattgtcttatattcatcgaacaatggctgggatgaatctctgcgtctgctctcaatgaatgataaccggtttattagatattataaaggtcaccttgatagggttgtctgcatcgcactttgctctggaaaagaaaactttctctcatgttcgcttgatcgtaccattctcttatgggaccatcgggctgaaaaaccgcagggcttactgcgcgcgcaaaggaggcctacagtttcgtacgacgcccagggcatggggccttttgcgaccttctctgtcggcactgatgattcggaagcccatgtcgtacagttcagcggtgatggcaggcggattctgttaaccactaaagctgggcgtgttcatgtgctagattcttttgaaggcaacagcattgcatcgtttcgcgcgaagccaatattaaccaattcgacactggaggcatcgttctgtcccgagggaaaccatatcgtatctggctccggtgatggtagtgtctatgcttggaacgttgagagcggaaaggttgcatgctgggaaagcacagatgtgaaaccgccgcgggtaaggtggtctccaggatccttgatgttcgtgacaggaacgtcggagctgtcctgctgggtgccggatttgtccaagctggagtccttcaccatcagccacaccaacaccaggtccagctcgtccctgtaggcttggaccgatttgcatgccgtgtggccggttgacgcgaaggaggaacaagaaagcatagcggagcatcttgtaccaattgagtttgtgatctgttcctgatggcccggtaagctactattgcaacgattgtggtctgcggcaacgg

SEQ ID NO: 67768 - DNA, 1562 bp, Zea Mays
accaaactagaaaaacaattgcgtggagaaaaggaagggccatgaaaagcacggctcaggaaaaacaacggcggacagcccgcctccaccgccgtggcgccgttcaccccgccccgcgttctctctccctcggcgacggctcgacgaccgccgcgccgccctacgctccagcctccatgtgcttcgcggggcccttcgccgtcgactaacacaccaccaccaccatgtacgaccgccccatctcttcccttcctgctctacgaagcctagcaccaaaccctaactgtttgttttattcggatttgttccaaactacaaatgtggtgtatgtagtattgtgtccactaactttgctctctttttttttccctttttctttttgcaaaaaaacatcgggtgtacatgtgttcacccgtgccgtttactgggtcggcagtcggccggcacctggcccaagggttgagcatggagatcacgaacgagatgcttaagagactgccgagactacaatggcagaatttgttctatggactttcacagcaaggctaccaactatctcgtgacagctagcgatgatgaatcaatccgtttatacgatacccaagatgcagtcaaaaaatatggggttggacttgtgtgcttcactgataacccatctattgtcttatattcatcgaacaatggctgggatgaatctctgcgtctgctctcaatgaatgataaccggtttattagatattataaaggtcaccttgatagggttgtctgcatcgcactttgctctggaaaagaaaactttctctcatgttcgcttgatcgtaccattctcttatgggaccatcgggctgaaaaaccgcagggcttactgcgcgcgcaaaggaggcctacagtttcgtacgacgcccagggcatggtatttgctgtcgcctatggtggccgcataaagatgtttgatattcggaaattcggaatggggccttttgcgaccttctctgtcggcactgatgattcggaagcccatgtcgtacagttcagcggtgatggcaggcggattctgttaaccactaaagctgggcgtgttcatgtgctagattcttttgaaggcaacagcattgcatcgtttcgcgcgaagccaatattaaccaattcgacactggaggcatcgttctgtcccgagggaaaccatatcgtatctggctccggtgatggtagtgtctatgcttggaacgttgagagcggaaaggttgcatgctgggaaagcacagatgtgaaaccgccgcgggtaaggtggtctccaggatccttgatgttcgtgacaggaacgtcggagctgtcctgctgggtgccggatttgtccaagctggagtccttcaccatcagccacaccaacaccaggtccagctcgtccctgtaggcttggaccgatttgcatgccgtgtggccggttgacgcgaaggaggaacaagaaagcatagcggagcatcttgtaccaattgagtttgtgatctgttcctgatggcccggtaagctactattgcaacgattgtggtctgcggcaacgg

SEQ ID NO: 67769 - DNA, 1379 bp, Zea Mays
aaatgcaccaaactagaaaaacaattgcgtggagaaaaggaagggccatgaaaagcacggctcaggaaaaacaacggcggacagcccgcctccaccgccgtggcgccgttcaccccgccccgcgttctctctccctcggcgacggctcgacgaccgccgcgccgccctacgctccagcctccatgtgcttcgcggggcccttcgccgtcgactaacacaccaccaccaccattcggccggcacctggcccaagggttgagcatggagatcacgaacgagatgcttaagagactgccgagactacaatggcagaatttgttctatggactttcacagcaaggctaccaactatctcgtgacagctagcgatgatgaatcaatccgtttatacgatacccaagatgcagtgtgtttgaatactattaatagcaaaaaatatggggttggacttgtgtgcttcactgataacccatctattgtcttatattcatcgaacaatggctgggatgaatctctgcgtctgctctcaatgaatgataaccggtttattagatattataaaggtcaccttgatagggttgtctgcatcgcactttgctctggaaaagaaaactttctctcatgttcgcttgatcgtaccattctcttatgggaccatcgggctgaaaaaccgcagggcttactgcgcgcgcaaaggaggcctacagtttcgtacgacgcccagggcatggtatttgctgtcgcctatggtggccgcataaagatgtttgatattcggaaattcggaatggggccttttgcgaccttctctgtcggcactgatgattcggaagcccatgtcgtacagttcagcggtgatggcaggcggattctgttaaccactaaagctgggcgtgttcatgtgctagattcttttgaaggcaacagcattgcatcgtttcgcgcgaagccaatattaaccaattcgacactggaggcatcgttctgtcccgagggaaaccatatcgtatctggctccggtgatggtagtgtctatgcttggaacgttgagagcggaaaggttgcatgctgggaaagcacagatgtgaaaccgccgcgggtaaggtggtctccaggatccttgatgttcgtgacaggaacgtcggagctgtcctgctgggtgccggatttgtccaagctggagtccttcaccatcagccacaccaacaccaggtccagctcgtccctgtaggcttggaccgatttgcatgccgtgtggccggttgacgcgaaggaggaacaagaaagcatagcggagcatcttgtaccaattgagtttgtgatctgttcctgatggcccggtaagctactattgcaacgattgtggtctgcggcaacgg

SEQ ID NO: 67770 - DNA, 4069 bp, Zea Mays
accttaccagcagcttctgcacagcgtccccagtaaaatgtaccccgaaaacccccacctccgcttcctcctcttcctcgccgtcgcggcagttgccgccggcggggctgcggcgaacaccaccctcaccgcgtccctctccggcaaccagatcaagatcatctggtccggactcccggccccggacggcctcgactacgttgccatctactcgccgccgtcctcccgcgaccgcgacttcctcggctatctcttcctcaacggctccgcctcctggcgcggcggctccggggagctctccctcccgctcctcccgacgctccgcgcgccctaccagttccgtctctttcgctggcccgccaaggagtactcctaccaccacgtcgaccacgaccagaacccgctcccccacggcaagcaccgcgtcgccgtctccgccgacgtctccgtcggcgaccccgcccgccccgagcagctgcacctcgcgtttgcggatgaggtcgacgagatgcgggtcctgttcgtgtgcggcgaccgcggggagagggtcgtcaggtacgggctgcagaaggaggacgacaaggagtggaaggaggtgggcacggatgtgagcacgtacgagcagaggcacatgtgcgattggccggccaacagcagcgtcgcctggagggatccgggattcgtcttcgacggcctcatgaagggattggagcccggaaggaggtacttttacaaggttggtagtgacacaggaggatggagtgagatatacagcttcatttcacgtgacagtgaagccagtgagaccaatgcttttctatttggtgacatgggaacttatgtgccttataacacctacattcgcacacaatctgagagcttgtccactgtaaagtggatccttcgtgatattgaagcccttggagataaacccgcctttatttcacacattggggacatcagctatgctagaggttattcttgggtctgggatcatttcttcagccagatcgagcctattgctgccaatactccataccatgtctgtataggaaatcatgagtatgattggccatcacaaccctggaaaccatggtgggctacatatggaacggacggtggaggcgaatgtggaataccttatagtgtcaagttcagaatgccgggcaattctattctacctacagggaagtgaccagcacaacttcttgaaaacggaccttgagaaggtgaaccgaagtagaacaccgtttgttgtttttcagggccaccgccccatgtacacctcgagcgatgaaaccagggacgcggctttgaaacagcagatgctccagaatctggaaccgctgctggtgacatacaatgtgaccctcgcgctatggggacatgtccacaggtacgagaggttctgcccgatgaagaattcccaatgtgtcaacacttcatcaagcttccagtactctggcgctcctgtgcatcttgtgatcgggatgggcggccaagactggcaacctgtatggcaaccgaggcctgatcacccagacgtccctatctttcctcagcctgagcgttccatgtaccgcggtggcgagtttggatacgccagacttgtggcaacaagggagaagctaacactgacttatgtggggaaccatgatgggcaggtccatgatatggtggagatattttctggcctggtatcccccagtaacagtagtgttgctgaggcggtggatggaaccaaacttggcacaggagtcagcaccgtgcggaaaatttctccgctgtacttggaaatcggaggcagtgtgatgtttgcgctgctcctgggattttcctttgggatacttgtcaggagaaagaaagaagctgcacagtggactcaagtaaagaatgaggaatcgtagtagtgttgccaataccgtgagcctggtgcagtggtggtgatccaaacttgtgtgggtgtaattactggagtagaacctaacaaagtgaaggcatttctgacttcttggggggctccgcgtcctcttggtacaactagtgtattgatagtcttgggaaatgaaggttctgatcgcatatctgttgttgtaatagttcaatgtataagcatgtaataagtgatataatgttcacattgctttggttgacacaagtgtgtaacatgtgctaccacaagtgattctgggcgtcctttgtagttgaaccatatttgttttatgatcctgcttttctgtatcatctgcctgcttttgttagcagatgtacggaatcttctgtacttggagtttatacctaacaacatacttatatatttatattacaaacctgtctgatacagcttcatgagctattggaagctgtggagctctctttttcaaaacagttttatagatgaagctcttcatttacgcttgtacaaaggaatgaagagagcttcatggatgaaactgatgagattttgcaaacgggtcctacacattcgaaatatctaaatgagcggtcaagcatggtttctttggacgatgttgaagacttggatcagaaacgccatccgggacaccgtgaccaggtccggcggcgaagcgagatggtgtcatccaagaaagtgtgcgtggtcggcgctggcgtgtcggggctggcgtgtgcccgcgagctgctccgcgagggccacgacgtgacggtcatggagcagagcggcggcgtcggcgggcagtggctgtacgacccgagggcggacggcggcgacccactcggcgctgccggcgcgcacagcagcatgtacgcctccgtccggctcatcagcccgagggagctcacgggcttctccgacttccccttcttccccagagacgacggcaccggcgactcccggcggtacccggggcacgctgagttcctgaggtacatcagggacttctgcgacgcgttcgggctcatggacgtcgtcaggctcaacaccaaggtcctgcgcgtcggcctggcggcgccgcgtgccgctgatgacggtgacggcatcaagcggtggacggtgagttggtctagacatcgtggctgcgatggcgaggtggtcaccacggaggaggaggtgtttgacgccgtcgtcgtcgccgtcggccagtacacccagccacggctcccaaccatcagaggcatggacaagtggagcaggaggcagctgcactcccactcgtatagggtccccgattccttccacggcgaggtggtggtgatcgtgggcttccgtcatagcggcgtggacatcgcgctggagctctccaagttggcgagggaggtgcacgtcagcgtcaagtccatggaggcgctcactcccgccgtgtccaaggccgtcgccaggcacagcgacctgcacctgcacctccagatcgagtgcttgcgcgaggatgggcaggtaacgttcgccgacggctcgcgtgtcgccgccgactccatcatctactgcaccgggtacgactgctcgttcccgttcctggacacgggaggcctggtgaccgtcgacgacagccgcgtcggcccgctgtacgagcacacgttcccgccggcgctggcgccgtcgctgtccttcgtggggttgccgaggatggtgctggtgccgcggttctacgaggcgcaggcgaggtgggtggcgcaggcgctgtcgggctggcggccgctgccgccgtcggaggagatggcgcgctccgccgaggagtaccaccgcgccagggaggcggccggcgtgcccaggcgcctctcgcacgccctcttcttcgacatggactactgcgacgagttcggggccaagcactgcggcttcccgccggtggaggggtggaagagggacctcctgtcgttgtctctcgcaagcgccagcgacggcgccgtggagagctaccgtgacagctaccatgacagcgacctggttcgggagggattgcgctccgagggctggtggccgtggctcccagatccacaatgaagacgacggcgcagagattcacaactaccgccacgcagcgctgctggctgctgcactactctagcgctgtctcaaagaagatcaaga

SEQ ID NO: 67771 - DNA, 1880 bp, Zea Mays
cgcctcgcctcgcctcggcccaccggacctcgtagccgccctctgtcgtgtttgttccttgctagttctcgtcggcgccgtctctcccacgccgccctctgtcaccagcccaccacctcctgcgccggcgctcctccgagacgcagttcgcctccggaattcgatcacttcgccgccgctctcgcctccgcccccaggccgcgaagtggcgagaagccttcccactgagcaaaggtcctaggttcgatgcagcctctcggcaaaatgcaggctggctaaatacaacaatgatggagaacaggatgactttgaatccaactgatcttgatgattttgacaagagaaaattgccatcacctaggttccaggttgaggttgtcctggtagattacgatggctcgcaaccaccaaaaccagccgctggagcagttgataataaatctgatgccgattcctcggctagcacggctgtgaaagaaaatagtgttgcgcctgcagaatccaacaaggggactggaagcaatgataaagatgaagtattctcggacagtgacgacggggaggatggatcatctaaggaaagaaaggagaggactgctggcgcggtggtcaaggcagtgtaaatgctgctaaaccatctcaaacaagcaacgtggagaaggaggcatcggccgctgctagcagacttgataaagtatagctgtaaccaggaaccagcgaacaaggaaccacgaaggcacctgatgtcacatctctcaaaactgaagtcagcagcaagggcagctccaccgcagctgctgactcttccagcatgagcgaattcaaggcgatcgcagcagatgcctcggtgtttatgttcggagatgaagacgatgattatgaaagtgaatagtgcttctatgtgtgttccgttgtacagtttggttccctctagtccccctctcggcctctcccacccacccaaaaaaaaacacagcagctgagaaagagaagtcgaaagaagttatgcctgtttgattgctaaatatgccacatattggctaaaattgaagaactaacattagatagaaaaagttaggcaaagtgtgtcaagttagacagagaaccaaaagcgtcatcagtctgatattgtacccagatgaaacttgctgtaactcaaccagggctgaaccttgttgataactctcctacttcttaacagaaaggaaatcaaatagagcaatcactgctaagagttgaagtgcgcgtgtacaggagtattctgtacttgaacttgtgcgattcatttcttggcttgtttgtatagctaggaaggatttgatgtcaagaggtgtaacgggaggcagtagaatgaatctggggaaggcaagaggtggtgtgtttactacatgtggtgctctgttgcttcttcacagctggtagtaacacttgaacttgttcattctgtctatggtggcggtggcgagggacgcgtacgaagccgccgacggtgcgcatgcacaggcctcctctgcgtgctgacgagttcaggacgctcgactaccgccggcgttcatcttcgacggccgcgacgtccgggagcacctttgcatgctggtggagcgaggagtgacttgatgggtgagatgaagataaaactagtacaagcaattaaaagaagatgggcccgtgattgacaggatagttgtcctgaggcgagaagacacagctgggcccaccacgaatcttttttggcgacctaacttgcccatcacgaaacctcgcactctctgtgctgtcttgtcctgtccctacccaattactatcaagtttaaacatttcagacatttcagtggatatgaattttaacatcaaataattatatgtgtgcaaaagccgtt

SEQ ID NO: 67772 - DNA, 1811 bp, Zea Mays
cgcctcgcctcgcctcggcccaccggacctcgtagccgccctctgtcgtgtttgttccttgctagttctcgtcggcgccgtctctcccacgccgccctctgtcaccagcccaccacctcctgcgccggcgctcctccgagacgcagttcgcctccggaattcgatcacttcgccgccgctctcgcctccgcccccaggccgcgaagtggcgagaagccttcccactgagcaaaggtcctaggttcgatgcagcctctcggcaaaatgcaggctggctaaatacaacaatgatggagaacaggatgactttgaatccaactgatcttgatgattttgacaaggtgaaggcttctttcatttggatttaacccgtatcggcttctactacttctacagtgttttgtctttatggattgcagctgcagcagttcgaacaactgatttgtttacatgttcttttggggacttgagactaaattacattataattttgtccagagaaaattgccatcacctaggttccaggttgaggttgtcctggtagattacgatggctcgcaaccaccaaaaccagccgctggagcagttgataataaatctgatgccgattcctcggctagcacggctgtgaaagaaaatagtgttgcgcctgcagaatccaacaaggggactggaagcaatgataaagatgaagtattctcggacagtgacgacggggaggatggatcatctaaggaaagaaaggagaggactgctggcgcggtggtcaaggcagtgtaaatgctgctaaaccatctcaaacaagcaacgtggagaaggaggcatcggccgctgctagcagacttgataaagtatagctgtaaccaggaaccagcgaacaaggaaccacgaaggcacctgatgtcacatctctcaaaactgaagtcagcagcaagggcagctccaccgcagctgctgactcttccagcatgagcgaattcaaggcgatcgcagcagatgcctcggtgtttatgttcggagatgaagacgatgattatgaaagtgaatagtgcttctatgtgtgttccgttgtacagtttggttccctctagtccccctctcggcctctcccacccacccaaaaaaaaacacagcagctgagaaagagaagtcgaaagaagttatgcctgtttgattgctaaatatgccacatattggctaaaattgaagaactaacattagatagaaaaagttaggcaaagtgtgtcaagttagacagagaaccaaaagcgtcatcagtctgatattgtacccagatgaaacttgctgtaactcaaccagggctgaaccttgttgataactctcctacttcttaacagaaaggaaatcaaatagagcaatcactgctaagagttgaagtgcgcgtgtacaggagtattctgtacttgaacttgtgcgattcatttcttggcttgtttgtatagctaggaaggatttgatgtcaagaggtgtaacgggaggcagtagaatgaatctggggaaggcaagaggtggtgtgtttactacatgtggtgctctgttgcttcttcacagctggtagtaacacttgaacttgttcattctgtctatggtggcggtggcgagggacgcgtacgaagccgccgacggtgcgcatgcacaggcctcctctgcgtgctgacgagttcaggacgctcgactaccgccggcgttcatcttcgacggccgcgacgtccgggagcacctttgcatgctgtgacatgctgctcagcaatctgactgtcgtggatgccaactggacgtgtgacacggag

SEQ ID NO: 67773 - DNA, 1851 bp, Zea Mays
cgcctcgcctcgcctcggcccaccggacctcgtagccgccctctgtcgtgtttgttccttgctagttctcgtcggcgccgtctctcccacgccgccctctgtcaccagcccaccacctcctgcgccggcgctcctccgagacgcagttcgcctccggaattcgatcacttcgccgccgctctcgcctccgcccccagctggctaaatacaacaatgatggagaacaggatgactttgaatccaactgatcttgatgattttgacaagagaaaattgccatcacctaggttccaggttgaggttgtcctggtagattacgatggctcgcaaccaccaaaaccagccgctggagcagttgataataaatctgatgccgattcctcggctagcacggctgtgaaagaaaatagtgttgcgcctgcagaatccaacaaggggactggaagcaatgataaagatgaagtattctcggacagtgacgacggggaggatggatcatctaaggaaagaaaggagaggactgctggcgcggtggtcaaggcagtgtaaatgctgctaaaccatctcaaacaagcaacgtggagaaggaggcatcggccgctgctagcagacttgataaagtatagctgtaaccaggaaccagcgaacaaggaaccacgaaggcacctgatgtcacatctctcaaaactgaagtcagcagcaagggcagctccaccgcagctgctgactcttccagcatgagcgaattcaaggcgatcgcagcagatgcctcggtgtttatgttcggagatgaagacgatgattatgaaagtgaatagtgcttctatgtgtgttccgttgtacagtttggttccctctagtccccctctcggcctctcccacccacccaaaaaaaaacacagcagctgagaaagagaagtcgaaagaagttatgcctgtttgattgctaaatatgccacatattggctaaaattgaagaactaacattagatagaaaaagttaggcaaagtgtgtcaagttagacagagaaccaaaagcgtcatcagtctgatattgtacccagatgaaacttgctgtaactcaaccagggctgaaccttgttgataactctcctacttcttaacagaaaggaaatcaaatagagcaatcactgctaagagttgaagtgcgcgtgtacaggagtattctgtacttgaacttgtgcgattcatttcttggcttgtttgtatagctaggaaggatttgatgtcaagaggtgtaacgggaggcagtagaatgaatctggggaaggcaagaggtggtgtgtttactacatgtggtgctctgttgcttcttcacagctggtagtaacacttgaacttgttcattctgtctatggtggcggtggcgagggacgcgtacgaagccgccgacggtgcgcatgcacaggcctcctctgcgtgctgacgagttcaggacgctcgactaccgccggcgttcatcttcgacggccgcgacgtccgggagcacctttgcatgctgcggtacccgtcctccaggtggtccacgtcgctcttggtcatgaaggcgaaccgcggctgccgcgcccgcttctgccccgccgacgacgacttcgtcatcgtcgtcttccccgccgccggtggcttgctcctgcatgcaaacaagcaaacaagcccacaatgatatgggccgggcttaattaatctggcaagggaaggaaggacgactgagatggagacgaaggctactgagcacaggcacttacgctgcttcggtggtggctgcggccgccggcgccccgtcgtcgtcgtcggtggagctggacctggacgacacggcggccggcgccg

SEQ ID NO: 67774 - DNA, 1844 bp, Zea Mays
cgcctcgcctcgcctcggcccaccggacctcgtagccgccctctgtcgtgtttgttccttgctagttctcgtcggcgccgtctctcccacgccgccctctgtcaccagcccaccacctcctgcgccggcgctcctccgagacgcagttcgcctccggaattcgatcacttcgccgccgctctcgcctccgcccccaggccgcgaagtggcgagaagccttcccactgagcaaaggtcctaggttcgatgcagcctctcggcaaaatgcaggctggctaaatacaacaatgatggagaacaggatgactttgaatccaactgatcttgatgattttgacaagctgcagcagttcgaacaactgatttgtttacatgttcttttggggacttgagactaaattacattataattttgtccagagaaaattgccatcacctaggttccaggttgaggttgtcctggtagattacgatggctcgcaaccaccaaaaccagccgctggagcagttgataataaatctgatgccgattcctcggctagcacggctgtgaaagaaaatagtgttgcgcctgcagaatccaacaaggggactggaagcaatgataaagatgaagtattctcggacagtgacgacggggaggatggatcatctaaggaaagaaaggagaggactgctggcgcggtggtcaaggcagtgtaaatgctgctaaaccatctcaaacaagcaacgtggagaaggaggcatcggccgctgctagcagacttgataaagtatagctgtaaccaggaaccagcgaacaaggaaccacgaaggcacctgatgtcacatctctcaaaactgaagtcagcagcaagggcagctccaccgcagctgctgactcttccagcatgagcgaattcaaggcgatcgcagcagatgcctcggtgtttatgttcggagatgaagacgatgattatgaaagtgaatagtgcttctatgtgtgttccgttgtacagtttggttccctctagtccccctctcggcctctcccacccacccaaaaaaaaacacagcagctgagaaagagaagtcgaaagaagttatgcctgtttgattgctaaatatgccacatattggctaaaattgaagaactaacattagatagaaaaagttaggcaaagtgtgtcaagttagacagagaaccaaaagcgtcatcagtctgatattgtacccagatgaaacttgctgtaactcaaccagggctgaaccttgttgataactctcctacttcttaacagaaaggaaatcaaatagagcaatcactgctaagagttgaagtgcgcgtgtacaggagtattctgtacttgaacttgtgcgattcatttcttggcttgtttgtatagctaggaaggatttgatgtcaagaggtgtaacgggaggcagtagaatgaatctggggaaggcaagaggtggtgtgtttactacatgtggtgctctgttgcttcttcacagctggtagtaacacttgaacttgttcattctgtctatggtggcggtggcgagggacgcgtacgaagccgccgacggtgcgcatgcacaggcctcctctgcgtgctgacgagttcaggacgctcgactaccgccggcgttcatcttcgacggccgcgacgtccgggagcacctttgcatgctggatatgggccgggcttaattaatctggcaagggaaggaaggacgactgagatggagacgaaggctactgagcacaggcacttacgctgcttcggtggtggctgcggccgccggcgccccgtcgtcgtcgtcggtggagctggacctggacgacacggcggccggcgccg

SEQ ID NO: 67775 - DNA, 2988 bp, Zea Mays
cgcctcgcctcgcctcggcccaccggacctcgtagccgccctctgtcgtgtttgttccttgctagttctcgtcggcgccgtctctcccacgccgccctctgtcaccagcccaccacctcctgcgccggcgctcctccgagacgcagttcgcctccggaattcgatcacttcgccgccgctctcgcctccgcccccaggccgcgaagtggcgagaagccttcccactgagcaaaggtcctaggttcgatgcagcctctcggcaaaatgcaggcagctggctaaatacaacaatgatggagaacaggatgactttgaatccaactgatcttgatgattttgacaaggtgaaggcttctttcatttggatttaacccgtatcggcttctactacttctacagtgttttgtctttatggattgcagctgcagcagttcgaacaactgatttgtttacatgttcttttggggacttgagactaaattacattataattttgtccagagaaaattgccatcacctaggttccaggttgaggttgtcctggtagattacgatggctcgcaaccaccaaaaccagccgctggagcagttgataataaatctgatgccgattcctcggctagcacggctgtgaaagaaaatagtgttgcgcctgcagaatccaacaaggggactggaagcaatgataaagatgaagtattctcggacagtgacgacggggaggatggatcatctaaggaaagaaaggagaggactgctggcgcggtggtcaaggcagtgtaaatgctgctaaaccatctcaaacaagcaacgtggagaaggaggcatcggccgctgctagcagacttgataaagtatagctgtaaccaggaaccagcgaacaaggaaccacgaaggcacctgatgtcacatctctcaaaactgaagtcagcagcaagggcagctccaccgcagctgctgactcttccagcatgagcgaattcaaggcgatcgcagcagatgcctcggtgtttatgttcggagatgaagacgatgattatgaaagtgaatagtgcttctatgtgtgttccgttgtacagtttggttccctctagtccccctctcggcctctcccacccacccaaaaaaaaacacagcagctgagaaagagaagtcgaaagaagttatgcctgtttgattgctaaatatgccacatattggctaaaattgaagaactaacattagatagaaaaagttaggcaaagtgtgtcaagttagacagagaaccaaaagcgtcatcagtctgatattgtacccagatgaaacttgctgtaactcaaccagggctgaaccttgttgataactctcctacttcttaacagaaaggaaatcaaatagagcaatcactgctaagagttgaagtgcgcgtgtacaggagtattctgtacttgaacttgtgcgattcatttcttggcttgtttgtatagctaggaaggatttgatgtcaagaggtgtaacgggaggcagtagaatgaatctggggaaggcaagaggtggtgtgtttactacatgtggtgctctgttgcttcttcacagctggtagtaacacttgaacttgttcattctgtctatggtggcggtggcgagggacgcgtacgaagccgccgacggtgcgcatgcacaggcctcctctgcgtgctgacgagttcaggacgctcgactaccgccggcgttcatcttcgacggccgcgacgtccgggagcacctttgcatgctggtaagtgcttgccgattgctattatttgcttgacagttggtaccgtagctatatatataattaatatgtatgtatatgcatatgttacaatcaattcttcctgtctctgtccaattaatcagaaatcaaataaactgatgggcagctccatcgtatgcttcatcattgtactaattagctagccgagtaattaatcaactacccgtgcctcatcgccggcggcaccatgtcgtcaagaagtcccttgtcgacggcggccggagcagcgctactgctagcaggtggcaacgatgacgacgacgtcattgacacggaagccactggcggcgccgccagagcagtagtaggcggcggcaacaacgacgtcgttggcacggaagccactggcatcgacatcgccgcctgcagctcctgctggccgttgtcgagagcgttgtgccgaggcgcgagtgtcgtcgtcgtcgggaggaggggcggcaggtggtggtcgttgacgcagctggcggtgccgctgtaggggttgctgtggtagtggtggtgcgcggaggaggcagcagagaattcgacgaacggcaggtggtggcggccgtcggcggcgtggttggcgcgcgggaagcaggcgacggcggtgtggtggcagtgctggccctcgtaggtggtgatgacgacggaggggtcgtcggaggagcgctccacgcgcttcttcaccgtgcacttgctgttggtgcagcggtagtagctcctgctacgtacactcatccgtgactcgatgattctagagctagctagctagcttgaggggtttaattttcagagctagttccagatgccatgcgtgcagtagccagtaggtacctggggaaggggctgttcttgacggccttctgcccgtacttcctccagcggtacccgtcctccaggtggtccacgtcgctcttggtcatgaaggcgaaccgcggctgccgcgcccgcttctgccccgccgacgacgacttcgtcatcgtcgtcttccccgccgccggtggcttgctcctgcatgcaaacaagcaaacaagcccacaatgatatgggccgggcttaattaatctggcaagggaaggaaggacgactgagatggagacgaaggctactgagcacaggcacttacgctgcttcggtggtggctgcggccgccggcgccccgtcgtcgtcgtcggtggagctggacctggacgacacggcggccggcgccg

SEQ ID NO: 67776 - DNA, 1765 bp, Zea Mays
cgcctcgcctcgcctcggcccaccggacctcgtagccgccctctgtcgtgtttgttccttgctagttctcgtcggcgccgtctctcccacgccgccctctgtcaccagcccaccacctcctgcgccggcgctcctccgagacgcagttcgcctccggaattcgatcacttcgccgccgctctcgcctccgcccccaggccgcgaagtggcgagaagccttcccactgagcaaaggtcctaggttcgatgcagcctctcggcaaaatgcaggctggctaaatacaacaatgatggagaacaggatgactttgaatccaactgatcttgatgattttgacaagagaaaattgccatcacctaggttccaggttgaggttgtcctggtagattacgatggctcgcaaccaccaaaaccagccgctggagcagttgataataaatctgatgccgattcctcggctagcacggctgtgaaagaaaatagtgttgcgcctgcagaatccaacaaggggactggaagcaatgataaagatgaagtattctcggacagtgacgacggggaggatggatcatctaaggaaagaaaggagaggactgctggcgcggtggtcaaggcagtgtaaatgctgctaaaccatctcaaacaagcaacgtggagaaggaggcatcggccgctgctagcagacttgataaagtatagctgtaaccaggaaccagcgaacaaggaaccacgaaggcacctgatgtcacatctctcaaaactgaagtcagcagcaagggcagctccaccgcagctgctgactcttccagcatgagcgaattcaaggcgatcgcagcagatgcctcggtgtttatgttcggagatgaagacgatgattatgaaagtgaatagtgcttctatgtgtgttccgttgtacagtttggttccctctagtccccctctcggcctctcccacccacccaaaaaaaaacacagcagctgagaaagagaagtcgaaagaagttatgcctgtttgattgctaaatatgccacatattggctaaaattgaagaactaacattagatagaaaaagttaggcaaagtgtgtcaagttagacagagaaccaaaagcgtcatcagtctgatattgtacccagatgaaacttgctgtaactcaaccagggctgaaccttgttgataactctcctacttcttaacagaaaggaaatcaaatagagcaatcactgctaagagttgaagtgcgcgtgtacaggagtattctgtacttgaacttgtgcgattcatttcttggcttgtttgtatagctaggaaggatttgatgtcaagaggtgtaacgggaggcagtagaatgaatctggggaaggcaagaggtggtgtgtttactacatgtggtgctctgttgcttcttcacagctggtagtaacacttgaacttgttcattctgtctatggtggcggtggcgagggacgcgtacgaagccgccgacggtgcgcatgcacaggcctcctctgcgtgctgacgagttcaggacgctcgactaccgccggcgttcatcttcgacggccgcgacgtccgggagcacctttgcatgctggatatgggccgggcttaattaatctggcaagggaaggaaggacgactgagatggagacgaaggctactgagcacaggcacttacgctgcttcggtggtggctgcggccgccggcgccccgtcgtcgtcgtcggtggagctggacctggacgacacggcggccggcgccg

SEQ ID NO: 67777 - DNA, 1930 bp, Zea Mays
cgcctcgcctcgcctcggcccaccggacctcgtagccgccctctgtcgtgtttgttccttgctagttctcgtcggcgccgtctctcccacgccgccctctgtcaccagcccaccacctcctgcgccggcgctcctccgagacgcagttcgcctccggaattcgatcacttcgccgccgctctcgcctccgcccccagggcaggccgcgaagtggcgagaagccttcccactgagcaaaggtcctaggttcgatgcagcctctcggcaaaatgcaggctggctaaatacaacaatgatggagaacaggatgactttgaatccaactgatcttgatgattttgacaagagaaaattgccatcacctaggttccaggttgaggttgtcctggtagattacgatggctcgcaaccaccaaaaccagccgctggagcagttgataataaatctgatgccgattcctcggctagcacggctgtgaaagaaaatagtgttgcgcctgcagaatccaacaaggggactggaagcaatgataaagatgaagtattctcggacagtgacgacggggaggatggatcatctaaggaaagaaaggagaggactgctggcgcggtggtcaaggcagtgtaaatgctgctaaaccatctcaaacaagcaacgtggagaaggaggcatcggccgctgctagcagacttgataaagtatagctgtaaccaggaaccagcgaacaaggaaccacgaaggcacctgatgtcacatctctcaaaactgaagtcagcagcaagggcagctccaccgcagctgctgactcttccagcatgagcgaattcaaggcgatcgcagcagatgcctcggtgtttatgttcggagatgaagacgatgattatgaaagtgaatagtgcttctatgtgtgttccgttgtacagtttggttccctctagtccccctctcggcctctcccacccacccaaaaaaaaacacagcagctgagaaagagaagtcgaaagaagttatgcctgtttgattgctaaatatgccacatattggctaaaattgaagaactaacattagatagaaaaagttaggcaaagtgtgtcaagttagacagagaaccaaaagcgtcatcagtctgatattgtacccagatgaaacttgctgtaactcaaccagggctgaaccttgttgataactctcctacttcttaacagaaaggaaatcaaatagagcaatcactgctaagagttgaagtgcgcgtgtacaggagtattctgtacttgaacttgtgcgattcatttcttggcttgtttgtatagctaggaaggatttgatgtcaagaggtgtaacgggaggcagtagaatgaatctggggaaggcaagaggtggtgtgtttactacatgtggtgctctgttgcttcttcacagctggtagtaacacttgaacttgttcattctgtctatggtggcggtggcgagggacgcgtacgaagccgccgacggtgcgcatgcacaggcctcctctgcgtgctgacgagttcaggacgctcgactaccgccggcgttcatcttcgacggccgcgacgtccgggagcacctttgcatgctgcggtacccgtcctccaggtggtccacgtcgctcttggtcatgaaggcgaaccgcggctgccgcgcccgcttctgccccgccgacgacgacttcgtcatcgtcgtcttccccgccgccggtggcttgctcctgcatgcaaacaagcaaacaagcccacaatgatatgggccgggcttaattaatctggcaagggaaggaaggacgactgagatggagacgaaggctactgagcacaggcacttacgctgcttcggtggtggctgcggccgccggcgccccgtcgtcgtcgtcggtggagctggacctggacgacacggcggccggcgccg

SEQ ID NO: 67778 - DNA, 2785 bp, Zea Mays
cgcctcgcctcgcctcggcccaccggacctcgtagccgccctctgtcgtgtttgttccttgctagttctcgtcggcgccgtctctcccacgccgccctctgtcaccagcccaccacctcctgcgccggcgctcctccgagacgcagttcgcctccggaattcgatcacttcgccgccgctctcgcctccgcccccaggccgcgaagtggcgagaagccttcccactgagcaaaggtcctaggttcgatgcagcctctcggcaaaatgcaggctggctaaatacaacaatgatggagaacaggatgactttgaatccaactgatcttgatgattttgacaagctgcagcagttcgaacaactgatttgtttacatgttcttttggggacttgagactaaattacattataattttgtccagagaaaattgccatcacctaggttccaggttgaggttgtcctggtagattacgatggctcgcaaccaccaaaaccagccgctggagcagttgataataaatctgatgccgattcctcggctagcacggctgtgaaagaaaatagtgttgcgcctgcagaatccaacaaggggactggaagcaatgataaagatgaagtattctcggacagtgacgacggggaggatggatcatctaaggaaagaaaggagaggactgctggcgcggtggtcaaggcagtgtaaatgctgctaaaccatctcaaacaagcaacgtggagaaggaggcatcggccgctgctagcagacttgataaagtatagctgtaaccaggaaccagcgaacaaggaaccacgaaggcacctgatgtcacatctctcaaaactgaagtcagcagcaagggcagctccaccgcagctgctgactcttccagcatgagcgaattcaaggcgatcgcagcagatgcctcggtgtttatgttcggagatgaagacgatgattatgaaagtgaatagtgcttctatgtgtgttccgttgtacagtttggttccctctagtccccctctcggcctctcccacccacccaaaaaaaaacacagcagctgagaaagagaagtcgaaagaagttatgcctgtttgattgctaaatatgccacatattggctaaaattgaagaactaacattagatagaaaaagttaggcaaagtgtgtcaagttagacagagaaccaaaagcgtcatcagtctgatattgtacccagatgaaacttgctgtaactcaaccagggctgaaccttgttgataactctcctacttcttaacagaaaggaaatcaaatagagcaatcactgctaagagttgaagtgcgcgtgtacaggagtattctgtacttgaacttgtgcgattcatttcttggcttgtttgtatagctaggaaggatttgatgtcaagaggtgtaacgggaggcagtagaatgaatctggggaaggcaagaggtggtgtgtttactacatgtggtgctctgttgcttcttcacagctggtagtaacacttgaacttgttcattctgtctatggtggcggtggcgagggacgcgtacgaagccgccgacggtgcgcatgcacaggcctcctctgcgtgctgacgagttcaggacgctcgactaccgccggcgttcatcttcgacggccgcgacgtccgggagcacctttgcatgctgaaatcaaataaactgatgggcagctccatcgtatgcttcatcattgtactaattagctagccgagtaattaatcaactacccgtgcctcatcgccggcggcaccatgtcgtcaagaagtcccttgtcgacggcggccggagcagcgctactgctagcaggtggcaacgatgacgacgacgtcattgacacggaagccactggcggcgccgccagagcagtagtaggcggcggcaacaacgacgtcgttggcacggaagccactggcatcgacatcgccgcctgcagctcctgctggccgttgtcgagagcgttgtgccgaggcgcgagtgtcgtcgtcgtcgggaggaggggcggcaggtggtggtcgttgacgcagctggcggtgccgctgtaggggttgctgtggtagtggtggtgcgcggaggaggcagcagagaattcgacgaacggcaggtggtggcggccgtcggcggcgtggttggcgcgcgggaagcaggcgacggcggtgtggtggcagtgctggccctcgtaggtggtgatgacgacggaggggtcgtcggaggagcgctccacgcgcttcttcaccgtgcacttgctgttggtgcagcggtagtagctcctgctacgtacactcatccgtgactcgatgattctagagctagctagctagcttgaggggtttaattttcagagctagttccagatgccatgcgtgcagtagccagtaggtacctggggaaggggctgttcttgacggccttctgcccgtacttcctccagcggtacccgtcctccaggtggtccacgtcgctcttggtcatgaaggcgaaccgcggctgccgcgcccgcttctgccccgccgacgacgacttcgtcatcgtcgtcttccccgccgccggtggcttgctcctgcatgcaaacaagcaaacaagcccacaatgatatgggccgggcttaattaatctggcaagggaaggaaggacgactgagatggagacgaaggctactgagcacaggcacttacgctgcttcggtggtggctgcggccgccggcgccccgtcgtcgtcgtcggtggagctggacctggacgacacggcggccggcgccg

SEQ ID NO: 67779 - DNA, 2514 bp, Zea Mays
cgcctcgcctcgcctcggcccaccggacctcgtagccgccctctgtcgtgtttgttccttgctagttctcgtcggcgccgtctctcccacgccgccctctgtcaccagcccaccacctcctgcgccggcgctcctccgagacgcagttcgcctccggaattcgatcacttcgccgccgctctcgcctccgcccccagctggctaaatacaacaatgatggagaacaggatgactttgaatccaactgatcttgatgattttgacaagagaaaattgccatcacctaggttccaggttgaggttgtcctggtagattacgatggctcgcaaccaccaaaaccagccgctggagcagttgataataaatctgatgccgattcctcggctagcacggctgtgaaagaaaatagtgttgcgcctgcagaatccaacaaggggactggaagcaatgataaagatgaagtattctcggacagtgacgacggggaggatggatcatctaaggaaagaaaggagaggactgctggcgcggtggtcaaggcagtgtaaatgctgctaaaccatctcaaacaagcaacgtggagaaggaggcatcggccgctgctagcagacttgataaagtatagctgtaaccaggaaccagcgaacaaggaaccacgaaggcacctgatgtcacatctctcaaaactgaagtcagcagcaagggcagctccaccgcagctgctgactcttccagcatgagcgaattcaaggcgatcgcagcagatgcctcggtgtttatgttcggagatgaagacgatgattatgaaagtgaatagtgcttctatgtgtgttccgttgtacagtttggttccctctagtccccctctcggcctctcccacccacccaaaaaaaaacacagcagctgagaaagagaagtcgaaagaagttatgcctgtttgattgctaaatatgccacatattggctaaaattgaagaactaacattagatagaaaaagttaggcaaagtgtgtcaagttagacagagaaccaaaagcgtcatcagtctgatattgtacccagatgaaacttgctgtaactcaaccagggctgaaccttgttgataactctcctacttcttaacagaaaggaaatcaaatagagcaatcactgctaagagttgaagtgcgcgtgtacaggagtattctgtacttgaacttgtgcgattcatttcttggcttgtttgtatagctaggaaggatttgatgtcaagaggtgtaacgggaggcagtagaatgaatctggggaaggcaagaggtggtgtgtttactacatgtggtgctctgttgcttcttcacagctggtagtaacacttgaacttgttcattctgtctatggtggcggtggcgagggacgcgtacgaagccgccgacggtgcgcatgcacaggcctcctctgcgtgctgacgagttcaggacgctcgactaccgccggcgttcatcttcgacggccgcgacgtccgggagcacctttgcatgctgtcccttgtcgacggcggccggagcagcgctactgctagcaggtggcaacgatgacgacgacgtcattgacacggaagccactggcggcgccgccagagcagtagtaggcggcggcaacaacgacgtcgttggcacggaagccactggcatcgacatcgccgcctgcagctcctgctggccgttgtcgagagcgttgtgccgaggcgcgagtgtcgtcgtcgtcgggaggaggggcggcaggtggtggtcgttgacgcagctggcggtgccgctgtaggggttgctgtggtagtggtggtgcgcggaggaggcagcagagaattcgacgaacggcaggtggtggcggccgtcggcggcgtggttggcgcgcgggaagcaggcgacggcggtgtggtggcagtgctggccctcgtaggtggtgatgacgacggaggggtcgtcggaggagcgctccacgcgcttcttcaccgtgcacttgctgttggtgcagcggtagtagctcctgctacgtacactcatccgtgactcgatgattctagagctagctagctagcttgaggggtttaattttcagagctagttccagatgccatgcgtgcagtagccagtaggtacctggggaaggggctgttcttgacggccttctgcccgtacttcctccagcggtacccgtcctccaggtggtccacgtcgctcttggtcatgaaggcgaaccgcggctgccgcgcccgcttctgccccgccgacgacgacttcgtcatcgtcgtcttccccgccgccggtggcttgctcctgcatgcaaacaagcaaacaagcccacaatgatatgggccgggcttaattaatctggcaagggaaggaaggacgactgagatggagacgaaggctactgagcacaggcacttacgctgcttcggtggtggctgcggccgccggcgccccgtcgtcgtcgtcggtggagctggacctggacgacacggcggccggcgccg

SEQ ID NO: 67780 - DNA, 1930 bp, Zea Mays
cgcctcgcctcgcctcggcccaccggacctcgtagccgccctctgtcgtgtttgttccttgctagttctcgtcggcgccgtctctcccacgccgccctctgtcaccagcccaccacctcctgcgccggcgctcctccgagacgcagttcgcctccggaattcgatcacttcgccgccgctctcgcctccgcccccagctggctaaatacaacaatgatggagaacaggatgactttgaatccaactgatcttgatgattttgacaagctgcagcagttcgaacaactgatttgtttacatgttcttttggggacttgagactaaattacattataattttgtccagagaaaattgccatcacctaggttccaggttgaggttgtcctggtagattacgatggctcgcaaccaccaaaaccagccgctggagcagttgataataaatctgatgccgattcctcggctagcacggctgtgaaagaaaatagtgttgcgcctgcagaatccaacaaggggactggaagcaatgataaagatgaagtattctcggacagtgacgacggggaggatggatcatctaaggaaagaaaggagaggactgctggcgcggtggtcaaggcagtgtaaatgctgctaaaccatctcaaacaagcaacgtggagaaggaggcatcggccgctgctagcagacttgataaagtatagctgtaaccaggaaccagcgaacaaggaaccacgaaggcacctgatgtcacatctctcaaaactgaagtcagcagcaagggcagctccaccgcagctgctgactcttccagcatgagcgaattcaaggcgatcgcagcagatgcctcggtgtttatgttcggagatgaagacgatgattatgaaagtgaatagtgcttctatgtgtgttccgttgtacagtttggttccctctagtccccctctcggcctctcccacccacccaaaaaaaaacacagcagctgagaaagagaagtcgaaagaagttatgcctgtttgattgctaaatatgccacatattggctaaaattgaagaactaacattagatagaaaaagttaggcaaagtgtgtcaagttagacagagaaccaaaagcgtcatcagtctgatattgtacccagatgaaacttgctgtaactcaaccagggctgaaccttgttgataactctcctacttcttaacagaaaggaaatcaaatagagcaatcactgctaagagttgaagtgcgcgtgtacaggagtattctgtacttgaacttgtgcgattcatttcttggcttgtttgtatagctaggaaggatttgatgtcaagaggtgtaacgggaggcagtagaatgaatctggggaaggcaagaggtggtgtgtttactacatgtggtgctctgttgcttcttcacagctggtagtaacacttgaacttgttcattctgtctatggtggcggtggcgagggacgcgtacgaagccgccgacggtgcgcatgcacaggcctcctctgcgtgctgacgagttcaggacgctcgactaccgccggcgttcatcttcgacggccgcgacgtccgggagcacctttgcatgctgcggtacccgtcctccaggtggtccacgtcgctcttggtcatgaaggcgaaccgcggctgccgcgcccgcttctgccccgccgacgacgacttcgtcatcgtcgtcttccccgccgccggtggcttgctcctgcatgcaaacaagcaaacaagcccacaatgatatgggccgggcttaattaatctggcaagggaaggaaggacgactgagatggagacgaaggctactgagcacaggcacttacgctgcttcggtggtggctgcggccgccggcgccccgtcgtcgtcgtcggtggagctggacctggacgacacggcggccggcgccg

SEQ ID NO: 67781 - DNA, 2589 bp, Zea Mays
gcgcctcgcctcgcctcggcccaccggacctcgtagccgccctctgtcgtgtttgttccttgctagttctcgtcggcgccgtctctcccacgccgccctctgtcaccagcccaccacctcctgcgccggcgctcctccgagacgcagttcgcctccggaattcgatcacttcgccgccgctctcgcctccgcccccaggccgcgaagtggcgagaagccttcccactgagcaaaggtcctaggttcgatgcagcctctcggcaaaatgcaggctggctaaatacaacaatgatggagaacaggatgactttgaatccaactgatcttgatgattttgacaagagaaaattgccatcacctaggttccaggttgaggttgtcctggtagattacgatggctcgcaaccaccaaaaccagccgctggagcagttgataataaatctgatgccgattcctcggctagcacggctgtgaaagaaaatagtgttgcgcctgcagaatccaacaaggggactggaagcaatgataaagatgaagtattctcggacagtgacgacggggaggatggatcatctaaggaaagaaaggagaggactgctggcgcggtggtcaaggcagtgtaaatgctgctaaaccatctcaaacaagcaacgtggagaaggaggcatcggccgctgctagcagacttgataaagtatagctgtaaccaggaaccagcgaacaaggaaccacgaaggcacctgatgtcacatctctcaaaactgaagtcagcagcaagggcagctccaccgcagctgctgactcttccagcatgagcgaattcaaggcgatcgcagcagatgcctcggtgtttatgttcggagatgaagacgatgattatgaaagtgaatagtgcttctatgtgtgttccgttgtacagtttggttccctctagtccccctctcggcctctcccacccacccaaaaaaaaacacagcagctgagaaagagaagtcgaaagaagttatgcctgtttgattgctaaatatgccacatattggctaaaattgaagaactaacattagatagaaaaagttaggcaaagtgtgtcaagttagacagagaaccaaaagcgtcatcagtctgatattgtacccagatgaaacttgctgtaactcaaccagggctgaaccttgttgataactctcctacttcttaacagaaaggaaatcaaatagagcaatcactgctaagagttgaagtgcgcgtgtacaggagtattctgtacttgaacttgtgcgattcatttcttggcttgtttgtatagctaggaaggatttgatgtcaagaggtgtaacgggaggcagtagaatgaatctggggaaggcaagaggtggtgtgtttactacatgtggtgctctgttgcttcttcacagctggtagtaacacttgaacttgttcattctgtctatggtggcggtggcgagggacgcgtacgaagccgccgacggtgcgcatgcacaggcctcctctgcgtgctgacgagttcaggacgctcgactaccgccggcgttcatcttcgacggccgcgacgtccgggagcacctttgcatgctgtcccttgtcgacggcggccggagcagcgctactgctagcaggtggcaacgatgacgacgacgtcattgacacggaagccactggcggcgccgccagagcagtagtaggcggcggcaacaacgacgtcgttggcacggaagccactggcatcgacatcgccgcctgcagctcctgctggccgttgtcgagagcgttgtgccgaggcgcgagtgtcgtcgtcgtcgggaggaggggcggcaggtggtggtcgttgacgcagctggcggtgccgctgtaggggttgctgtggtagtggtggtgcgcggaggaggcagcagagaattcgacgaacggcaggtggtggcggccgtcggcggcgtggttggcgcgcgggaagcaggcgacggcggtgtggtggcagtgctggccctcgtaggtggtgatgacgacggaggggtcgtcggaggagcgctccacgcgcttcttcaccgtgcacttgctgttggtgcagcggtagtagctcctgctacgtacactcatccgtgactcgatgattctagagctagctagctagcttgaggggtttaattttcagagctagttccagatgccatgcgtgcagtagccagtaggtacctggggaaggggctgttcttgacggccttctgcccgtacttcctccagcggtacccgtcctccaggtggtccacgtcgctcttggtcatgaaggcgaaccgcggctgccgcgcccgcttctgccccgccgacgacgacttcgtcatcgtcgtcttccccgccgccggtggcttgctcctgcatgcaaacaagcaaacaagcccacaatgatatgggccgggcttaattaatctggcaagggaaggaaggacgactgagatggagacgaaggctactgagcacaggcacttacgctgcttcggtggtggctgcggccgccggcgccccgtcgtcgtcgtcggtggagctggacctggacgacacggcggccggcgccg

SEQ ID NO: 67782 - DNA, 2836 bp, Zea Mays
gccaactgcgcctcgcctcgcctcggcccaccggacctcgtagccgccctctgtcgtgtttgttccttgctagttctcgtcggcgccgtctctcccacgccgccctctgtcaccagcccaccacctcctgcgccggcgctcctccgagacgcagttcgcctccggaattcgatcacttcgccgccgctctcgcctccgcccccaggccgcgaagtggcgagaagccttcccactgagcaaaggtcctaggttcgatgcagcctctcggcaaaatgcaggctggctaaatacaacaatgatggagaacaggatgactttgaatccaactgatcttgatgattttgacaagagaaaattgccatcacctaggttccaggttgaggttgtcctggtagattacgatggctcgcaaccaccaaaaccagccgctggagcagttgataataaatctgatgccgattcctcggctagcacggctgtgaaagaaaatagtgttgcgcctgcagaatccaacaaggggactggaagcaatgataaagatgaagtattctcggacagtgacgacggggaggatggatcatctaaggaaagaaaggagaggactgctggcgcggtggtcaaggcagtgtaaatgctgctaaaccatctcaaacaagcaacgtggagaaggaggcatcggccgctgctagcagacttgataaagtatagctgtaaccaggaaccagcgaacaaggaaccacgaaggcacctgatgtcacatctctcaaaactgaagtcagcagcaagggcagctccaccgcagctgctgactcttccagcatgagcgaattcaaggcgatcgcagcagatgcctcggtgtttatgttcggagatgaagacgatgattatgaaagtgaatagtgcttctatgtgtgttccgttgtacagtttggttccctctagtccccctctcggcctctcccacccacccaaaaaaaaacacagcagctgagaaagagaagtcgaaagaagttatgcctgtttgattgctaaatatgccacatattggctaaaattgaagaactaacattagatagaaaaagttaggcaaagtgtgtcaagttagacagagaaccaaaagcgtcatcagtctgatattgtacccagatgaaacttgctgtaactcaaccagggctgaaccttgttgataactctcctacttcttaacagaaaggaaatcaaatagagcaatcactgctaagagttgaagtgcgcgtgtacaggagtattctgtacttgaacttgtgcgattcatttcttggcttgtttgtatagctaggaaggatttgatgtcaagaggtgtaacgggaggcagtagaatgaatctggggaaggcaagaggtggtgtgtttactacatgtggtgctctgttgcttcttcacagctggtagtaacacttgaacttgttcattctgtctatggtggcggtggcgagggacgcgtacgaagccgccgacggtgcgcatgcacaggcctcctctgcgtgctgacgagttcaggacgctcgactaccgccggcgttcatcttcgacggccgcgacgtccgggagcacctttgcatgctggtaagtgcttgccgattgctattatttgcttgacagttggtaccgtagctatatatataattaatatgtatgtatatgcatatgttacaatcaattcttcctgtctctgtccaattaatcagaaatcaaataaactgatgggcagctccatcgtatgcttcatcattgtactaattagctagccgagtaattaatcaactacccgtgcctcatcgccggcggcaccatgtcgtcaagaagtcccttgtcgacggcggccggagcagcgctactgctagcaggtggcaacgatgacgacgacgtcattgacacggaagccactggcggcgccgccagagcagtagtaggcggcggcaacaacgacgtcgttggcacggaagccactggcatcgacatcgccgcctgcagctcctgctggccgttgtcgagagcgttgtgccgaggcgcgagtgtcgtcgtcgtcgggaggaggggcggcaggtggtggtcgttgacgcagctggcggtgccgctgtaggggttgctgtggtagtggtggtgcgcggaggaggcagcagagaattcgacgaacggcaggtggtggcggccgtcggcggcgtggttggcgcgcgggaagcaggcgacggcggtgtggtggcagtgctggccctcgtaggtggtgatgacgacggaggggtcgtcggaggagcgctccacgcgcttcttcaccgtgcacttgctgttggtgcagcggtagtagctcctgctacgtacactcatccgtgactcgatgattctagagctagctagctagcttgaggggtttaattttcagagctagttccagatgccatgcgtgcagtagccagtaggtacctggggaaggggctgttcttgacggccttctgcccgtacttcctccagcggtacccgtcctccaggtggtccacgtcgctcttggtcatgaaggcgaaccgcggctgccgcgcccgcttctgccccgccgacgacgacttcgtcatcgtcgtcttccccgccgccggtggcttgctcctgcatgcaaacaagcaaacaagcccacaatgatatgggccgggcttaattaatctggcaagggaaggaaggacgactgagatggagacgaaggctactgagcacaggcacttacgctgcttcggtggtggctgcggccgccggcgccccgtcgtcgtcgtcggtggagctggacctggacgacacggcggccggcgccg

SEQ ID NO: 67783 - DNA, 4566 bp, Zea Mays
atgggtggggcagaggttttctcgacctgtatgagaaggagatgatgatgaagatgatttggaaaatggacaagttagcaagaggagacgtactgctactaatttgagcatgagaaaatcttcaaacaaactttctgcttctgtttattctgctgtgcagaaactatgcttgatattgggctttcttaaggaactgctcacaacagtgcgcttgtcagatggttgtattctgcagttagcgaaaacatgctttactacattcttggtggataatatgcagctattacaattaaaagcaatcggggttatttgcacggtgttttcgtcatacacacagcacaggagttacttggttgatgaaatacttcaccttcttcgcaagttgcagttttccaaaaatgccgtcagaacctaccatctagcagatgaagaccaaaagcaaatccagatgataacagcactgttagttcacctggttcagtttagtgcaattgttcccaatagcttaaaaggaacagttgattggaccactattgttgatgcctccggagatgctgattattatccaattaaatgccatgaagcggcaacagaggcttgttgccgtttttggactgatgtccttcaacgttttactgctgctaaatctcaagatatgtcggaaaccaaaggaataatagataatcttgttcaggatttcctaatgatactaaacttgccggagtatccagctgctgcttctatccttgaggttctctgtgtgttgctccttcagaatgctggattgaaatctaaggacactaatgttcggtgctttgctattgatcttcttggtggtattgcatcaagattgaagcatgattcggtcatctgtagtgaagagaagctttggatattgcaagatctcactgatgcaggtagcgatggctcaaaaatcttgaaaaacaagtgctgtgtttgtcttggtggaagagctcaatgtgctacagacgtactgtcagtcacaaattaaagaaaatggcaaaaaaactgctgcgtctactagtaagaaatctgctaaaccagctgaggtgccagcagtggatattattcaacaaatactactgagttatctccaagaatctggtccacaagatgatgggaacctgtttactcgatggttctatctgtgcatctggaacaaagaaaaccaacattctcaggaggagatcatctactatctcgctagattaaaatcaaaagagattctgcgagattctggcaatggtctggcaatttccagagattcagcaaagaaaatttgcttggcacttggtcagaagaactcattttgcaggggttttgataaaattcttgctcttcttttggctagcttgagagaaaattctcctgtaataagagcaaaagccttgcgtgcggtcagcagtatagttgaagctgaccctgaggtcttgggtgacaaacgtgtccaatctgctgtcgaagggaggttttgtgattcggctatttctgttcgtgaagctgcccttgaacttgttgggaggcatattgcttcacatcctgatgtgggcctgaagtatatagaaaaagttgctgagcgaataaaggacactggagtcagcgttcgcaagcgtgcaatcaaaattataagggatctatgtgcttctaatccaaacacagacacaacacatgcctttgtggagataatttctcgtgttaatgatgaggaatccagtgtacaggatcttgtatgtaaaacattttatgaactatggtttgaagaaccaactgggagccataagcacttggttgctgatggaagttcagttccaatggagatagctaaaaagactgagcaaattgttgacatgttgaggaagatgaccaatcaccaacctctgattaccatcataaaacgtaacttgactcttgatttcctccctcagtcaaccaaggctgcagggattaactcatacatggtggcatcaattcagaagcgttgcgaattaatatgcaaacgcttattagaaagaatattgcaggttgaggagggagctgctaaggagatggaaatccacatgcttccttatattgttgctttgcaagcattttgtattgttgatcccacgctctgcattccagtaactgatccttctaagtttgttgtgacactacaaccataccttaatattcaggttgacagtaaatcagctgcccagttgcttgaaagtattatttttgtgattgatgctgttcttccactcataaggaagccaacacaaaatgttgttgaagaacttgagaaagatctgaaacatatgatagttcgccattcgtatttgacagttgtacatgcctgtatcaagtgcctttgtgctctgagcgagtcagcaggtagaggtccaggattagtggaaaaccttgtcaatattttctacaagcatctgtctggagctaattcagatagtcagttattgggtcgatcactgttttgtcttggactcctccttcggtatggttatcaattgatgcaaacatctgaaaatcagcttgattttcccaagattatcaacttgctccagagaaaatatcttctcagggatgattttagcttgaaggttcgagctttgcagactttgggatacatacttattgcgaagcctgaatttatgctacaaaaggatatgttgaaactcatagagacagcactatcttctgaggttgattatagattaaagattcaaggacttcaaaacctctatgagtatctcagagatgctgaaagccaacttactgccgagagcactgtgaaacctcctgtccggtgtgaaataaatggcagaagtaaagtgcctgttgctgctggtgctggagacaccaacatatgtggtggtattattcaattgtattggagttctattcttgaaaggtgcttggatacaaatgatcaagttcgccagagtgcacttaagattgttgaagttgtactccgccagggtttagttcaccctattacctgtgttcctcaccttatagcacttgaaatggacccactggaggggaactcaaagttggctcatcatctgctgatgaatatgaatgaaaagtaccctttattttttgaaagccgtttgggtgatggactacaaatgtcatttaaattctttgaatccatagtcagcaaccataagatggcagcaaacataaaatcaaatccaattgcatttgtcaaacctggcatatctagaatataccgtcttatccgttcaaatcgaaattccagaaacaaatttgtccactcgatagttcggaaattcgagtctgatagccggagtcgcagcacagttagctttcttgtatactgtgccgaagttcttgcctccctgcctttcacatgctccgatgaaccactttacttgatctatgatataaatcgaattattcaccttaaagctggaggagttgagagcaatttgaaaaggtggacttctatgtctcagtctcaaaatacagtggatatgccaacgttgccaggagagaggcatgttgtcatgcaagagcctggcggatattatgataacgtgggctatgcccatgaaagggtgaatgccaatccttgcagtacttcagacgtggacatggccaaagtgcaggttgacgtggatatggccaaagtgcagggagattgccttgatgcaatagcccttcagctactgctgaaattgaagagacatttgaaagttgtctatagtttagatgatgcccgctgtcagtcattttctctaaaggagcctccgaaatctggagaaacattctccaggcagaatattccttttaatgttagcagcactaacatcagtctgccgagctgcctgcaggacgtagcttctgtttaccaggatttcaagacagtgctccacgaagattccatggactttgctgtgttcatcccttcagtccagattaggaagcgcccaaccccgagaaatacgacaaacccaaccccaagaagtacgacgagggtcaggagaacggctgcctcgagtgttacaaaagcccgtggtggcgcacgtggcgatgactccgacgactccgatgatgacgactggaccgggggcccaagagtgcttgacttcagtgggggtggccgtgtgacaaggcagagggtccaagtatgatgactggtcttggtgcttttgtacattctagggaaacctatagcgggtagcagctgacacgaggagagttagggttgagttttaggtttaaagtcgtttagggtacatagaagcagaaaaggaaaggaagatagcctttttacttagatgccattgatttggagcactccttttcttgctctgcccctgtcctgtttgtaattccggtcgggctttggcaaaactgacaaacagggttgtgctccggcttctgatctgattcaatgggaatgaaattattccttttgctttgcctgtataataacagttaagcctatgtttcgtgtaattgtctgccttgctaatgttatatatctgtacgtgtgctgagccttttttgttgaagttc

SEQ ID NO: 67784 - DNA, 5349 bp, Zea Mays
atcaacaaattttgccctctctactttgatcaaacgttttttttgtcagctagttcctttactcacaatcagggtggagctgggttgcctgcgccactcagacgttacatgggctcttaggtccatttggaggcccaggatatcaaaatcaagaacatgagaagcactttgagcattttacacctaatacgagcaaagcacgaaatgaatctgcatttcctcaggatgaaattgactcacatagagagcatttttatattcaattgcttcaaagaagccaaaaataaggaagagagaaaataacaattctgtttcaagttctgctcccagcattcctaatactcaagatgttatcactaccttctgtgaggtggtggaggatttctgtggaaaaaccgaaattcctgatgatggagatggcggtgactggttgtcaatcccacttggtgatgttaaggttctcgtgaatgaaattacatctgttcgatccaaaaggatattgcatgaggttcctatggatacagttacaaggttattggatgtgattgaccgtcagattcgatattctcaaggtttgtcgatagatgtgaaagaaaattctgatgtcgttgatgctgaacctctggttttctctgctttggaggccagtcatgctgcgttggcaattatgacccaccatgatatgccaaagcaactgtaccgagaagaacttattgagcggattattgatttctcaaggcatcagatcacagattgtatggcagcaagtaacccaaccttccgagctctctacaaaccagctgaaaatgttgcaaatgatggagatgatgatgaagatgatttggaaaatggacaagttagcaagaggagacgtactgctactaatttgagcatgagaaaatcttcaaacaaactttctgcttctgtttattctgctgtgcagaaactatgcttgatattgggctttcttaaggaactgctcacaacagtgcgcttgtcagatggttgtattctgcagttagcgaaaacatgctttactacattcttggtggataatatgcagctattacaattaaaagcaatcggggttatttgcacggtgttttcgtcatacacacagcacaggagttacttggttgatgaaatacttcaccttcttcgcaagttgcagttttccaaaaatgccgtcagaacctaccatctagcagatgaagaccaaaagcaaatccagatgataacagcactgttagttcacctggttcagtttagtgcaattgttcccaatagcttaaaaggaacagttgattggaccactattgttgatgcctccggagatgctgattattatccaattaaatgccatgaagcggcaacagaggcttgttgccgtttttggactgatgtccttcaacgttttactgctgctaaatctcaagatatgtcggaaaccaaaggaataatagataatcttgttcaggatttcctaatgatactaaacttgccggagtatccagctgctgcttctatccttgaggttctctgtgtgttgctccttcagaatgctggattgaaatctaaggacactaatgttcggtgctttgctattgatcttcttggtggtattgcatcaagattgaagcatgattcggtcatctgtagtgaagagaagctttggatattgcaagatctcactgatgcaggtagcgatggctcaaaaatcttgaaaaacaagtgctgtgtttgtcttggtggaagagctcaatgtgctacagacgtactgtcagtcacaaattaaagaaaatggcaaaaaaactgctgcgtctactagtaagaaatctgctaaaccagctgaggtgccagcagtggatattattcaacaaatactactgagttatctccaagaatctggtccacaagatgatgggaacctgtttactcgatggttctatctgtgcatctggaacaaagaaaaccaacattctcaggaggagatcatctactatctcgctagattaaaatcaaaagagattctgcgagattctggcaatggtctggcaatttccagagattcagcaaagaaaatttgcttggcacttggtcagaagaactcattttgcaggggttttgataaaattcttgctcttcttttggctagcttgagagaaaattctcctgtaataagagcaaaagccttgcgtgcggtcagcagtatagttgaagctgaccctgaggtcttgggtgacaaacgtgtccaatctgctgtcgaagggaggttttgtgattcggctatttctgttcgtgaagctgcccttgaacttgttgggaggcatattgcttcacatcctgatgtgggcctgaagtatatagaaaaagttgctgagcgaataaaggacactggagtcagcgttcgcaagcgtgcaatcaaaattataagggatctatgtgcttctaatccaaacacagacacaacacatgcctttgtggagataatttctcgtgttaatgatgaggaatccagtgtacaggatcttgtatgtaaaacattttatgaactatggtttgaagaaccaactgggagccataagcacttggttgctgatggaagttcagttccaatggagatagctaaaaagactgagcaaattgttgacatgttgaggaagatgaccaatcaccaacctctgattaccatcataaaacgtaacttgactcttgatttcctccctcagtcaaccaaggctgcagggattaactcatacatggtggcatcaattcagaagcgttgcgaattaatatgcaaacgcttattagaaagaatattgcaggttgaggagggagctgctaaggagatggaaatccacatgcttccttatattgttgctttgcaagcattttgtattgttgatcccacgctctgcattccagtaactgatccttctaagtttgttgtgacactacaaccataccttaatattcaggttgacagtaaatcagctgcccagttgcttgaaagtattatttttgtgattgatgctgttcttccactcataaggaagccaacacaaaatgttgttgaagaacttgagaaagatctgaaacatatgatagttcgccattcgtatttgacagttgtacatgcctgtatcaagtgcctttgtgctctgagcgagtcagcaggtagaggtccaggattagtggaaaaccttgtcaatattttctacaagcatctgtctggagctaattcagatagtcagttattgggtcgatcactgttttgtcttggactcctccttcggtatggttatcaattgatgcaaacatctgaaaatcagcttgattttcccaagattatcaacttgctccagagaaaatatcttctcagggatgattttagcttgaaggttcgagctttgcagactttgggatacatacttattgcgaagcctgaatttatgctacaaaaggatatgttgaaactcatagagacagcactatcttctgaggttgattatagattaaagattcaaggacttcaaaacctctatgagtatctcagagatgctgaaagccaacttactgccgagagcactgtgaaacctcctgtccggtgtgaaataaatggcagaagtaaagtgcctgttgctgctggtgctggagacaccaacatatgtggtggtattattcaattgtattggagttctattcttgaaaggtgcttggatacaaatgatcaagttcgccagagtgcacttaagattgttgaagttgtactccgccagggtttagttcaccctattacctgtgttcctcaccttatagcacttgaaatggacccactggaggggaactcaaagttggctcatcatctgctgatgaatatgaatgaaaagtaccctttattttttgaaagccgtttgggtgatggactacaaatgtcatttaaattctttgaatccatagtcagcaaccataagatggcagcaaacataaaatcaaatccaattgcatttgtcaaacctggcatatctagaatataccgtcttatccgttcaaatcgaaattccagaaacaaatttgtccactcgatagttcggaaattcgagtctgatagccggagtcgcagcacagttagctttcttgtatactgtgccgaagttcttgcctccctgcctttcacatgctccgatgaaccactttacttgatctatgatataaatcgaattattcaccttaaagctggaggagttgagagcaatttgaaaaggtggacttctatgtctcagtctcaaaatacagtggatatgccaacgttgccaggagagaggcatgttgtcatgcaagagcctggcggatattatgataacgtgggctatgcccatgaaagggtgaatgccaatccttgcagtacttcagacgtggacatggccaaagtgcaggttgacgtggatatggccaaagtgcagggagattgccttgatgcaatagcccttcagctactgctgaaattgaagagacatttgaaagttgtctatagtttagatgatgcccgctgtcagtcattttctctaaaggagcctccgaaatctggagaaacattctccaggcagaatattccttttaatgttagcagcactaacatcagtctgccgagctgcctgcaggacgtagcttctgtttaccaggatttcaagacagtgctccacgaagattccatggactttgctgtgttcatcccttcagtccagattaggaagcgcccaaccccgagaaatacgacaaacccaaccccaagaagtacgacgagggtcaggagaacggctgcctcgagtgttacaaaagcccgtggtggcgcacgtggcgatgactccgacgactccgatgatgacgactggaccgggggcccaagagtgcttgacttcagtgggggtggccgtgtgacaaggcagagggtccaagtatgatgactggtcttggtgcttttgtacattctagggaaacctatagcgggtagcagctgacacgaggagagttagggttgagttttaggtttaaagtcgtttagggtacatagaagcagaaaaggaaaggaagatagcctttttacttagatgccattgatttggagcactccttttcttgctctgcccctgtcctgtttgtaattccggtcgggctttggcaaaactgacaaacagggttgtgctccggcttctgatctgattcaatgggaatgaaattattccttttgctttgcctgtataataacagttaagcctatgtttcgtgtaattgtctgccttgctaatgttatatatctgtacgtgtgctgagccttttttgttgaagttc

SEQ ID NO: 67785 - DNA, 5224 bp, Zea Mays
aattggagccctcctccccccgcatctagggtttcgcccatggaccccgccgccggcgggggccggggccgggaccgggcgggcttcgagcgggcgtgccggctgcccaacaccgtccactccgaggtcctgccgtcgctgccgctccccaccctcccgcgcgagctcggcttcgacgcgctccgcgacgacgagcccctcgccgcgcccgaccgccccgacacgatcatgcaggccgccaacatcgcccgcgtcctcgccgacaccgacgtctcccacctgggcttcaccgctgcggacaacgtcgacgtggaccccatccgctgctcctggctctggagggaggtgctcaagcacaaccccgacgctttcaaggtcaaggcgccaagtccgtcttcgcaaggtccatttggaggcccaggatatcaaaatcaagaacatgagaagcactttgagcattttacacctaatacgagcaaagcacgaaatgaatctgcatttcctcaggatgaaattgactcacatagagagcatttttataatgaactgacctcagattcaattgcttcaaagaagccaaaaataaggaagagagaaaataacaattctgtttcaagttctgctcccagcattcctaatactcaagatgttatcactaccttctgtgaggtggtggaggatttctgtggaaaaaccgaaattcctgatgatggagatggcggtgactggttgtcaatcccacttggtgatgttaaggttctcgtgaatgaaattacatctgttcgatccaaaaggatattgcatgaggttcctatggatacagttacaaggttattggatgtgattgaccgtcagattcgatattctcaaggtttgtcgatagatgtgaaagaaaattctgatgtcgttgatgctgaacctctggttttctctgctttggaggccagtcatgctgcgttggcaattatgacccaccatgatatgccaaagcaactgtaccgagaagaacttattgagcggattattgatttctcaaggcatcagatcacagattgtatggcagcaagtaacccaaccttccgagctctctacaaaccagctgaaaatgttgcaaatgatggagatgatgatgaagatgatttggaaaatggacaagttagcaagaggagacgtactgctactaatttgagcatgagaaaatcttcaaacaacagaacctaccatctagcagatgaagaccaaaagcaaatccagatgataacagcactgttagttcacctggttcagtttagtgcaattgttcccaatagcttaaaaggaacagttgattggaccactattgttgatgcctccggagatgctgattattatccaattaaatgccatgaagcggcaacagaggcttgttgccgtttttggactgatgtccttcaacgttttactgctgctaaatctcaagatatgtcggaaaccaaaggaataatagataatcttgttcaggatttcctaatgatactaaacttgccggagtatccagctgctgcttctatccttgaggttctctgtgtgttgctccttcagaatgctggattgaaatctaaggacactaatgttcggtgctttgctattgatcttcttggtggtattgcatcaagattgaagcatgattcggtcatctgtagtgaagagaagctttggatattgcaagatctcactgatgcaggtagcgatggctcaaaaatcttgaaaaacaagtgctgtgtttgtcttggtggaagaggtataaatatagcctgtaatgaatgtggaagatgtttccattcagattgtatgggggctgctagccaggataacttagagcgtgatagtgtttgccccttgtgtttttgcaaacaacagctcaatgtgctacagacgtactgtcagtcacaaattaaagaaaatggcaaaaaaactgctgcgtctactagtaagaaatctgctaaaccagctgaggtgccagcagtggatattattcaacaaatactactgagttatctccaagaatctggtccacaagatgatgggaacctgtttactcgatggttctatctgtgcatctggaacaaagaaaaccaacattctcaggaggagatcatctactatctcgctagattaaaatcaaaagagattctgcgagattctggcaatggtctggcaatttccagagattcagcaaagaaaatttgcttggcacttggtcagaagaactcattttgcaggggttttgataaaattcttgctcttcttttggctagcttgagagaaaattctcctgtaataagagcaaaagccttgcgtgcggtcagcagtatagttgaagctgaccctgaggtcttgggtgacaaacgtgtccaatctgctgtcgaagggaggttttgtgattcggctatttctgttcgtgaagctgcccttgaacttgttgggaggcatattgcttcacatcctgatgtgggcctgaagtatatagaaaaagttgctgagcgaataaaggacactggagtcagcgttcgcaagcgtgcaatcaaaattataagggatctatgtgcttctaatccaaacacagacacaacacatgcctttgtggagataatttctcgtgttaatgatgaggaatccagtgtacaggatcttgtatgtaaaacattttatgaactatggtttgaagaaccaactgggagccataagcacttggttgctgatggaagttcagttccaatggagatagctaaaaagactgagcaaattgttgacatgttgaggaagatgaccaatcaccaacctctgattaccatcataaaacgtaacttgactcttgatttcctccctcagtcaaccaaggctgcagggattaactcatacatggtggcatcaattcagaagcgttgcgaattaatatgcaaacgcttattagaaagaatattgcaggttgaggagggagctgctaaggagatggaaatccacatgcttccttatattgttgctttgcaagcattttgtattgttgatcccacgctctgcattccagtaactgatccttctaagtttgttgtgacactacaaccataccttaatattcaggttgacagtaaatcagctgcccagttgcttgaaagtattatttttgtgattgatgctgttcttccactcataaggaagccaacacaaaatgttgttgaagaacttgagaaagatctgaaacatatgatagttcgccattcgtatttgacagttgtacatgcctgtatcaagtgcctttgtgctctgagcgagtcagcaggtagaggtccaggattagtggaaaaccttgtcaatattttctacaagcatctgtctggagctaattcagatagtcagattcaaggacttcaaaacctctatgagtatctcagagatgctgaaagccaacttactgccgagagcactgtgaaacctcctgtccggtgtgaaataaatggcagaagtaaagtgcctgttgctgctggtgctggagacaccaacatatgtggtggtattattcaattgtattggagttctattcttgaaaggtgcttggatacaaatgatcaagttcgccagagtgcacttaagattgttgaagttgtactccgccagggtttagttcaccctattacctgtgttcctcaccttatagcacttgaaatggacccactggaggggaactcaaagttggctcatcatctgctgatgaatatgaatgaaaagtaccctttattttttgaaagccgtttgggtgatggactacaaatgtcatttaaattctttgaatccatagtcagcaaccataagatggcagcaaacataaaatcaaatccaattgcatttgtcaaacctggcatatctagaatataccgtcttatccgttcaaatcgaaattccagaaacaaatttgtccactcgatagttcggaaattcgagtctgatagccggagtcgcagcacagttagctttcttgtatactgtgccgaagttcttgcctccctgcctttcacatgctccgatgaaccactttacttgatctatgatataaatcgaattattcaccttaaagctggaggagttgagagcaatttgaaaaggtggacttctatgtctcagtctcaaaatacagtggatatgccaacgttgccaggagagaggcatgttgtcatgcaagagcctggcggatattatgataacgtgggctatgcccatgaaagggtgaatgccaatccttgcagtacttcagacgtggacatggccaaagtgcaggttgacgtggatatggccaaagtgcagggagattgccttgatgcaatagcccttcagctactgctgaaattgaagagacatttgaaagttgtctatagtttagatgatgcccgctgtcagtcattttctctaaaggagcctccgaaatctggagaaacattctccaggcagaatattccttttaatgttagcagcactaacatcagtctgccgagctgcctgcaggacgtagcttctgtttaccaggatttcaagacagtgctccacgaagattccatggactttgctgtgttcatcccttcagtccagattaggaagcgcccaaccccgagaaatacgacaaacccaaccccaagaagtacgacgagggtcaggagaacggctgcctcgagtgttacaaaagcccgtggtggcgcacgtggcgatgactccgacgactccgatgatgacgactggaccgggggcccaagagtgcttgacttcagtgggggtggccgtgtgacaaggcagagggtccaagtatgatgactggtcttggtgcttttgtacattctagggaaacctatagcgggtagcagctgacacgaggagagttagggttgagttttaggtttaaagtcgtttagggtacatagaagcagaaaaggaaaggaagatagcctttttacttagatgccattgatttggagcactccttttcttgctctgcccctgtcctgtttgtaattccggtcgggctttggcaaaactgacaaacagggttgtgctccggcttctgatctgattcaatgggaatgaaattattccttttgctttgcctgtataataacagttaagcctatgtttcgtgtaattgtctgccttgctaatgttatatatctgtacgtgtgctgagccttttttgttgaagttc

SEQ ID NO: 67786 - DNA, 5823 bp, Zea Mays
ttcatccccaccacctccacttgtcgaaattgaaactcaaatcaaatcgaaccacctccacctcggcaacgagcgaattccggtgcgaattggagccctcctccccccgcatctagggtttcgcccatggaccccgccgccggcgggggccggggccgggaccgggcgggcttcgagcgggcgtgccggctgcccaacaccgtccactccgaggtcctgccgtcgctgccgctccccaccctcccgcgcgagctcggcttcgacgcgctccgcgacgacgagcccctcgccgcgcccgaccgccccgacacgatcatgcaggccgccaacatcgcccgcgtcctcgccgacaccgacgtctcccacctgggcttcaccgctgcggacaacgtcgacgtggaccccatccgctgctcctggctctggagggaggtgctcaagcacaaccccgacgctttcaaggtcaaggcgccaagtccgtcttcgcaaggtccatttggaggcccaggatatcaaaatcaagaacatgagaagcactttgagcattttacacctaatacgagcaaagcacgaaatgaatctgcatttcctcaggatgaaattgactcacatagagagcatttttataatgaactgacctcagattcaattgcttcaaagaagccaaaaataaggaagagagaaaataacaattctgtttcaagttctgctcccagcattcctaatactcaagatgttatcactaccttctgtgaggtggtggaggatttctgtggaaaaaccgaaattcctgatgatggagatggcggtgactggttgtcaatcccacttggtgatgttaaggttctcgtgaatgaaattacatctgttcgatccaaaaggatattgcatgaggttcctatggatacagttacaaggttattggatgtgattgaccgtcagattcgatattctcaaggtttgtcgatagatgtgaaagaaaattctgatgtcgttgatgctgaacctctggttttctctgctttggaggccagtcatgctgcgttggcaattatgacccaccatgatatgccaaagcaactgtaccgagaagaacttattgagcggattattgatttctcaaggcatcagatcacagattgtatggcagcaagtaacccaaccttccgagctctctacaaaccagctgaaaatgttgcaaatgatggagatgatgatgaagatgatttggaaaatggacaagttagcaagaggagacgtactgctactaatttgagcatgagaaaatcttcaaacaaaaactatgcttgatattgggctttcttaaggaactgctcacaacagtgcgcttgtcagatggttgtattctgcagttagcgaaaacatgctttactacattcttggtggataatatgcagctattacaattaaaagcaatcggggttatttgcacggtgttttcgtcatacacacagcacaggagttacttggttgatgaaatacttcaccttcttcgcaagttgcagttttccaaaaatgccgtcagaacctaccatctagcagatgaagaccaaaagcaaatccagatgataacagcactgttagttcacctggttcagtttagtgcaattgttcccaatagcttaaaaggaacagttgattggaccactattgttgatgcctccggagatgctgattattatccaattaaatgccatgaagcggcaacagaggcttgttgccgtttttggactgatgtccttcaacgttttactgctgctaaatctcaagatatgtcggaaaccaaaggaataatagataatcttgttcaggatttcctaatgatactaaacttgccggagtatccagctgctgcttctatccttgaggttctctgtgtgttgctccttcagaatgctggattgaaatctaaggacactaatgttcggtgctttgctattgatcttcttggtggtattgcatcaagattgaagcatgattcggtcatctgtagtgaagagaagctttggatattgcaagatctcactgatgcaggtagcgatggctcaaaaatcttgaaaaacaagtgctgtgtttgtcttggtggaagaggtataaatatagcctgtaatgaatgtggaagatgtttccattcagattgtatgggggctgctagccaggataacttagagcgtgatagtgtttgccccttgtgtttttgcaaacaacagctcaatgtgctacagacgtactgtcagtcacaaattaaagaaaatggcaaaaaaactgctgcgtctactagtaagaaatctgctaaaccagctgaggtgccagcagtggatattattcaacaaatactactgagttatctccaagaatctggtccacaagatgatgggaacctgtttactcgatggttctatctgtgcatctggaacaaagaaaaccaacattctcaggaggagatcatctactatctcgctagattaaaatcaaaagagattctgcgagattctggcaatggtctggcaatttccagagattcagcaaagaaaatttgcttggcacttggtcagaagaactcattttgcaggggttttgataaaattcttgctcttcttttggctagcttgagagaaaattctcctgtaataagagcaaaagccttgcgtgcggtcagcagtatagttgaagctgaccctgaggtcttgggtgacaaacgtgtccaatctgctgtcgaagggaggttttgtgattcggctatttctgttcgtgaagctgcccttgaacttgttgggaggcatattgcttcacatcctgatgtgggcctgaagtatatagaaaaagttgctgagcgaataaaggacactggagtcagcgttcgcaagcgtgcaatcaaaattataagggatctatgtgcttctaatccaaacacagacacaacacatgcctttgtggagataatttctcgtgttaatgatgaggaatccagtgtacaggatcttgtatgtaaaacattttatgaactatggtttgaagaaccaactgggagccataagcacttggttgctgatggaagttcagttccaatggagatagctaaaaagactgagcaaattgttgacatgttgaggaagatgaccaatcaccaacctctgattaccatcataaaacgtaacttgactcttgatttcctccctcagtcaaccaaggctgcagggattaactcatacatggtggcatcaattcagaagcgttgcgaattaatatgcaaacgcttattagaaagaatattgcaggttgaggagggagctgctaaggagatggaaatccacatgcttccttatattgttgctttgcaagcattttgtattgttgatcccacgctctgcattccagtaactgatccttctaagtttgttgtgacactacaaccataccttaatattcaggttgacagtaaatcagctgcccagttgcttgaaagtattatttttgtgattgatgctgttcttccactcataaggaagccaacacaaaatgttgttgaagaacttgagaaagatctgaaacatatgatagttcgccattcgtatttgacagttgtacatgcctgtatcaagtgcctttgtgctctgagcgagtcagcaggtagaggtccaggattagtggaaaaccttgtcaatattttctacaagcatctgtctggagctaattcagatagtcagttattgggtcgatcactgttttgtcttggactcctccttcggtatggttatcaattgatgcaaacatctgaaaatcagcttgattttcccaagattatcaacttgctccagagaaaatatcttctcagggatgattttagcttgaaggttcgagctttgcagactttgggatacatacttattgcgaagcctgaatttatgctacaaaaggatatgttgaaactcatagagacagcactatcttctgaggttgattatagattaaagattcaaggacttcaaaacctctatgagtatctcagagatgctgaaagccaacttactgccgagagcactgtgaaacctcctgtccggtgtgaaataaatggcagaagtaaagtgcctgttgctgctggtgctggagacaccaacatatgtggtggtattattcaattgtattggagttctattcttgaaaggtgcttggatacaaatgatcaagttcgccagagtgcacttaagattgttgaagttgtactccgccagggtttagttcaccctattacctgtgttcctcaccttatagcacttgaaatggacccactggaggggaactcaaagttggctcatcatctgctgatgaatatgaatgaaaagtaccctttattttttgaaagccgtttgggtgatggactacaaatgtcatttaaattctttgaatccatagtcagcaaccataagatggcagcaaacataaaatcaaatccaattgcatttgtcaaacctggcatatctagaatataccgtcttatccgttcaaatcgaaattccagaaacaaatttgtccactcgatagttcggaaattcgagtctgatagccggagtcgcagcacagttagctttcttgtatactgtgccgaagttcttgcctccctgcctttcacatgctccgatgaaccactttacttgatctatgatataaatcgaattattcaccttaaagctggaggagttgagagcaatttgaaaaggtggacttctatgtctcagtctcaaaatacagtggatatgccaacgttgccaggagagaggcatgttgtcatgcaagagcctggcggatattatgataacgtgggctatgcccatgaaagggtgaatgccaatccttgcagtacttcagacgtggacatggccaaagtgcaggttgacgtggatatggccaaagtgcagggagattgccttgatgcaatagcccttcagctactgctgaaattgaagagacatttgaaagttgtctatagtttagatgatgcccgctgtcagtcattttctctaaaggagcctccgaaatctggagaaacattctccaggcagaatattccttttaatgttagcagcactaacatcagtctgccgagctgcctgcaggacgtagcttctgtttaccaggatttcaagacagtgctccacgaagattccatggactttgctgtgttcatcccttcagtccagattaggaagcgcccaaccccgagaaatacgacaaacccaaccccaagaagtacgacgagggtcaggagaacggctgcctcgagtgttacaaaagcccgtggtggcgcacgtggcgatgactccgacgactccgatgatgacgactggaccgggggcccaagagtgcttgacttcagtgggggtggccgtgtgacaaggcagagggtccaagtatgatgactggtcttggtgcttttgtacattctagggaaacctatagcgggtagcagctgacacgaggagagttagggttgagttttaggtttaaagtcgtttagggtacatagaagcagaaaaggaaaggaagatagcctttttacttagatgccattgatttggagcactccttttcttgctctgcccctgtcctgtttgtaattccggtcgggctttggcaaaactgacaaacagggttgtgctccggcttctgatctgattcaatgggaatgaaattattccttttgctttgcctgtataataacagttaagcctatgtttcgtgtaattgtctgccttgctaatgttatatatctgtacgtgtgctgagccttttttgttgaagttc

SEQ ID NO: 67787 - DNA, 5493 bp, Zea Mays
ctactctccattcatccccaccacctccacttgtcgaaattgaaactcaaatcaaatcgaaccacctccacctcggcaacgagcgaattccggtgcgaattggagccctcctccccccgcatctagggtttcgcccatggaccccgccgccggcgggggccggggccgggaccgggcgggcttcgagcgggcgtgccggctgcccaacaccgtccactccgaggtcctgccgtcgctgccgctccccaccctcccgcgcgagctcggcttcgacgcgctccgcgacgacgagcccctcgccgcgcccgaccgccccgacacgatcatgcaggccgccaacatcgcccgcgtcctcgccgacaccgacgtctcccacctgggcttcaccgctgcggacaacgtcgacgtggaccccatccgctgctcctggctctggagggaggtgctcaagcacaaccccgacgctttcaaggtcaaggcgccaagtccgtcttcgcaaggtccatttggaggcccaggatatcaaaatcaagaacatgagaagcactttgagcattttacacctaatacgagcaaagcacgaaatgaatctgcatttcctcaggatgaaattgactcacatagagagcatttttataatgaactgacctcagattcaattgcttcaaagaagccaaaaataaggaagagagaaaataacaattctgtttcaagttctgctcccagcattcctaatactcaagatgttatcactaccttctgtgaggtggtggaggatttctgtggaaaaaccgaaattcctgatgatggagatggcggtgactggttgtcaatcccacttggtgatgttaaggttctcgtgaatgaaattacatctgttcgatccaaaaggatattgcatgaggttcctatggatacagttacaaggttattggatgtgattgaccgtcagattcgatattctcaaggtttgtcgatagatgtgaaagaaaattcatgctgcgttggcaattatgacccaccatgatatgccaaagcaactgtaccgagaagaacttattgagcggattattgatttctcaaggcatcagatcacagattgtatggcagcaagtaacccaaccttccgagctctctacaaaccagctgaaaatgttgcaaatgatggagatgatgatgaagatgatttggaaaatggacaagttagcaagaggagacgtactgctactaatttgagcatgagaaaatcttcaaacaacagaacctaccatctagcagatgaagaccaaaagcaaatccagatgataacagcactgttagttcacctggttcagtttagtgcaattgttcccaatagcttaaaaggaacagttgattggaccactattgttgatgcctccggagatgctgattattatccaattaaatgccatgaagcggcaacagaggcttgttgccgtttttggactgatgtccttcaacgttttactgctgctaaatctcaagatatgtcggaaaccaaaggaataatagataatcttgttcaggatttcctaatgatactaaacttgccggagtatccagctgctgcttctatccttgaggttctctgtgtgttgctccttcagaatgctggattgaaatctaaggacactaatgttcggtgctttgctattgatcttcttggtggtattgcatcaagattgaagcatgattcggtcatctgtagtgaagagaagctttggatattgcaagatctcactgatgcaggtagcgatggctcaaaaatcttgaaaaacaagtgctgtgtttgtcttggtggaagagattgtatgggggctgctagccaggataacttagagcgtgatagtgtttgccccttgtgtttttgcaaacaacagctcaatgtgctacagacgtactgtcagtcacaaattaaagaaaatggcaaaaaaactgctgcgtctactagtaagaaatctgctaaaccagctgaggtgccagcagtggatattattcaacaaatactactgagttatctccaagaatctggtccacaagatgatgggaacctgtttactcgatggttctatctgtgcatctggaacaaagaaaaccaacattctcaggaggagatcatctactatctcgctagattaaaatcaaaagagattctgcgagattctggcaatggtctggcaatttccagagattcagcaaagaaaatttgcttggcacttggtcagaagaactcattttgcaggggttttgataaaattcttgctcttcttttggctagcttgagagaaaattctcctgtaataagagcaaaagccttgcgtgcggtcagcagtatagttgaagctgaccctgaggtcttgggtgacaaacgtgtccaatctgctgtcgaagggaggttttgtgattcggctatttctgttcgtgaagctgcccttgaacttgttgggaggcatattgcttcacatcctgatgtgggcctgaagtatatagaaaaagttgctgagcgaataaaggacactggagtcagcgttcgcaagcgtgcaatcaaaattataagggatctatgtgcttctaatccaaacacagacacaacacatgcctttgtggagataatttctcgtgttaatgatgaggaatccagtgtacaggatcttgtatgtaaaacattttatgaactatggtttgaagaaccaactgggagccataagcacttggttgctgatggaagttcagttccaatggagatagctaaaaagactgagcaaattgttgacatgttgaggaagatgaccaatcaccaacctctgattaccatcataaaacgtaacttgactcttgatttcctccctcagtcaaccaaggctgcagggattaactcatacatggtggcatcaattcagaagcgttgcgaattaatatgcaaacgcttattagaaagaatattgcaggttgaggagggagctgctaaggagatggaaatccacatgcttccttatattgttgctttgcaagcattttgtattgttgatcccacgctctgcattccagtaactgatccttctaagtttgttgtgacactacaaccataccttaatattcaggttgacagtaaatcagctgcccagttgcttgaaagtattatttttgtgattgatgctgttcttccactcataaggaagccaacacaaaatgttgttgaagaacttgagaaagatctgaaacatatgatagttcgccattcgtatttgacagttgtacatgcctgtatcaagtgcctttgtgctctgagcgagtcagcaggtagaggtccaggattagtggaaaaccttgtcaatattttctacaagcatctgtctggagctaattcagatagtcagttattgggtcgatcactgttttgtcttggactcctccttcggtatggttatcaattgatgcaaacatctgaaaatcagcttgattttcccaagattatcaacttgctccagagaaaatatcttctcagggatgattttagcttgaaggttcgagctttgcagactttgggatacatacttattgcgaagcctgaatttatgctacaaaaggatatgttgaaactcatagagacagcactatcttctgaggttgattatagattaaagattcaaggacttcaaaacctctatgagtatctcagagatgctgaaagccaacttactgccgagagcactgtgaaacctcctgtccggtgtgaaataaatggcagaagtaaagtgcctgttgctgctggtgctggagacaccaacatatgtggtggtattattcaattgtattggagttctattcttgaaaggtgcttggatacaaatgatcaagttcgccagagtgcacttaagattgttgaagttgtactccgccagggtttagttcaccctattacctgtgttcctcaccttatagcacttgaaatggacccactggaggggaactcaaagttggctcatcatctgctgatgaatatgaatgaaaagtaccctttattttttgaaagccgtttgggtgatggactacaaatgtcatttaaattctttgaatccatagtcagcaaccataagatggcagcaaacataaaatcaaatccaattgcatttgtcaaacctggcatatctagaatataccgtcttatccgttcaaatcgaaattccagaaacaaatttgtccactcgatagttcggaaattcgagtctgatagccggagtcgcagcacagttagctttcttgtatactgtgccgaagttcttgcctccctgcctttcacatgctccgatgaaccactttacttgatctatgatataaatcgaattattcaccttaaagctggaggagttgagagcaatttgaaaaggtggacttctatgtctcagtctcaaaatacagtggatatgccaacgttgccaggagagaggcatgttgtcatgcaagagcctggcggatattatgataacgtgggctatgcccatgaaagggtgaatgccaatccttgcagtacttcagacgtggacatggccaaagtgcaggttgacgtggatatggccaaagtgcagggagattgccttgatgcaatagcccttcagctactgctgaaattgaagagacatttgaaagttgtctatagtttagatgatgcccgctgtcagtcattttctctaaaggagcctccgaaatctggagaaacattctccaggcagaatattccttttaatgttagcagcactaacatcagtctgccgagctgcctgcaggacgtagcttctgtttaccaggatttcaagacagtgctccacgaagattccatggactttgctgtgttcatcccttcagtccagattaggaagcgcccaaccccgagaaatacgacaaacccaaccccaagaagtacgacgagggtcaggagaacggctgcctcgagtgttacaaaagcccgtggtggcgcacgtggcgatgactccgacgactccgatgatgacgactggaccgggggcccaagagtgcttgacttcagtgggggtggccgtgtgacaaggcagagggtccaagtatgatgactggtcttggtgcttttgtacattctagggaaacctatagcgggtagcagctgacacgaggagagttagggttgagttttaggtttaaagtcgtttagggtacatagaagcagaaaaggaaaggaagatagcctttttacttagatgccattgatttggagcactccttttcttgctctgcccctgtcctgtttgtaattccggtcgggctttggcaaaactgacaaacagggttgtgctccggcttctgatctgattcaatgggaatgaaattattccttttgctttgcctgtataataacagttaagcctatgtttcgtgtaattgtctgccttgctaatgttatatatctgtacgtgtgctgagccttttttgttgaagttc

SEQ ID NO: 67788 - DNA, 5828 bp, Zea Mays
ctactctccattcatccccaccacctccacttgtcgaaattgaaactcaaatcaaatcgaaccacctccacctcggcaacgagcgaattccggtgcgaattggagccctcctccccccgcatctagggtttcgcccatggaccccgccgccggcgggggccggggccgggaccgggcgggcttcgagcgggcgtgccggctgcccaacaccgtccactccgaggtcctgccgtcgctgccgctccccaccctcccgcgcgagctcggcttcgacgcgctccgcgacgacgagcccctcgccgcgcccgaccgccccgacacgatcatgcaggccgccaacatcgcccgcgtcctcgccgacaccgacgtctcccacctgggcttcaccgctgcggacaacgtcgacgtggaccccatccgctgctcctggctctggagggaggtgctcaagcacaaccccgacgctttcaaggtcaaggcgccaagtccgtcttcgcaaggtccatttggaggcccaggatatcaaaatcaagaacatgagaagcactttgagcattttacacctaatacgagcaaagcacgaaatgaatctgcatttcctcaggatgaaattgactcacatagagagcatttttatccaaaaataaggaagagagaaaataacaattctgtttcaagttctgctcccagcattcctaatactcaagatgttatcactaccttctgtgaggtggtggaggatttctgtggaaaaaccgaaattcctgatgatggagatggcggtgactggttgtcaatcccacttggtgatgttaaggttctcgtgaatgaaattacatctgttcgatccaaaaggatattgcatgaggttcctatggatacagttacaaggttattggatgtgattgaccgtcagattcgatattctcaaggtttgtcgatagatgtgaaagaaaattctgatgtcgttgatgctgaacctctggttttctctgctttggaggccagtcatgctgcgttggcaattatgacccaccatgatatgccaaagcaactgtaccgagaagaacttattgagcggattattgatttctcaaggcatcagatcacagattgtatggcagcaagtaacccaaccttccgagctctctacaaaccagctgaaaatgttgcaaatgatggagatgatgatgaagatgatttggaaaatggacaagttagcaagaggagacgtactgctactaatttgagcatgagaaaatcttcaaacaaactttctgcttctgtttattctgctgtgcagaaactatgcttgatattgggctttcttaaggaactgctcacaacagtgcgcttgtcagatggttgtattctgcagttagcgaaaacatgctttactacattcttggtggataatatgcagctattacaattaaaagcaatcggggttatttgcacggtgttttcgtcatacacacagcacaggagttacttggttgatgaaatacttcaccttcttcgcaagttgcagttttccaaaaatgccgtcagaacctaccatctagcagatgaagaccaaaagcaaatccagatgataacagcactgttagttcacctggttcagtttagtgcaattgttcccaatagcttaaaaggaacagttgattggaccactattgttgatgcctccggagatgctgattattatccaattaaatgccatgaagcggcaacagaggcttgttgccgtttttggactgatgtccttcaacgttttactgctgctaaatctcaagatatgtcggaaaccaaaggaataatagataatcttgttcaggatttcctaatgatactaaacttgccggagtatccagctgctgcttctatccttgaggttctctgtgtgttgctccttcagaatgctggattgaaatctaaggacactaatgttcggtgctttgctattgatcttcttggtggtattgcatcaagattgaagcatgattcggtcatctgtagtgaagagaagctttggatattgcaagatctcactgatgcaggtagcgatggctcaaaaatcttgaaaaacaagtgctgtgtttgtcttggtggaagaggtataaatatagcctgtaatgaatgtggaagatgtttccattcagattgtatgggggctgctagccaggataacttagagcgtgatagtgtttgccccttgtgtttttgcaaacaacagctcaatgtgctacagacgtactgtcagtcacaaattaaagaaaatggcaaaaaaactgctgcgtctactagtaagaaatctgctaaaccagctgaggtgccagcagtggatattattcaacaaatactactgagttatctccaagaatctggtccacaagatgatgggaacctgtttactcgatggttctatctgtgcatctggaacaaagaaaaccaacattctcaggaggagatcatctactatctcgctagattaaaatcaaaagagattctgcgagattctggcaatggtctggcaatttccagagattcagcaaagaaaatttgcttggcacttggtcagaagaactcattttgcaggggttttgataaaattcttgctcttcttttggctagcttgagagaaaattctcctgtaataagagcaaaagccttgcgtgcggtcagcagtatagttgaagctgaccctgaggtcttgggtgacaaacgtgtccaatctgctgtcgaagggaggttttgtgattcggctatttctgttcgtgaagctgcccttgaacttgttgggaggcatattgcttcacatcctgatgtgggcctgaagtatatagaaaaagttgctgagcgaataaaggacactggagtcagcgttcgcaagcgtgcaatcaaaattataagggatctatgtgcttctaatccaaacacagacacaacacatgcctttgtggagataatttctcgtgttaatgatgaggaatccagtgtacaggatcttgtatgtaaaacattttatgaactatggtttgaagaaccaactgggagccataagcacttggttgctgatggaagttcagttccaatggagatagctaaaaagactgagcaaattgttgacatgttgaggaagatgaccaatcaccaacctctgattaccatcataaaacgtaacttgactcttgatttcctccctcagtcaaccaaggctgcagggattaactcatacatggtggcatcaattcagaagcgttgcgaattaatatgcaaacgcttattagaaagaatattgcaggttgaggagggagctgctaaggagatggaaatccacatgcttccttatattgttgctttgcaagcattttgtattgttgatcccacgctctgcattccagtaactgatccttctaagtttgttgtgacactacaaccataccttaatattcaggttgacagtaaatcagctgcccagttgcttgaaagtattatttttgtgattgatgctgttcttccactcataaggaagccaacacaaaatgttgttgaagaacttgagaaagatctgaaacatatgatagttcgccattcgtatttgacagttgtacatgcctgtatcaagtgcctttgtgctctgagcgagtcagcaggtagaggtccaggattagtggaaaaccttgtcaatattttctacaagcatctgtctggagctaattcagatagtcagttattgggtcgatcactgttttgtcttggactcctccttcggtatggttatcaattgatgcaaacatctgaaaatcagcttgattttcccaagattatcaacttgctccagagaaaatatcttctcagggatgattttagcttgaaggttcgagctttgcagactttgggatacatacttattgcgaagcctgaatttatgctacaaaaggatatgttgaaactcatagagacagcactatcttctgaggttgattatagattaaagattcaaggacttcaaaacctctatgagtatctcagagatgctgaaagccaacttactgccgagagcactgtgaaacctcctgtccggtgtgaaataaatggcagaagtaaagtgcctgttgctgctggtgctggagacaccaacatatgtggtggtattattcaattgtattggagttctattcttgaaaggtgcttggatacaaatgatcaagttcgccagagtgcacttaagattgttgaagttgtactccgccagggtttagttcaccctattacctgtgttcctcaccttatagcacttgaaatggacccactggaggggaactcaaagttggctcatcatctgctgatgaatatgaatgaaaagtaccctttattttttgaaagccgtttgggtgatggactacaaatgtcatttaaattctttgaatccatagtcagcaaccataagatggcagcaaacataaaatcaaatccaattgcatttgtcaaacctggcatatctagaatataccgtcttatccgttcaaatcgaaattccagaaacaaatttgtccactcgatagttcggaaattcgagtctgatagccggagtcgcagcacagttagctttcttgtatactgtgccgaagttcttgcctccctgcctttcacatgctccgatgaaccactttacttgatctatgatataaatcgaattattcaccttaaagctggaggagttgagagcaatttgaaaaggtggacttctatgtctcagtctcaaaatacagtggatatgccaacgttgccaggagagaggcatgttgtcatgcaagagcctggcggatattatgataacgtgggctatgcccatgaaagggtgaatgccaatccttgcagtacttcagacgtggacatggccaaagtgcaggttgacgtggatatggccaaagtgcagggagattgccttgatgcaatagcccttcagctactgctgaaattgaagagacatttgaaagttgtctatagtttagatgatgcccgctgtcagtcattttctctaaaggagcctccgaaatctggagaaacattctccaggcagaatattccttttaatgttagcagcactaacatcagtctgccgagctgcctgcaggacgtagcttctgtttaccaggatttcaagacagtgctccacgaagattccatggactttgctgtgttcatcccttcagtccagattaggaagcgcccaaccccgagaaatacgacaaacccaaccccaagaagtacgacgagggtcaggagaacggctgcctcgagtgttacaaaagcccgtggtggcgcacgtggcgatgactccgacgactccgatgatgacgactggaccgggggcccaagagtgcttgacttcagtgggggtggccgtgtgacaaggcagagggtccaagtatgatgactggtcttggtgcttttgtacattctagggaaacctatagcgggtagcagctgacacgaggagagttagggttgagttttaggtttaaagtcgtttagggtacatagaagcagaaaaggaaaggaagatagcctttttacttagatgccattgatttggagcactccttttcttgctctgcccctgtcctgtttgtaattccggtcgggctttggcaaaactgacaaacagggttgtgctccggcttctgatctgattcaatgggaatgaaattattccttttgctttgcctgtataataacagttaagcctatgtttcgtgtaattgtctgccttgctaatgttatatatctgtacgtgtgctgagccttttttgttgaagttc

SEQ ID NO: 67789 - DNA, 5512 bp, Zea Mays
gtcctctactctccattcatccccaccacctccacttgtcgaaattgaaactcaaatcaaatcgaaccacctccacctcggcaacgagcgaattccggtgcgaattggagccctcctccccccgcatctagggtttcgcccatggaccccgccgccggcgggggccggggccgggaccgggcgggcttcgagcgggcgtgccggctgcccaacaccgtccactccgaggtcctgccgtcgctgccgctccccaccctcccgcgcgagctcggcttcgacgcgctccgcgacgacgagcccctcgccgcgcccgaccgccccgacacgatcatgcaggccgccaacatcgcccgcgtcctcgccgacaccgacgtctcccacctgggcttcaccgctgcggacaacgtcgacgtggaccccatccgctgctcctggctctggagggaggtgctcaagcacaaccccgacgctttcaaggtcaaggcgccaagtccgtcttcgcaaggtccatttggaggcccaggatatcaaaatcaagaacatgagaagcactttgagcattttacacctaatacgagcaaagcacgaaatgaatctgcatttcctcaggatgaaattgactcacatagagagcatttttatccaaaaataaggaagagagaaaataacaattctgtttcaagttctgctcccagcattcctaatactcaagatgttatcactaccttctgtgaggtggtggaggatttctgtggaaaaaccgaaattcctgatgatggagatggcggtgactggttgtcaatcccacttggtgatgttaaggttctcgtgaatgaaattacatctgttcgatccaaaaggatattgcatgaggttcctatggatacagttacaaggttattggatgtgattgaccgtcagattcgatattctcaaggtttgtcgatagatgtgaaagaaaattctgatgtcgttgatgctgaacctctggttttctctgctttggaggccagtcatgctgcgttggcaattatgacccaccatgatatgccaaagcaactgtaccgagaagaacttattgagcggattattgatttctcaaggcatcagatcacagattgtatggcagcaagtaacccaaccttccgagctctctacaaaccagctgaaaatgttgcaaatgatggagatgatgatgaagatgatttggaaaatggacaagttagcaagaggagacgtactgctactaatttgagcatgagaaaatcttcaaacaacagaacctaccatctagcagatgaagaccaaaagcaaatccagatgataacagcactgttagttcacctggttcagtttagtgcaattgttcccaatagcttaaaaggaacagttgattggaccactattgttgatgcctccggagatgctgattattatccaattaaatgccatgaagcggcaacagaggcttgttgccgtttttggactgatgtccttcaacgttttactgctgctaaatctcaagatatgtcggaaaccaaaggaataatagataatcttgttcaggatttcctaatgatactaaacttgccggagtatccagctgctgcttctatccttgaggttctctgtgtgttgctccttcagaatgctggattgaaatctaaggacactaatgttcggtgctttgctattgatcttcttggtggtattgcatcaagattgaagcatgattcggtcatctgtagtgaagagaagctttggatattgcaagatctcactgatgcaggtagcgatggctcaaaaatcttgaaaaacaagtgctgtgtttgtcttggtggaagagattgtatgggggctgctagccaggataacttagagcgtgatagtgtttgccccttgtgtttttgcaaacaacagctcaatgtgctacagacgtactgtcagtcacaaattaaagaaaatggcaaaaaaactgctgcgtctactagtaagaaatctgctaaaccagctgaggtgccagcagtggatattattcaacaaatactactgagttatctccaagaatctggtccacaagatgatgggaacctgtttactcgatggttctatctgtgcatctggaacaaagaaaaccaacattctcaggaggagatcatctactatctcgctagattaaaatcaaaagagattctgcgagattctggcaatggtctggcaatttccagagattcagcaaagaaaatttgcttggcacttggtcagaagaactcattttgcaggggttttgataaaattcttgctcttcttttggctagcttgagagaaaattctcctgtaataagagcaaaagccttgcgtgcggtcagcagtatagttgaagctgaccctgaggtcttgggtgacaaacgtgtccaatctgctgtcgaagggaggttttgtgattcggctatttctgttcgtgaagctgcccttgaacttgttgggaggcatattgcttcacatcctgatgtgggcctgaagtatatagaaaaagttgctgagcgaataaaggacactggagtcagcgttcgcaagcgtgcaatcaaaattataagggatctatgtgcttctaatccaaacacagacacaacacatgcctttgtggagataatttctcgtgttaatgatgaggaatccagtgtacaggatcttgtatgtaaaacattttatgaactatggtttgaagaaccaactgggagccataagcacttggttgctgatggaagttcagttccaatggagatagctaaaaagactgagcaaattgttgacatgttgaggaagatgaccaatcaccaacctctgattaccatcataaaacgtaacttgactcttgatttcctccctcagtcaaccaaggctgcagggattaactcatacatggtggcatcaattcagaagcgttgcgaattaatatgcaaacgcttattagaaagaatattgcaggttgaggagggagctgctaaggagatggaaatccacatgcttccttatattgttgctttgcaagcattttgtattgttgatcccacgctctgcattccagtaactgatccttctaagtttgttgtgacactacaaccataccttaatattcaggttgacagtaaatcagctgcccagttgcttgaaagtattatttttgtgattgatgctgttcttccactcataaggaagccaacacaaaatgttgttgaagaacttgagaaagatctgaaacatatgatagttcgccattcgtatttgacagttgtacatgcctgtatcaagtgcctttgtgctctgagcgagtcagcaggtagaggtccaggattagtggaaaaccttgtcaatattttctacaagcatctgtctggagctaattcagatagtcagttattgggtcgatcactgttttgtcttggactcctccttcggtatggttatcaattgatgcaaacatctgaaaatcagcttgattttcccaagattatcaacttgctccagagaaaatatcttctcagggatgattttagcttgaaggttcgagctttgcagactttgggatacatacttattgcgaagcctgaatttatgctacaaaaggatatgttgaaactcatagagacagcactatcttctgaggttgattatagattaaagattcaaggacttcaaaacctctatgagtatctcagagatgctgaaagccaacttactgccgagagcactgtgaaacctcctgtccggtgtgaaataaatggcagaagtaaagtgcctgttgctgctggtgctggagacaccaacatatgtggtggtattattcaattgtattggagttctattcttgaaaggtgcttggatacaaatgatcaagttcgccagagtgcacttaagattgttgaagttgtactccgccagggtttagttcaccctattacctgtgttcctcaccttatagcacttgaaatggacccactggaggggaactcaaagttggctcatcatctgctgatgaatatgaatgaaaagtaccctttattttttgaaagccgtttgggtgatggactacaaatgtcatttaaattctttgaatccatagtcagcaaccataagatggcagcaaacataaaatcaaatccaattgcatttgtcaaacctggcatatctagaatataccgtcttatccgttcaaatcgaaattccagaaacaaatttgtccactcgatagttcggaaattcgagtctgatagccggagtcgcagcacagttagctttcttgtatactgtgccgaagttcttgcctccctgcctttcacatgctccgatgaaccactttacttgatctatgatataaatcgaattattcaccttaaagctggaggagttgagagcaatttgaaaaggtggacttctatgtctcagtctcaaaatacagtggatatgccaacgttgccaggagagaggcatgttgtcatgcaagagcctggcggatattatgataacgtgggctatgcccatgaaagggtgaatgccaatccttgcagtacttcagacgtggacatggccaaagtgcaggttgacgtggatatggccaaagtgcagggagattgccttgatgcaatagcccttcagctactgctgaaattgaagagacatttgaaagttgtctatagtttagatgatgcccgctgtcagtcattttctctaaaggagcctccgaaatctggagaaacattctccaggcagaatattccttttaatgttagcagcactaacatcagtctgccgagctgcctgcaggacgtagcttctgtttaccaggatttcaagacagtgctccacgaagattccatggactttgctgtgttcatcccttcagtccagattaggaagcgcccaaccccgagaaatacgacaaacccaaccccaagaagtacgacgagggtcaggagaacggctgcctcgagtgttacaaaagcccgtggtggcgcacgtggcgatgactccgacgactccgatgatgacgactggaccgggggcccaagagtgcttgacttcagtgggggtggccgtgtgacaaggcagagggtccaagtatgatgactggtcttggtgcttttgtacattctagggaaacctatagcgggtagcagctgacacgaggagagttagggttgagttttaggtttaaagtcgtttagggtacatagaagcagaaaaggaaaggaagatagcctttttacttagatgccattgatttggagcactccttttcttgctctgcccctgtcctgtttgtaattccggtcgggctttggcaaaactgacaaacagggttgtgctccggcttctgatctgattcaatgggaatgaaattattccttttgctttgcctgtataataacagttaagcctatgtttcgtgtaattgtctgccttgctaatgttatatatctgtacgtgtgctgagccttttttgttgaagttc

SEQ ID NO: 67790 - DNA, 5531 bp, Zea Mays
ctagtcctctactctccattcatccccaccacctccacttgtcgaaattgaaactcaaatcaaatcgaaccacctccacctcggcaacgagcgaattccggtgcgaattggagccctcctccccccgcatctagggtttcgcccatggaccccgccgccggcgggggccggggccgggaccgggcgggcttcgagcgggcgtgccggctgcccaacaccgtccactccgaggtcctgccgtcgctgccgctccccaccctcccgcgcgagctcggcttcgacgcgctccgcgacgacgagcccctcgccgcgcccgaccgccccgacacgatcatgcaggccgccaacatcgcccgcgtcctcgccgacaccgacgtctcccacctgggcttcaccgctgcggacaacgtcgacgtggaccccatccgctgctcctggctctggagggaggtgctcaagcacaaccccgacgctttcaaggtcaaggcgccaagtccgtcttcgcaaggtccatttggaggcccaggatatcaaaatcaagaacatgagaagcactttgagcattttacacctaatacgagcaaagcacgaaatgaatctgcatttcctcaggatgaaattgactcacatagagagcatttttataatgaactgacctcagattcaattgcttcaaagaagccaaaaataaggaagagagaaaataacaattctgtttcaagttctgctcccagcattcctaatactcaagatgttatcactaccttctgtgaggtggtggaggatttctgtggaaaaaccgaaattcctgatgatggagatggcggtgactggttgtcaatcccacttggtgatgttaaggttctcgtgaatgaaattacatctgttcgatccaaaaggatattgcatgaggttcctatggatacagttacaaggttattggatgtgattgaccgtcagattcgatattctcaaggtttgtcgatagatgtgaaagaaaattctgatgtcgttgatgctgaacctctggttttctctgctttggaggccagtcatgctgcgttggcaattatgacccaccatgatatgccaaagcaactgtaccgagaagaacttattgagcggattattgatttctcaaggcatcagatcacagattgtatggcagcaagtaacccaaccttccgagctctctacaaaccagctgaaaatgttgcaaatgatggagatgatgatgaagatgatttggaaaatggacaagttagcaagaggagacgtactgctactaatttgagcatgagaaaatcttcaaacaacagaacctaccatctagcagatgaagaccaaaagcaaatccagatgataacagcactgttagttcacctggttcagtttagtgcaattgttcccaatagcttaaaaggaacagttgattggaccactattgttgatgcctccggagatgctgattattatccaattaaatgccatgaagcggcaacagaggcttgttgccgtttttggactgatgtccttcaacgttttactgctgctaaatctcaagatatgtcggaaaccaaaggaataatagataatcttgttcaggatttcctaatgatactaaacttgccggagtatccagctgctgcttctatccttgaggttctctgtgtgttgctccttcagaatgctggattgaaatctaaggacactaatgttcggtgctttgctattgatcttcttggtggtattgcatcaagattgaagcatgattcggtcatctgtagtgaagagaagctttggatattgcaagatctcactgatgcaggtagcgatggctcaaaaatcttgaaaaacaagtgctgtgtttgtcttggtggaagagattgtatgggggctgctagccaggataacttagagcgtgatagtgtttgccccttgtgtttttgcaaacaacagctcaatgtgctacagacgtactgtcagtcacaaattaaagaaaatggcaaaaaaactgctgcgtctactagtaagaaatctgctaaaccagctgaggtgccagcagtggatattattcaacaaatactactgagttatctccaagaatctggtccacaagatgatgggaacctgtttactcgatggttctatctgtgcatctggaacaaagaaaaccaacattctcaggaggagatcatctactatctcgctagattaaaatcaaaagagattctgcgagattctggcaatggtctggcaatttccagagattcagcaaagaaaatttgcttggcacttggtcagaagaactcattttgcaggggttttgataaaattcttgctcttcttttggctagcttgagagaaaattctcctgtaataagagcaaaagccttgcgtgcggtcagcagtatagttgaagctgaccctgaggtcttgggtgacaaacgtgtccaatctgctgtcgaagggaggttttgtgattcggctatttctgttcgtgaagctgcccttgaacttgttgggaggcatattgcttcacatcctgatgtgggcctgaagtatatagaaaaagttgctgagcgaataaaggacactggagtcagcgttcgcaagcgtgcaatcaaaattataagggatctatgtgcttctaatccaaacacagacacaacacatgcctttgtggagataatttctcgtgttaatgatgaggaatccagtgtacaggatcttgtatgtaaaacattttatgaactatggtttgaagaaccaactgggagccataagcacttggttgctgatggaagttcagttccaatggagatagctaaaaagactgagcaaattgttgacatgttgaggaagatgaccaatcaccaacctctgattaccatcataaaacgtaacttgactcttgatttcctccctcagtcaaccaaggctgcagggattaactcatacatggtggcatcaattcagaagcgttgcgaattaatatgcaaacgcttattagaaagaatattgcaggttgaggagggagctgctaaggagatggaaatccacatgcttccttatattgttgctttgcaagcattttgtattgttgatcccacgctctgcattccagtaactgatccttctaagtttgttgtgacactacaaccataccttaatattcaggttgacagtaaatcagctgcccagttgcttgaaagtattatttttgtgattgatgctgttcttccactcataaggaagccaacacaaaatgttgttgaagaacttgagaaagatctgaaacatatgatagttcgccattcgtatttgacagttgtacatgcctgtatcaagtgcctttgtgctctgagcgagtcagcaggtagaggtccaggattagtggaaaaccttgtcaatattttctacaagcatctgtctggagctaattcagatagtcagactttgggatacatacttattgcgaagcctgaatttatgctacaaaaggatatgttgaaactcatagagacagcactatcttctgaggttgattatagattaaaggtacttcacaactccttttggtttttttgtttgaaaagttaagtaaattaatccacctgttcagattcaaggacttcaaaacctctatgagtatctcagagatgctgaaagccaacttactgccgagagcactgtgaaacctcctgtccggtgtgaaataaatggcagaagtaaagtgcctgttgctgctggtgctggagacaccaacatatgtggtggtattattcaattgtattggagttctattcttgaaaggtgcttggatacaaatgatcaagttcgccagagtgcacttaaggtgaattataggcaggcattacatttcttgtcacactttatcttaccattttacaatagaaataaattcttcttgtagattgttgaagttgtactccgccagggtttagttcaccctattacctgtgttcctcaccttatagcacttgaaatggacccactggaggggaactcaaagttggctcatcatctgctgatgaatatgaatgaaaagtaccctttattttttgaaagccgtttgggtgatggactacaaatgtcatttaaattctttgaatccatagtcagcaaccataagatggcagcaaacataaaatcaaatccaattgcatttgtcaaacctggcatatctagaatataccgtcttatccgttcaaatcgaaattccagaaacaaatttgtccactcgatagttcggaaattcgagtctgatagccggagtcgcagcacagttagctttcttgtatactgtgccgaagttcttgcctccctgcctttcacatgctccgatgaaccactttacttgatctatgatataaatcgaattattcaccttaaagctggaggagttgagagcaatttgaaaaggtggacttctatgtctcagtctcaaaatacagtggatatgccaacgttgccaggagagaggcatgttgtcatgcaagagcctggcggatattatgataacgtgggctatgcccatgaaagggtgaatgccaatccttgcagtacttcagacgtggacatggccaaagtgcaggttgacgtggatatggccaaagtgcagggagattgccttgatgcaatagcccttcagctactgctgaaattgaagagacatttgaaagttgtctatagtttagatgatgcccgctgtcagtcattttctctaaaggagcctccgaaatctggagaaacattctccaggcagaatattccttttaatgttagcagcactaacatcagtctgccgagctgcctgcaggacgtagcttctgtttaccaggatttcaagacagtgctccacgaagattccatggactttgctgtgttcatcccttcagtccagattaggaagcgcccaaccccgagaaatacgacaaacccaaccccaagaagtacgacgagggtcaggagaacggctgcctcgagtgttacaaaagcccgtggtggcgcacgtggcgatgactccgacgactccgatgatgacgactggaccgggggcccaagagtgcttgacttcagtgggggtggccgtgtgacaaggcagagggtccaagtatgatgactggtcttggtgcttttgtacattctagggaaacctatagcgggtagcagctgacacgaggagagttagggttgagttttaggtttaaagtcgtttagggtacatagaagcagaaaaggaaaggaagatagcctttttacttagatgccattgatttggagcactccttttcttgctctgcccctgtcctgtttgtaattccggtcgggctttggcaaaactgacaaacagggttgtgctccggcttctgatctgattcaatgggaatgaaattattccttttgctttgcctgtataataacagttaagcctatgtttcgtgtaattgtctgccttgctaatgttatatatctgtacgtgtgctgagccttttttgttgaagttc

SEQ ID NO: 67791 - DNA, 5830 bp, Zea Mays
agcagcagtagataaatactgctgcggctggctgctgtacccctcctagtcggctagtcctctactctccattcatccccaccacctccacttgtcgaaattgaaactcaaatcaaatcgaaccacctccacctcggcaacgagcgaattccggtgcgaattggagccctcctccccccgcatctagggtttcgcccatggaccccgccgccggcgggggccggggccgggaccgggcgggcttcgagcgggcgtgccggctgcccaacaccgtccactccgaggtcctgccgtcgctgccgctccccaccctcccgcgcgagctcggcttcgacgcgctccgcgacgacgagcccctcgccgcgcccgaccgccccgacacgatcatgcaggccgccaacatcgcccgcgtcctcgccgacaccgacgtctcccacctgggcttcaccgctgcggacaacgtcgacgtggaccccatccgctgctcctggctctggagggaggtgctcaagcacaaccccgacgctttcaaggtcaaggcgccaagtccgtcttcgcaaggtccatttggaggcccaggatatcaaaatcaagaacatgagaagcactttgagcattttacacctaatacgagcaaagcacgaaatgaatctgcatttcctcaggatgaaattgactcacatagagagcatttttataatgaactgacctcagattcaattgcttcaaagaagccaaaaataaggaagagagaaaataacaattctgtttcaagttctgctcccagcattcctaatactcaagatgttatcactaccttctgtgaggtggtggaggatttctgtggaaaaaccgaaattcctgatgatggagatggcggtgactggttgtcaatcccacttggtgatgttaaggttctcgtgaatgaaattacatctgttcgatccaaaaggatattgcatgaggttcctatggatacagttacaaggttattggatgtgattgaccgtcagattcgatattctcaaggtttgtcgatagatgtgaaagaaaattcatgctgcgttggcaattatgacccaccatgatatgccaaagcaactgtaccgagaagaacttattgagcggattattgatttctcaaggcatcagatcacagattgtatggcagcaagtaacccaaccttccgagctctctacaaaccagctgaaaatgttgcaaatgatggagatgatgatgaagatgatttggaaaatggacaagttagcaagaggagacgtactgctactaatttgagcatgagaaaatcttcaaacaaactttctgcttctgtttattctgctgtgcagaaactatgcttgatattgggctttcttaaggaactgctcacaacagtgcgcttgtcagatggttgtattctgcagttagcgaaaacatgctttactacattcttggtggataatatgcagctattacaattaaaagcaatcggggttatttgcacggtgttttcgtcatacacacagcacaggagttacttggttgatgaaatacttcaccttcttcgcaagttgcagttttccaaaaatgccgtcagaacctaccatctagcagatgaagaccaaaagcaaatccagatgataacagcactgttagttcacctggttcagtttagtgcaattgttcccaatagcttaaaaggaacagttgattggaccactattgttgatgcctccggagatgctgattattatccaattaaatgccatgaagcggcaacagaggcttgttgccgtttttggactgatgtccttcaacgttttactgctgctaaatctcaagatatgtcggaaaccaaaggaataatagataatcttgttcaggatttcctaatgatactaaacttgccggagtatccagctgctgcttctatccttgaggttctctgtgtgttgctccttcagaatgctggattgaaatctaaggacactaatgttcggtgctttgctattgatcttcttggtggtattgcatcaagattgaagcatgattcggtcatctgtagtgaagagaagctttggatattgcaagatctcactgatgcaggtagcgatggctcaaaaatcttgaaaaacaagtgctgtgtttgtcttggtggaagagattgtatgggggctgctagccaggataacttagagcgtgatagtgtttgccccttgtgtttttgcaaacaacagctcaatgtgctacagacgtactgtcagtcacaaattaaagaaaatggcaaaaaaactgctgcgtctactagtaagaaatctgctaaaccagctgaggtgccagcagtggatattattcaacaaatactactgagttatctccaagaatctggtccacaagatgatgggaacctgtttactcgatggttctatctgtgcatctggaacaaagaaaaccaacattctcaggaggagatcatctactatctcgctagattaaaatcaaaagagattctgcgagattctggcaatggtctggcaatttccagagattcagcaaagaaaatttgcttggcacttggtcagaagaactcattttgcaggggttttgataaaattcttgctcttcttttggctagcttgagagaaaattctcctgtaataagagcaaaagccttgcgtgcggtcagcagtatagttgaagctgaccctgaggtcttgggtgacaaacgtgtccaatctgctgtcgaagggaggttttgtgattcggctatttctgttcgtgaagctgcccttgaacttgttgggaggcatattgcttcacatcctgatgtgggcctgaagtatatagaaaaagttgctgagcgaataaaggacactggagtcagcgttcgcaagcgtgcaatcaaaattataagggatctatgtgcttctaatccaaacacagacacaacacatgcctttgtggagataatttctcgtgttaatgatgaggaatccagtgtacaggatcttgtatgtaaaacattttatgaactatggtttgaagaaccaactgggagccataagcacttggttgctgatggaagttcagttccaatggagatagctaaaaagactgagcaaattgttgacatgttgaggaagatgaccaatcaccaacctctgattaccatcataaaacgtaacttgactcttgatttcctccctcagtcaaccaaggctgcagggattaactcatacatggtggcatcaattcagaagcgttgcgaattaatatgcaaacgcttattagaaagaatattgcaggttgaggagggagctgctaaggagatggaaatccacatgcttccttatattgttgctttgcaagcattttgtattgttgatcccacgctctgcattccagtaactgatccttctaagtttgttgtgacactacaaccataccttaatattcaggttgacagtaaatcagctgcccagttgcttgaaagtattatttttgtgattgatgctgttcttccactcataaggaagccaacacaaaatgttgttgaagaacttgagaaagatctgaaacatatgatagttcgccattcgtatttgacagttgtacatgcctgtatcaagtgcctttgtgctctgagcgagtcagcaggtagaggtccaggattagtggaaaaccttgtcaatattttctacaagcatctgtctggagctaattcagatagtcagttattgggtcgatcactgttttgtcttggactcctccttcggtatggttatcaattgatgcaaacatctgaaaatcagcttgattttcccaagattatcaacttgctccagagaaaatatcttctcagggatgattttagcttgaaggttcgagctttgcagactttgggatacatacttattgcgaagcctgaatttatgctacaaaaggatatgttgaaactcatagagacagcactatcttctgaggttgattatagattaaagattcaaggacttcaaaacctctatgagtatctcagagatgctgaaagccaacttactgccgagagcactgtgaaacctcctgtccggtgtgaaataaatggcagaagtaaagtgcctgttgctgctggtgctggagacaccaacatatgtggtggtattattcaattgtattggagttctattcttgaaaggtgcttggatacaaatgatcaagttcgccagagtgcacttaagattgttgaagttgtactccgccagggtttagttcaccctattacctgtgttcctcaccttatagcacttgaaatggacccactggaggggaactcaaagttggctcatcatctgctgatgaatatgaatgaaaagtaccctttattttttgaaagccgtttgggtgatggactacaaatgtcatttaaattctttgaatccatagtcagcaaccataagatggcagcaaacataaaatcaaatccaattgcatttgtcaaacctggcatatctagaatataccgtcttatccgttcaaatcgaaattccagaaacaaatttgtccactcgatagttcggaaattcgagtctgatagccggagtcgcagcacagttagctttcttgtatactgtgccgaagttcttgcctccctgcctttcacatgctccgatgaaccactttacttgatctatgatataaatcgaattattcaccttaaagctggaggagttgagagcaatttgaaaaggtggacttctatgtctcagtctcaaaatacagtggatatgccaacgttgccaggagagaggcatgttgtcatgcaagagcctggcggatattatgataacgtgggctatgcccatgaaagggtgaatgccaatccttgcagtacttcagacgtggacatggccaaagtgcaggttgacgtggatatggccaaagtgcagggagattgccttgatgcaatagcccttcagctactgctgaaattgaagagacatttgaaagttgtctatagtttagatgatgcccgctgtcagtcattttctctaaaggagcctccgaaatctggagaaacattctccaggcagaatattccttttaatgttagcagcactaacatcagtctgccgagctgcctgcaggacgtagcttctgtttaccaggatttcaagacagtgctccacgaagattccatggactttgctgtgttcatcccttcagtccagattaggaagcgcccaaccccgagaaatacgacaaacccaaccccaagaagtacgacgagggtcaggagaacggctgcctcgagtgttacaaaagcccgtggtggcgcacgtggcgatgactccgacgactccgatgatgacgactggaccgggggcccaagagtgcttgacttcagtgggggtggccgtgtgacaaggcagagggtccaagtatgatgactggtcttggtgcttttgtacattctagggaaacctatagcgggtagcagctgacacgaggagagttagggttgagttttaggtttaaagtcgtttagggtacatagaagcagaaaaggaaaggaagatagcctttttacttagatgccattgatttggagcactccttttcttgctctgcccctgtcctgtttgtaattccggtcgggctttggcaaaactgacaaacagggttgtgctccggcttctgatctgattcaatgggaatgaaattattccttttgctttgcctgtataataacagttaagcctatgtttcgtgtaattgtctgccttgctaatgttatatatctgtacgtgtgctgagccttttttgttgaagttc

SEQ ID NO: 67792 - DNA, 5849 bp, Zea Mays
gttactactgtagcagcagtagataaatactgctgcggctggctgctgtacccctcctagtcggctagtcctctactctccattcatccccaccacctccacttgtcgaaattgaaactcaaatcaaatcgaaccacctccacctcggcaacgagcgaattccggtgcgaattggagccctcctccccccgcatctagggtttcgcccatggaccccgccgccggcgggggccggggccgggaccgggcgggcttcgagcgggcgtgccggctgcccaacaccgtccactccgaggtcctgccgtcgctgccgctccccaccctcccgcgcgagctcggcttcgacgcgctccgcgacgacgagcccctcgccgcgcccgaccgccccgacacgatcatgcaggccgccaacatcgcccgcgtcctcgccgacaccgacgtctcccacctgggcttcaccgctgcggacaacgtcgacgtggaccccatccgctgctcctggctctggagggaggtgctcaagcacaaccccgacgctttcaaggtcaaggcgccaagtccgtcttcgcaagtttttcaggtccatttggaggcccaggatatcaaaatcaagaacatgagaagcactttgagcattttacacctaatacgagcaaagcacgaaatgaatctgcatttcctcaggatgaaattgactcacatagagagcatttttataatgaactgacctcagattcaattgcttcaaagaagccaaaaataaggaagagagaaaataacaattctgtttcaagttctgctcccagcattcctaatactcaagatgttatcactaccttctgtgaggtggtggaggatttctgtggaaaaaccgaaattcctgatgatggagatggcggtgactggttgtcaatcccacttggtgatgttaaggttctcgtgaatgaaattacatctgttcgatccaaaaggatattgcatgaggttcctatggatacagttacaaggttattggatgtgattgaccgtcagattcgatattctcaaggtttgtcgatagatgtgaaagaaaattcatgctgcgttggcaattatgacccaccatgatatgccaaagcaactgtaccgagaagaacttattgagcggattattgatttctcaaggcatcagatcacagattgtatggcagcaagtaacccaaccttccgagctctctacaaaccagctgaaaatgttgcaaatgatggagatgatgatgaagatgatttggaaaatggacaagttagcaagaggagacgtactgctactaatttgagcatgagaaaatcttcaaacaaactttctgcttctgtttattctgctgtgcagaaactatgcttgatattgggctttcttaaggaactgctcacaacagtgcgcttgtcagatggttgtattctgcagttagcgaaaacatgctttactacattcttggtggataatatgcagctattacaattaaaagcaatcggggttatttgcacggtgttttcgtcatacacacagcacaggagttacttggttgatgaaatacttcaccttcttcgcaagttgcagttttccaaaaatgccgtcagaacctaccatctagcagatgaagaccaaaagcaaatccagatgataacagcactgttagttcacctggttcagtttagtgcaattgttcccaatagcttaaaaggaacagttgattggaccactattgttgatgcctccggagatgctgattattatccaattaaatgccatgaagcggcaacagaggcttgttgccgtttttggactgatgtccttcaacgttttactgctgctaaatctcaagatatgtcggaaaccaaaggaataatagataatcttgttcaggatttcctaatgatactaaacttgccggagtatccagctgctgcttctatccttgaggttctctgtgtgttgctccttcagaatgctggattgaaatctaaggacactaatgttcggtgctttgctattgatcttcttggtggtattgcatcaagattgaagcatgattcggtcatctgtagtgaagagaagctttggatattgcaagatctcactgatgcaggtagcgatggctcaaaaatcttgaaaaacaagtgctgtgtttgtcttggtggaagagattgtatgggggctgctagccaggataacttagagcgtgatagtgtttgccccttgtgtttttgcaaacaacagctcaatgtgctacagacgtactgtcagtcacaaattaaagaaaatggcaaaaaaactgctgcgtctactagtaagaaatctgctaaaccagctgaggtgccagcagtggatattattcaacaaatactactgagttatctccaagaatctggtccacaagatgatgggaacctgtttactcgatggttctatctgtgcatctggaacaaagaaaaccaacattctcaggaggagatcatctactatctcgctagattaaaatcaaaagagattctgcgagattctggcaatggtctggcaatttccagagattcagcaaagaaaatttgcttggcacttggtcagaagaactcattttgcaggggttttgataaaattcttgctcttcttttggctagcttgagagaaaattctcctgtaataagagcaaaagccttgcgtgcggtcagcagtatagttgaagctgaccctgaggtcttgggtgacaaacgtgtccaatctgctgtcgaagggaggttttgtgattcggctatttctgttcgtgaagctgcccttgaacttgttgggaggcatattgcttcacatcctgatgtgggcctgaagtatatagaaaaagttgctgagcgaataaaggacactggagtcagcgttcgcaagcgtgcaatcaaaattataagggatctatgtgcttctaatccaaacacagacacaacacatgcctttgtggagataatttctcgtgttaatgatgaggaatccagtgtacaggatcttgtatgtaaaacattttatgaactatggtttgaagaaccaactgggagccataagcacttggttgctgatggaagttcagttccaatggagatagctaaaaagactgagcaaattgttgacatgttgaggaagatgaccaatcaccaacctctgattaccatcataaaacgtaacttgactcttgatttcctccctcagtcaaccaaggctgcagggattaactcatacatggtggcatcaattcagaagcgttgcgaattaatatgcaaacgcttattagaaagaatattgcaggttgaggagggagctgctaaggagatggaaatccacatgcttccttatattgttgctttgcaagcattttgtattgttgatcccacgctctgcattccagtaactgatccttctaagtttgttgtgacactacaaccataccttaatattcaggttgacagtaaatcagctgcccagttgcttgaaagtattatttttgtgattgatgctgttcttccactcataaggaagccaacacaaaatgttgttgaagaacttgagaaagatctgaaacatatgatagttcgccattcgtatttgacagttgtacatgcctgtatcaagtgcctttgtgctctgagcgagtcagcaggtagaggtccaggattagtggaaaaccttgtcaatattttctacaagcatctgtctggagctaattcagatagtcagttattgggtcgatcactgttttgtcttggactcctccttcggtatggttatcaattgatgcaaacatctgaaaatcagcttgattttcccaagattatcaacttgctccagagaaaatatcttctcagggatgattttagcttgaaggttcgagctttgcagactttgggatacatacttattgcgaagcctgaatttatgctacaaaaggatatgttgaaactcatagagacagcactatcttctgaggttgattatagattaaagattcaaggacttcaaaacctctatgagtatctcagagatgctgaaagccaacttactgccgagagcactgtgaaacctcctgtccggtgtgaaataaatggcagaagtaaagtgcctgttgctgctggtgctggagacaccaacatatgtggtggtattattcaattgtattggagttctattcttgaaaggtgcttggatacaaatgatcaagttcgccagagtgcacttaagattgttgaagttgtactccgccagggtttagttcaccctattacctgtgttcctcaccttatagcacttgaaatggacccactggaggggaactcaaagttggctcatcatctgctgatgaatatgaatgaaaagtaccctttattttttgaaagccgtttgggtgatggactacaaatgtcatttaaattctttgaatccatagtcagcaaccataagatggcagcaaacataaaatcaaatccaattgcatttgtcaaacctggcatatctagaatataccgtcttatccgttcaaatcgaaattccagaaacaaatttgtccactcgatagttcggaaattcgagtctgatagccggagtcgcagcacagttagctttcttgtatactgtgccgaagttcttgcctccctgcctttcacatgctccgatgaaccactttacttgatctatgatataaatcgaattattcaccttaaagctggaggagttgagagcaatttgaaaaggtggacttctatgtctcagtctcaaaatacagtggatatgccaacgttgccaggagagaggcatgttgtcatgcaagagcctggcggatattatgataacgtgggctatgcccatgaaagggtgaatgccaatccttgcagtacttcagacgtggacatggccaaagtgcaggttgacgtggatatggccaaagtgcagggagattgccttgatgcaatagcccttcagctactgctgaaattgaagagacatttgaaagttgtctatagtttagatgatgcccgctgtcagtcattttctctaaaggagcctccgaaatctggagaaacattctccaggcagaatattccttttaatgttagcagcactaacatcagtctgccgagctgcctgcaggacgtagcttctgtttaccaggatttcaagacagtgctccacgaagattccatggactttgctgtgttcatcccttcagtccagattaggaagcgcccaaccccgagaaatacgacaaacccaaccccaagaagtacgacgagggtcaggagaacggctgcctcgagtgttacaaaagcccgtggtggcgcacgtggcgatgactccgacgactccgatgatgacgactggaccgggggcccaagagtgcttgacttcagtgggggtggccgtgtgacaaggcagagggtccaagtatgatgactggtcttggtgcttttgtacattctagggaaacctatagcgggtagcagctgacacgaggagagttagggttgagttttaggtttaaagtcgtttagggtacatagaagcagaaaaggaaaggaagatagcctttttacttagatgccattgatttggagcactccttttcttgctctgcccctgtcctgtttgtaattccggtcgggctttggcaaaactgacaaacagggttgtgctccggcttctgatctgattcaatgggaatgaaattattccttttgctttgcctgtataataacagttaagcctatgtttcgtgtaattgtctgccttgctaatgttatatatctgtacgtgtgctgagccttttttgttgaagttc

SEQ ID NO: 67793 - DNA, 6096 bp, Zea Mays
ctccctccggccaacgttactactgtagcagcagtagataaatactgctgcggctggctgctgtacccctcctagtcggctagtcctctactctccattcatccccaccacctccacttgtcgaaattgaaactcaaatcaaatcgaaccacctccacctcggcaacgagcgaattccggtgcgaattggagccctcctccccccgcatctagggtttcgcccatggaccccgccgccggcgggggccggggccgggaccgggcgggcttcgagcgggcgtgccggctgcccaacaccgtccactccgaggtcctgccgtcgctgccgctccccaccctcccgcgcgagctcggcttcgacgcgctccgcgacgacgagcccctcgccgcgcccgaccgccccgacacgatcatgcaggccgccaacatcgcccgcgtcctcgccgacaccgacgtctcccacctgggcttcaccgctgcggacaacgtcgacgtggaccccatccgctgctcctggctctggagggaggtgctcaagcacaaccccgacgctttcaaggtcaaggcgccaagtccgtcttcgcaaggtccatttggaggcccaggatatcaaaatcaagaacatgagaagcactttgagcattttacacctaatacgagcaaagcacgaaatgaatctgcatttcctcaggatgaaattgactcacatagagagcatttttataatgaactgacctcagattcaattgcttcaaagaagccaaaaataaggaagagagaaaataacaattctgtttcaagttctgctcccagcattcctaatactcaagatgttatcactaccttctgtgaggtggtggaggatttctgtggaaaaaccgaaattcctgatgatggagatggcggtgactggttgtcaatcccacttggtgatgttaaggttctcgtgaatgaaattacatctgttcgatccaaaaggatattgcatgaggttcctatggatacagttacaaggttattggatgtgattgaccgtcagattcgatattctcaaggtttgtcgatagatgtgaaagaaaattctgatgtcgttgatgctgaacctctggttttctctgctttggaggccagtcatgctgcgttggcaattatgacccaccatgatatgccaaagcaactgtaccgagaagaacttattgagcggattattgatttctcaaggcatcagatcacagattgtatggcagcaagtaacccaaccttccgagctctctacaaaccagctgaaaatgttgcaaatgatggagatgatgatgaagatgatttggaaaatggacaagttagcaagaggagacgtactgctactaatttgagcatgagaaaatcttcaaacaacagaacctaccatctagcagatgaagaccaaaagcaaatccagatgataacagcactgttagttcacctggttcagtttagtgcaattgttcccaatagcttaaaaggaacagttgattggaccactattgttgatgcctccggagatgctgattattatccaattaaatgccatgaagcggcaacagaggcttgttgccgtttttggactgatgtccttcaacgttttactgctgctaaatctcaagatatgtcggaaaccaaaggaataatagataatcttgttcaggatttcctaatgatactaaacttgccggagtatccagctgctgcttctatccttgaggttctctgtgtgttgctccttcagaatgctggattgaaatctaaggacactaatgttcggtgctttgctattgatcttcttggtggtattgcatcaagattgaagcatgattcggtcatctgtagtgaagagaagctttggatattgcaagatctcactgatgcaggtagcgatggctcaaaaatcttgaaaaacaagtgctgtgtttgtcttggtggaagaggtataaatatagcctgtaatgaatgtggaagatgtttccattcagattgtatgggggctgctagccaggataacttagagcgtgatagtgtttgccccttgtgtttttgcaaacaacagctcaatgtgctacagacgtactgtcagtcacaaattaaagaaaatggcaaaaaaactgctgcgtctactagtaagaaatctgctaaaccagctgaggtgccagcagtggatattattcaacaaatactactgagttatctccaagaatctggtccacaagatgatgggaacctgtttactcgatggttctatctgtgcatctggaacaaagaaaaccaacattctcaggaggagatcatctactatctcgctagattaaaatcaaaagagattctgcgagattctggcaatggtctggcaatttccagagattcagcaaagaaaatttgcttggcacttggtcagaagaactcattttgcaggggttttgataaaattcttgctcttcttttggctagcttgagagaaaattctcctgtaataagagcaaaagccttgcgtgcggtcagcagtatagttgaagctgaccctgaggtcttgggtgacaaacgtgtccaatctgctgtcgaagggaggttttgtgattcggctatttctgttcgtgaagctgcccttgaacttgttgggaggcatattgcttcacatcctgatgtgggcctgaagtatatagaaaaagttgctgagcgaataaaggacactggagtcagcgttcgcaagcgtgcaatcaaaattataagggatctatgtgcttctaatccaaacacagacacaacacatgcctttgtggagataatttctcgtgttaatgatgaggaatccagtgtacaggatcttgtatgtaaaacattttatgaactatggtttgaagaaccaactgggagccataagcacttggttgctgatggaagttcagttccaatggagatagctaaaaagactgagcaaattgttgacatgttgaggaagatgaccaatcaccaacctctgattaccatcataaaacgtaacttgactcttgatttcctccctcagtcaaccaaggctgcagggattaactcatacatggtggcatcaattcagaagcgttgcgaattaatatgcaaacgcttattagaaagaatattgcaggttgaggagggagctgctaaggagatggaaatccacatgcttccttatattgttgctttgcaagcattttgtattgttgatcccacgctctgcattccagtaactgatccttctaagtttgttgtgacactacaaccataccttaatattcaggttgacagtaaatcagctgcccagttgcttgaaagtattatttttgtgattgatgctgttcttccactcataaggaagccaacacaaaatgttgttgaagaacttgagaaagatctgaaacatatgatagttcgccattcgtatttgacagttgtacatgcctgtatcaagtgcctttgtgctctgagcgagtcagcaggtagaggtccaggattagtggaaaaccttgtcaatattttctacaagcatctgtctggagctaattcagatagtcagttattgggtcgatcactgttttgtcttggactcctccttcggtatggttatcaattgatgcaaacatctgaaaatcagcttgattttcccaagattatcaacttgctccagagaaaatatcttctcagggatgattttagcttgaaggttcgagctttgcaggtgtgtgtgaccacatgtaattcattaagacataaaatatccgcttggtgatgggatcattcatgcctagctgtatccattgtagtttatggtgtgattctatgtgattggctgcccacttttgaatcttgtttacaatctccagatatctgtgcatggttactagtcgagtgggttcataacttgtggcattatttatttgagacccatagcaagtggaactagcatagataacaatgcatagcaaatcacctgtctacataactgttgctttggttgttacaggcttgcacattttattttatttttatatttactgttcctttataagatgccatttcccccttgtgcattcagactttgggatacatacttattgcgaagcctgaatttatgctacaaaaggatatgttgaaactcatagagacagcactatcttctgaggttgattatagattaaaggtacttcacaactccttttggtttttttgtttgaaaagttaagtaaattaatccacctgttcagattcaaggacttcaaaacctctatgagtatctcagagatgctgaaagccaacttactgccgagagcactgtgaaacctcctgtccggtgtgaaataaatggcagaagtaaagtgcctgttgctgctggtgctggagacaccaacatatgtggtggtattattcaattgtattggagttctattcttgaaaggtgcttggatacaaatgatcaagttcgccagagtgcacttaagattgttgaagttgtactccgccagggtttagttcaccctattacctgtgttcctcaccttatagcacttgaaatggacccactggaggggaactcaaagttggctcatcatctgctgatgaatatgaatgaaaagtaccctttattttttgaaagccgtttgggtgatggactacaaatgtcatttaaattctttgaatccatagtcagcaaccataagatggcagcaaacataaaatcaaatccaattgcatttgtcaaacctggcatatctagaatataccgtcttatccgttcaaatcgaaattccagaaacaaatttgtccactcgatagttcggaaattcgagtctgatagccggagtcgcagcacagttagctttcttgtatactgtgccgaagttcttgcctccctgcctttcacatgctccgatgaaccactttacttgatctatgatataaatcgaattattcaccttaaagctggaggagttgagagcaatttgaaaaggtggacttctatgtctcagtctcaaaatacagtggatatgccaacgttgccaggagagaggcatgttgtcatgcaagagcctggcggatattatgataacgtgggctatgcccatgaaagggtgaatgccaatccttgcagtacttcagacgtggacatggccaaagtgcaggttgacgtggatatggccaaagtgcagggagattgccttgatgcaatagcccttcagctactgctgaaattgaagagacatttgaaagttgtctatagtttagatgatgcccgctgtcagtcattttctctaaaggagcctccgaaatctggagaaacattctccaggcagaatattccttttaatgttagcagcactaacatcagtctgccgagctgcctgcaggacgtagcttctgtttaccaggatttcaagacagtgctccacgaagattccatggactttgctgtgttcatcccttcagtccagattaggaagcgcccaaccccgagaaatacgacaaacccaaccccaagaagtacgacgagggtcaggagaacggctgcctcgagtgttacaaaagcccgtggtggcgcacgtggcgatgactccgacgactccgatgatgacgactggaccgggggcccaagagtgcttgacttcagtgggggtggccgtgtgacaaggcagagggtccaagtatgatgactggtcttggtgcttttgtacattctagggaaacctatagcgggtagcagctgacacgaggagagttagggttgagttttaggtttaaagtcgtttagggtacatagaagcagaaaaggaaaggaagatagcctttttacttagatgccattgatttggagcactccttttcttgctctgcccctgtcctgtttgtaattccggtcgggctttggcaaaactgacaaacagggttgtgctccggcttctgatctgattcaatgggaatgaaattattccttttgctttgcctgtataataacagttaagcctatgtttcgtgtaattgtctgccttgctaatgttatatatctgtacgtgtgctgagccttttttgttgaagttc

SEQ ID NO: 67794 - DNA, 5934 bp, Zea Mays
cctccctccggccaacgttactactgtagcagcagtagataaatactgctgcggctggctgctgtacccctcctagtcggctagtcctctactctccattcatccccaccacctccacttgtcgaaattgaaactcaaatcaaatcgaaccacctccacctcggcaacgagcgaattccggtgcgaattggagccctcctccccccgcatctagggtttcgcccatggaccccgccgccggcgggggccggggccgggaccgggcgggcttcgagcgggcgtgccggctgcccaacaccgtccactccgaggtcctgccgtcgctgccgctccccaccctcccgcgcgagctcggcttcgacgcgctccgcgacgacgagcccctcgccgcgcccgaccgccccgacacgatcatgcaggccgccaacatcgcccgcgtcctcgccgacaccgacgtctcccacctgggcttcaccgctgcggacaacgtcgacgtggaccccatccgctgctcctggctctggagggaggtgctcaagcacaaccccgacgctttcaaggtcaaggcgccaagtccgtcttcgcaaggtccatttggaggcccaggatatcaaaatcaagaacatgagaagcactttgagcattttacacctaatacgagcaaagcacgaaatgaatctgcatttcctcaggatgaaattgactcacatagagagcatttttataatgaactgacctcagattcaattgcttcaaagaagccaaaaataaggaagagagaaaataacaattctgtttcaagttctgctcccagcattcctaatactcaagatgttatcactaccttctgtgaggtggtggaggatttctgtggaaaaaccgaaattcctgatgatggagatggcggtgactggttgtcaatcccacttggtgatgttaaggttctcgtgaatgaaattacatctgttcgatccaaaaggatattgcatgaggttcctatggatacagttacaaggttattggatgtgattgaccgtcagattcgatattctcaaggtttgtcgatagatgtgaaagaaaattctgatgtcgttgatgctgaacctctggttttctctgctttggaggccagtcatgctgcgttggcaattatgacccaccatgatatgccaaagcaactgtaccgagaagaacttattgagcggattattgatttctcaaggcatcagatcacagattgtatggcagcaagtaacccaaccttccgagctctctacaaaccagctgaaaatgttgcaaatgatggagatgatgatgaagatgatttggaaaatggacaagttagcaagaggagacgtactgctactaatttgagcatgagaaaatcttcaaacaaactttctgcttctgtttattctgctgtgcagaaactatgcttgatattgggctttcttaaggaactgctcacaacagtgcgcttgtcagatggttgtattctgcagttagcgaaaacatgctttactacattcttggtggataatatgcagctattacaattaaaagcaatcggggttatttgcacggtgttttcgtcatacacacagcacaggagttacttggttgatgaaatacttcaccttcttcgcaagttgcagttttccaaaaatgccgtcagaacctaccatctagcagatgaagaccaaaagcaaatccagatgataacagcactgttagttcacctggttcagtttagtgcaattgttcccaatagcttaaaaggaacagttgattggaccactattgttgatgcctccggagatgctgattattatccaattaaatgccatgaagcggcaacagaggcttgttgccgtttttggactgatgtccttcaacgttttactgctgctaaatctcaagatatgtcggaaaccaaaggaataatagataatcttgttcaggatttcctaatgatactaaacttgccggagtatccagctgctgcttctatccttgaggttctctgtgtgttgctccttcagaatgctggattgaaatctaaggacactaatgttcggtgctttgctattgatcttcttggtggtattgcatcaagattgaagcatgattcggtcatctgtagtgaagagaagctttggatattgcaagatctcactgatgcaggtagcgatggctcaaaaatcttgaaaaacaagtgctgtgtttgtcttggtggaagaggtataaatatagcctgtaatgaatgtggaagatgtttccattcagattgtatgggggctgctagccaggataacttagagcgtgatagtgtttgccccttgtgtttttgcaaacaacagctcaatgtgctacagacgtactgtcagtcacaaattaaagaaaatggcaaaaaaactgctgcgtctactagtaagaaatctgctaaaccagctgaggtgccagcagtggatattattcaacaaatactactgagttatctccaagaatctggtccacaagatgatgggaacctgtttactcgatggttctatctgtgcatctggaacaaagaaaaccaacattctcaggaggagatcatctactatctcgctagattaaaatcaaaagagattctgcgagattctggcaatggtctggcaatttccagagattcagcaaagaaaatttgcttggcacttggtcagaagaactcattttgcaggggttttgataaaattcttgctcttcttttggctagcttgagagaaaattctcctgtaataagagcaaaagccttgcgtgcggtcagcagtatagttgaagctgaccctgaggtcttgggtgacaaacgtgtccaatctgctgtcgaagggaggttttgtgattcggctatttctgttcgtgaagctgcccttgaacttgttgggaggcatattgcttcacatcctgatgtgggcctgaagtatatagaaaaagttgctgagcgaataaaggacactggagtcagcgttcgcaagcgtgcaatcaaaattataagggatctatgtgcttctaatccaaacacagacacaacacatgcctttgtggagataatttctcgtgttaatgatgaggaatccagtgtacaggatcttgtatgtaaaacattttatgaactatggtttgaagaaccaactgggagccataagcacttggttgctgatggaagttcagttccaatggagatagctaaaaagactgagcaaattgttgacatgttgaggaagatgaccaatcaccaacctctgattaccatcataaaacgtaacttgactcttgatttcctccctcagtcaaccaaggctgcagggattaactcatacatggtggcatcaattcagaagcgttgcgaattaatatgcaaacgcttattagaaagaatattgcaggttgaggagggagctgctaaggagatggaaatccacatgcttccttatattgttgctttgcaagcattttgtattgttgatcccacgctctgcattccagtaactgatccttctaagtttgttgtgacactacaaccataccttaatattcaggttgacagtaaatcagctgcccagttgcttgaaagtattatttttgtgattgatgctgttcttccactcataaggaagccaacacaaaatgttgttgaagaacttgagaaagatctgaaacatatgatagttcgccattcgtatttgacagttgtacatgcctgtatcaagtgcctttgtgctctgagcgagtcagcaggtagaggtccaggattagtggaaaaccttgtcaatattttctacaagcatctgtctggagctaattcagatagtcagttattgggtcgatcactgttttgtcttggactcctccttcggtatggttatcaattgatgcaaacatctgaaaatcagcttgattttcccaagattatcaacttgctccagagaaaatatcttctcagggatgattttagcttgaaggttcgagctttgcagactttgggatacatacttattgcgaagcctgaatttatgctacaaaaggatatgttgaaactcatagagacagcactatcttctgagattcaaggacttcaaaacctctatgagtatctcagagatgctgaaagccaacttactgccgagagcactgtgaaacctcctgtccggtgtgaaataaatggcagaagtaaagtgcctgttgctgctggtgctggagacaccaacatatgtggtggtattattcaattgtattggagttctattcttgaaaggtgcttggatacaaatgatcaagttcgccagagtgcacttaagattgttgaagttgtactccgccagggtttagttcaccctattacctgtgttcctcaccttatagcacttgaaatggacccactggaggggaactcaaagttggctcatcatctgctgatgaatatgaatgaaaagtaccctttattttttgaaagccgtttgggtgatggactacaaatgtcatttaaattctttgaatccatagtcagcaaccataagatggcagcaaacataaaatcaaatccaattgcatttgtcaaacctggcatatctagaatataccgtcttatccgttcaaatcgaaattccagaaacaaatttgtccactcgatagttcggaaattcgagtctgatagccggagtcgcagcacagttagctttcttgtatactgtgccgaagttcttgcctccctgcctttcacatgctccgatgaaccactttacttgatctatgatataaatcgaattattcaccttaaagctggaggagttgagagcaatttgaaaaggtggacttctatgtctcagtctcaaaatacagtggatatgccaacgttgccaggagagaggcatgttgtcatgcaagagcctggcggatattatgataacgtgggctatgcccatgaaagggtgaatgccaatccttgcagtacttcagacgtggacatggccaaagtgcaggttgacgtggatatggccaaagtgcagggagattgccttgatgcaatagcccttcagctactgctgaaattgaagagacatttgaaagttgtctatagtttagatgatgcccgctgtcagtcattttctctaaaggagcctccgaaatctggagaaacattctccaggcagaatattccttttaatgttagcagcactaacatcagtctgccgagctgcctgcaggacgtagcttctgtttaccaggatttcaagacagtgctccacgaagattccatggactttgctgtgttcatcccttcagtccagattaggaagcgcccaaccccgagaaatacgacaaacccaaccccaagaagtacgacgagggtcaggagaacggctgcctcgagtgttacaaaagcccgtggtggcgcacgtggcgatgactccgacgactccgatgatgacgactggaccgggggcccaagagtgcttgacttcagtgggggtggccgtgtgacaaggcagagggtccaagtatgatgactggtcttggtgcttttgtacattctagggaaacctatagcgggtagcagctgacacgaggagagttagggttgagttttaggtttaaagtcgtttagggtacatagaagcagaaaaggaaaggaagatagcctttttacttagatgccattgatttggagcactccttttcttgctctgcccctgtcctgtttgtaattccggtcgggctttggcaaaactgacaaacagggttgtgctccggcttctgatctgattcaatgggaatgaaattattccttttgctttgcctgtataataacagttaagcctatgtttcgtgtaattgtctgccttgctaatgttatatatctgtacgtgtgctgagccttttttgttgaagttc

SEQ ID NO: 67795 - DNA, 5942 bp, Zea Mays
cctccctccggccaacgttactactgtagcagcagtagataaatactgctgcggctggctgctgtacccctcctagtcggctagtcctctactctccattcatccccaccacctccacttgtcgaaattgaaactcaaatcaaatcgaaccacctccacctcggcaacgagcgaattccggtgcgaattggagccctcctccccccgcatctagggtttcgcccatggaccccgccgccggcgggggccggggccgggaccgggcgggcttcgagcgggcgtgccggctgcccaacaccgtccactccgaggtcctgccgtcgctgccgctccccaccctcccgcgcgagctcggcttcgacgcgctccgcgacgacgagcccctcgccgcgcccgaccgccccgacacgatcatgcaggccgccaacatcgcccgcgtcctcgccgacaccgacgtctcccacctgggcttcaccgctgcggacaacgtcgacgtggaccccatccgctgctcctggctctggagggaggtgctcaagcacaaccccgacgctttcaaggtcaaggcgccaagtccgtcttcgcaaggtccatttggaggcccaggatatcaaaatcaagaacatgagaagcactttgagcattttacacctaatacgagcaaagcacgaaatgaatctgcatttcctcaggatgaaattgactcacatagagagcatttttataatgaactgacctcagattcaattgcttcaaagaagccaaaaataaggaagagagaaaataacaattctgtttcaagttctgctcccagcattcctaatactcaagatgttatcactaccttctgtgaggtggtggaggatttctgtggaaaaaccgaaattcctgatgatggagatggcggtgactggttgtcaatcccacttggtgatgttaaggttctcgtgaatgaaattacatctgttcgatccaaaaggatattgcatgaggttcctatggatacagttacaaggttattggatgtgattgaccgtcagattcgatattctcaaggtttgtcgatagatgtgaaagaaaattctgatgtcgttgatgctgaacctctggttttctctgctttggaggccagtcatgctgcgttggcaattatgacccaccatgatatgccaaagcaactgtaccgagaagaacttattgagcggattattgatttctcaaggcatcagatcacagattgtatggcagcaagtaacccaaccttccgagctctctacaaaccagctgaaaatgttgcaaatgatggagatgatgatgaagatgatttggaaaatggacaagttagcaagaggagacgtactgctactaatttgagcatgagaaaatcttcaaacaaactttctgcttctgtttattctgctgtgcagaaactatgcttgatattgggctttcttaaggaactgctcacaacagtgcgcttgtcagatggttgtattctgcagttagcgaaaacatgctttactacattcttggtggataatatgcagctattacaattaaaagcaatcggggttatttgcacggtgttttcgtcatacacacagcacaggagttacttggttgatgaaatacttcaccttcttcgcaagttgcagttttccaaaaatgccgtcagaacctaccatctagcagatgaagaccaaaagcaaatccagatgataacagcactgttagttcacctggttcagtttagtgcaattgttcccaatagcttaaaaggaacagttgattggaccactattgttgatgcctccggagatgctgattattatccaattaaatgccatgaagcggcaacagaggcttgttgccgtttttggactgatgtccttcaacgttttactgctgctaaatctcaagatatgtcggaaaccaaaggaataatagataatcttgttcaggatttcctaatgatactaaacttgccggagtatccagctgctgcttctatccttgaggttctctgtgtgttgctccttcagaatgctggattgaaatctaaggacactaatgttcggtgctttgctattgatcttcttggtggtattgcatcaagattgaagcatgattcggtcatctgtagtgaagagaagctttggatattgcaagatctcactgatgcaggtagcgatggctcaaaaatcttgaaaaacaagtgctgtgtttgtcttggtggaagaggtataaatatagcctgtaatgaatgtggaagatgtttccattcagattgtatgggggctgctagccaggataacttagagcgtgatagtgtttgccccttgtgtttttgcaaacaacagctcaatgtgctacagacgtactgtcagtcacaaattaaagaaaatggcaaaaaaactgctgcgtctactagtaagaaatctgctaaaccagctgaggtgccagcagtggatattattcaacaaatactactgagttatctccaagaatctggtccacaagatgatgggaacctgtttactcgatggttctatctgtgcatctggaacaaagaaaaccaacattctcaggaggagatcatctactatctcgctagattaaaatcaaaagagattctgcgagattctggcaatggtctggcaatttccagagattcagcaaagaaaatttgcttggcacttggtcagaagaactcattttgcaggggttttgataaaattcttgctcttcttttgcttgagagaaaattctcctgtaataagagcaaaagccttgcgtgcgcagtatagttgaagctgaccctgaggtcttgggtgacaaacgtgtccaatctgctgtcgaagggaggttttgtgattcggctatttctgttcgtgaagctgcccttgaacttgttgggaggcatattgcttcacatcctgatgtgggcctgaagtatatagaaaaagttgctgagcgaataaaggacactggagtcagcgttcgcaagcgtgcaatcaaaattataagggatctatgtgcttctaatccaaacacagacacaacacatgcctttgtggagataatttctcgtgttaatgatgaggaatccagtgtacaggatcttgtatgtaaaacattttatgaactatggtttgaagaaccaactgggagccataagcacttggttgctgatggaagttcagttccaatggagatagctaaaaagactgagcaaattgttgacatgttgaggaagatgaccaatcaccaacctctgattaccatcataaaacgtaacttgactcttgatttcctccctcagtcaaccaaggctgcagggattaactcatacatggtggcatcaattcagaagcgttgcgaattaatatgcaaacgcttattagaaagaatattgcaggttgaggagggagctgctaaggagatggaaatccacatgcttccttatattgttgctttgcaagcattttgtattgttgatcccacgctctgcattccagtaactgatccttctaagtttgttgtgacactacaaccataccttaatattcaggttgacagtaaatcagctgcccagttgcttgaaagtattatttttgtgattgatgctgttcttccactcataaggaagccaacacaaaatgttgttgaagaacttgagaaagatctgaaacatatgatagttcgccattcgtatttgacagttgtacatgcctgtatcaagtgcctttgtgctctgagcgagtcagcaggtagaggtccaggattagtggaaaaccttgtcaatattttctacaagcatctgtctggagctaattcagatagtcagttattgggtcgatcactgttttgtcttggactcctccttcggtatggttatcaattgatgcaaacatctgaaaatcagcttgattttcccaagattatcaacttgctccagagaaaatatcttctcagggatgattttagcttgaaggttcgagctttgcagactttgggatacatacttattgcgaagcctgaatttatgctacaaaaggatatgttgaaactcatagagacagcactatcttctgaggttgattatagattaaagattcaaggacttcaaaacctctatgagtatctcagagatgctgaaagccaacttactgccgagagcactgtgaaacctcctgtccggtgtgaaataaatggcagaagtaaagtgcctgttgctgctggtgctggagacaccaacatatgtggtggtattattcaattgtattggagttctattcttgaaaggtgcttggatacaaatgatcaagttcgccagagtgcacttaagattgttgaagttgtactccgccagggtttagttcaccctattacctgtgttcctcaccttatagcacttgaaatggacccactggaggggaactcaaagttggctcatcatctgctgatgaatatgaatgaaaagtaccctttattttttgaaagccgtttgggtgatggactacaaatgtcatttaaattctttgaatccatagtcagcaaccataagatggcagcaaacataaaatcaaatccaattgcatttgtcaaacctggcatatctagaatataccgtcttatccgttcaaatcgaaattccagaaacaaatttgtccactcgatagttcggaaattcgagtctgatagccggagtcgcagcacagttagctttcttgtatactgtgccgaagttcttgcctccctgcctttcacatgctccgatgaaccactttacttgatctatgatataaatcgaattattcaccttaaagctggaggagttgagagcaatttgaaaaggtggacttctatgtctcagtctcaaaatacagtggatatgccaacgttgccaggagagaggcatgttgtcatgcaagagcctggcggatattatgataacgtgggctatgcccatgaaagggtgaatgccaatccttgcagtacttcagacgtggacatggccaaagtgcaggttgacgtggatatggccaaagtgcagggagattgccttgatgcaatagcccttcagctactgctgaaattgaagagacatttgaaagttgtctatagtttagatgatgcccgctgtcagtcattttctctaaaggagcctccgaaatctggagaaacattctccaggcagaatattccttttaatgttagcagcactaacatcagtctgccgagctgcctgcaggacgtagcttctgtttaccaggatttcaagacagtgctccacgaagattccatggactttgctgtgttcatcccttcagtccagattaggaagcgcccaaccccgagaaatacgacaaacccaaccccaagaagtacgacgagggtcaggagaacggctgcctcgagtgttacaaaagcccgtggtggcgcacgtggcgatgactccgacgactccgatgatgacgactggaccgggggcccaagagtgcttgacttcagtgggggtggccgtgtgacaaggcagagggtccaagtatgatgactggtcttggtgcttttgtacattctagggaaacctatagcgggtagcagctgacacgaggagagttagggttgagttttaggtttaaagtcgtttagggtacatagaagcagaaaaggaaaggaagatagcctttttacttagatgccattgatttggagcactccttttcttgctctgcccctgtcctgtttgtaattccggtcgggctttggcaaaactgacaaacagggttgtgctccggcttctgatctgattcaatgggaatgaaattattccttttgctttgcctgtataataacagttaagcctatgtttcgtgtaattgtctgccttgctaatgttatatatctgtacgtgtgctgagccttttttgttgaagttc

SEQ ID NO: 67796 - DNA, 5941 bp, Zea Mays
gtcgctttccttttcttccagttcccactcccaccctccctccggccaacgttactactgtagcagcagtagataaatactgctgcggctggctgctgtacccctcctagtcggctagtcctctactctccattcatccccaccacctccacttgtcgaaattgaaactcaaatcaaatcgaaccacctccacctcggcaacgagcgaattccggtgcgaattggagccctcctccccccgcatctagggtttcgcccatggaccccgccgccggcgggggccggggccgggaccgggcgggcttcgagcgggcgtgccggctgcccaacaccgtccactccgaggtcctgccgtcgctgccgctccccaccctcccgcgcgagctcggcttcgacgcgctccgcgacgacgagcccctcgccgcgcccgaccgccccgacacgatcatgcaggccgccaacatcgcccgcgtcctcgccgacaccgacgtctcccacctgggcttcaccgctgcggacaacgtcgacgtggaccccatccgctgctcctggctctggagggaggtgctcaagcacaaccccgacgctttcaaggtcaaggcgccaagtccgtcttcgcaaggtccatttggaggcccaggatatcaaaatcaagaacatgagaagcactttgagcattttacacctaatacgagcaaagcacgaaatgaatctgcatttcctcaggatgaaattgactcacatagagagcatttttataatgaactgacctcagattcaattgcttcaaagaagccaaaaataaggaagagagaaaataacaattctgtttcaagttctgctcccagcattcctaatactcaagatgttatcactaccttctgtgaggtggtggaggatttctgtggaaaaaccgaaattcctgatgatggagatggcggtgactggttgtcaatcccacttggtgatgttaaggttctcgtgaatgaaattacatctgttcgatccaaaaggatattgcatgaggttcctatggatacagttacaaggttattggatgtgattgaccgtcagattcgatattctcaaggtttgtcgatagatgtgaaagaaaattctgatgtcgttgatgctgaacctctggttttctctgctttggaggccagtcatgctgcgttggcaattatgacccaccatgatatgccaaagcaactgtaccgagaagaacttattgagcggattattgatttctcaaggcatcagatcacagattgtatggcagcaagtaacccaaccttccgagctctctacaaaccagctgaaaatgttgcaaatgatggagatgatgatgaagatgatttggaaaatggacaagttagcaagaggagacgtactgctactaatttgagcatgagaaaatcttcaaacaaactttctgcttctgtttattctgctgtgcagaaactatgcttgatattgggctttcttaaggaactgctcacaacagtgcgcttgtcagatggttgtattctgcagttagcgaaaacatgctttactacattcttggtggataatatgcagctattacaattaaaagcaatcggggttatttgcacggtgttttcgtcatacacacagcacaggagttacttggttgatgaaatacttcaccttcttcgcaagttgcagttttccaaaaatgccgtcagaacctaccatctagcagatgaagaccaaaagcaaatccagatgataacagcactgttagttcacctggttcagtttagtgcaattgttcccaatagcttaaaaggaacagttgattggaccactattgttgatgcctccggagatgctgattattatccaattaaatgccatgaagcggcaacagaggcttgttgccgtttttggactgatgtccttcaacgttttactgctgctaaatctcaagatatgtcggaaaccaaaggaataatagataatcttgttcaggatttcctaatgatactaaacttgccggagtatccagctgctgcttctatccttgaggttctctgtgtgttgctccttcagaatgctggattgaaatctaaggacactaatgttcggtgctttgctattgatcttcttggtggtattgcatcaagattgaagcatgattcggtcatctgtagtgaagagaagctttggatattgcaagatctcactgatgcaggtagcgatggctcaaaaatcttgaaaaacaagtgctgtgtttgtcttggtggaagagattgtatgggggctgctagccaggataacttagagcgtgatagtgtttgccccttgtgtttttgcaaacaacagctcaatgtgctacagacgtactgtcagtcacaaattaaagaaaatggcaaaaaaactgctgcgtctactagtaagaaatctgctaaaccagctgaggtgccagcagtggatattattcaacaaatactactgagttatctccaagaatctggtccacaagatgatgggaacctgtttactcgatggttctatctgtgcatctggaacaaagaaaaccaacattctcaggaggagatcatctactatctcgctagattaaaatcaaaagagattctgcgagattctggcaatggtctggcaatttccagagattcagcaaagaaaatttgcttggcacttggtcagaagaactcattttgcaggggttttgataaaattcttgctcttcttttggctagcttgagagaaaattctcctgtaataagagcaaaagccttgcgtgcggtcagcagtatagttgaagctgaccctgaggtcttgggtgacaaacgtgtccaatctgctgtcgaagggaggttttgtgattcggctatttctgttcgtgaagctgcccttgaacttgttgggaggcatattgcttcacatcctgatgtgggcctgaagtatatagaaaaagttgctgagcgaataaaggacactggagtcagcgttcgcaagcgtgcaatcaaaattataagggatctatgtgcttctaatccaaacacagacacaacacatgcctttgtggagataatttctcgtgttaatgatgaggaatccagtgtacaggatcttgtatgtaaaacattttatgaactatggtttgaagaaccaactgggagccataagcacttggttgctgatggaagttcagttccaatggagatagctaaaaagactgagcaaattgttgacatgttgaggaagatgaccaatcaccaacctctgattaccatcataaaacgtaacttgactcttgatttcctccctcagtcaaccaaggctgcagggattaactcatacatggtggcatcaattcagaagcgttgcgaattaatatgcaaacgcttattagaaagaatattgcaggttgaggagggagctgctaaggagatggaaatccacatgcttccttatattgttgctttgcaagcattttgtattgttgatcccacgctctgcattccagtaactgatccttctaagtttgttgtgacactacaaccataccttaatattcaggttgacagtaaatcagctgcccagttgcttgaaagtattatttttgtgattgatgctgttcttccactcataaggaagccaacacaaaatgttgttgaagaacttgagaaagatctgaaacatatgatagttcgccattcgtatttgacagttgtacatgcctgtatcaagtgcctttgtgctctgagcgagtcagcaggtagaggtccaggattagtggaaaaccttgtcaatattttctacaagcatctgtctggagctaattcagatagtcagttattgggtcgatcactgttttgtcttggactcctccttcggtatggttatcaattgatgcaaacatctgaaaatcagcttgattttcccaagattatcaacttgctccagagaaaatatcttctcagggatgattttagcttgaaggttcgagctttgcagactttgggatacatacttattgcgaagcctgaatttatgctacaaaaggatatgttgaaactcatagagacagcactatcttctgaggttgattatagattaaagattcaaggacttcaaaacctctatgagtatctcagagatgctgaaagccaacttactgccgagagcactgtgaaacctcctgtccggtgtgaaataaatggcagaagtaaagtgcctgttgctgctggtgctggagacaccaacatatgtggtggtattattcaattgtattggagttctattcttgaaaggtgcttggatacaaatgatcaagttcgccagagtgcacttaagattgttgaagttgtactccgccagggtttagttcaccctattacctgtgttcctcaccttatagcacttgaaatggacccactggaggggaactcaaagttggctcatcatctgctgatgaatatgaatgaaaagtaccctttattttttgaaagccgtttgggtgatggactacaaatgtcatttaaattctttgaatccatagtcagcaaccataagatggcagcaaacataaaatcaaatccaattgcatttgtcaaacctggcatatctagaatataccgtcttatccgttcaaatcgaaattccagaaacaaatttgtccactcgatagttcggaaattcgagtctgatagccggagtcgcagcacagttagctttcttgtatactgtgccgaagttcttgcctccctgcctttcacatgctccgatgaaccactttacttgatctatgatataaatcgaattattcaccttaaagctggaggagttgagagcaatttgaaaaggtggacttctatgtctcagtctcaaaatacagtggatatgccaacgttgccaggagagaggcatgttgtcatgcaagagcctggcggatattatgataacgtgggctatgcccatgaaagggtgaatgccaatccttgcagtacttcagacgtggacatggccaaagtgcaggttgacgtggatatggccaaagtgcagggagattgccttgatgcaatagcccttcagctactgctgaaattgaagagacatttgaaagttgtctatagtttagatgatgcccgctgtcagtcattttctctaaaggagcctccgaaatctggagaaacattctccaggcagaatattccttttaatgttagcagcactaacatcagtctgccgagctgcctgcaggacgtagcttctgtttaccaggatttcaagacagtgctccacgaagattccatggactttgctgtgttcatcccttcagtccagattaggaagcgcccaaccccgagaaatacgacaaacccaaccccaagaagtacgacgagggtcaggagaacggctgcctcgagtgttacaaaagcccgtggtggcgcacgtggcgatgactccgacgactccgatgatgacgactggaccgggggcccaagagtgcttgacttcagtgggggtggccgtgtgacaaggcagagggtccaagtatgatgactggtcttggtgcttttgtacattctagggaaacctatagcgggtagcagctgacacgaggagagttagggttgagttttaggtttaaagtcgtttagggtacatagaagcagaaaaggaaaggaagatagcctttttacttagatgccattgatttggagcactccttttcttgctctgcccctgtcctgtttgtaattccggtcgggctttggcaaaactgacaaacagggttgtgctccggcttctgatctgattcaatgggaatgaaattattccttttgctttgcctgtataataacagttaagcctatgtttcgtgtaattgtctgccttgctaatgttatatatctgtacgtgtgctgagccttttttgttgaagttc

SEQ ID NO: 67797 - DNA, 1682 bp, Zea Mays
gacaacccaggcctggttcggcccggccttcccgatttagtacaacgtctcctgtgtcctctcgcgcgccgcgccgcccctcaggccgagactcccctcaggccccagctctcgctctccggtctccaccgccgctccggtgctcccttccgggattcccctccggcgagcttgctcagctccgctccaggaacgatcagcctggctggctggattgaaatttcggcccagtggcccacttcacttgcccagcggcccagcccagcttcccttttcccgattcccaccacgtgagcagaagctgcacaaccaagaggcaagagccaacagagcgcagaagctgcacaaccaagaggtaagagccaaccgagcaacgaacgcccaggcacacacgagacacgacacgaaccaggcaaccagctgccgagggaggaaccctagcggaacactgtgcaggtgacggcggcgcgctaccggtgacgggggatacggcggcatcgtccccctcggcccctcctccatccccggcgcggcggcgccagcagccggcctgcagatttccacgtcgtccatggcgctcgtcgtgatgtgtgggcagccgtgcagcggtaaaacagcagccgccgcttgccttgctgtggcgctgcactcctcctcgcctgaccttacagtccgaatcatcgatgagtcatccctccatctcaggcgcaacgatagctacaaagatatggttgtggagaaaaacttgagagggcttcttagatcagaagttgacaggtctgtgtcacgcgacagcataattattgtcgactcgttgaataatattaaggggtaccgctatgagttgtggtgtcttgcgcgtgcatctggtgtaagatattgtgtgaagtggaccattgtaaggaatggaacagcaaccgccaggagaaaggagaaccagcatatgatactaatatatttgaagatcttgtaagtagatttgagaagccagatagacgcaatcgttgggattcccctctttttgaattgttcccatctagagatgaattagtggaaacagctcctgttattgctgaagctgtgtcatatttgacaaaaaaagtggattccaaaacaagagatgtaaaagttctccagcctacaatagccactcagacggtgcgaacaacagaggctaattccctctatgagatggacaaggcaacacaggaggtggtcaatgcaattgttgaagcacagtcatgcggtcttgggcttgctgtgaataagatctccattgggcccaacttgccaactatcaagcttgagagatctgttggcctacctgagctcagaagcctgcggagaactttcatcaagctggcagggcagtacagtctgagtgggccaccaccaccgacagatgctgacagcgcaaagaggatgtttgtcgactacttaaaccgtgaacttggtgcatgataattttcattcgcctgcgttgcatgaacactatgtagcatgtggttaacttgggggaatagataattgaagacaacttgattgtacttgttccttgttttgtggaaatctttatatgactatcttaacgtccttgacgccttggtggacatgcaacatgaatatttttttctctcaaacccgcatgagaggtgctcatcattatattaagaaaataaaaa

SEQ ID NO: 67798 - DNA, 1833 bp, Zea Mays
gacaacccaggcctggttcggcccggccttcccgatttagtacaacgtctcctgtgtcctctcgcgcgccgcgccgcccctcaggccgagactcccctcaggccccagctctcgctctccggtctccaccgccgctccggtgctcccttccgggattcccctccggcgagcttgctcagctccgctccaggccgcgcggcgctgccgtaggttcgataccctgctgtacttgtcactgggatagattgcggtggttttacgcctcattggatattcccaaatggttatggaccctactagaggcctgcgattaatagcgactaatcgtccgattagtttaggaacgatcagcctggctggctggattgaaatttcggcccagtggcccacttcacttgcccagcggcccagcccagcttcccttttcccgattcccaccacgtgagcagaagctgcacaaccaagaggcaagagccaacagagcgcagaagctgcacaaccaagaggtaagagccaaccgagcaacgaacgcccaggcacacacgagacacgacacgaaccaggcaaccagctgccgagggaggaaccctagcggaacactgtgcaggtgacggcggcgcgctaccggtgacgggggatacggcggcatcgtccccctcggcccctcctccatccccggcgcggcggcgccagcagccggcctgcagatttccacgtcgtccatggcgctcgtcgtgatgtgtgggcagccgtgcagcggtaaaacagcagccgccgcttgccttgctgtggcgctgcactcctcctcgcctgaccttacagtccgaatcatcgatgagtcatccctccatctcaggcgcaacgatagctacaaagatatggttgtggagaaaaacttgagagggcttcttagatcagaagttgacaggtctgtgtcacgcgacagcataattattgtcgactcgttgaataatattaaggggtaccgctatgagttgtggtgtcttgcgcgtgcatctggtgtaagatattgtgtgaagtggaccattgtaaggaatggaacagcaaccgccaggagaaaggagaaccagcatatgatactaatatatttgaagatcttgtaagtagatttgagaagccagatagacgcaatcgttgggattcccctctttttgaattgttcccatctagagatgaattagtggaaacagctcctgttattgctgaagctgtgtcatatttgacaaaaaaagtggattccaaaacaagagatgtaaaagttctccagcctacaatagccactcagacggtgcgaacaacagaggctaattccctctatgagatggacaaggcaacacaggaggtggtcaatgcaattgttgaagcacagtcatgcggtcttgggcttgctgtgaataagatctccattgggcccaacttgccaactatcaagcttgagagatctgttggcctacctgagctcagaagcctgcggagaactttcatcaagctggcagggcagtacagtctgagtgggccaccaccaccgacagatgctgacagcgcaaagaggatgtttgtcgactacttaaaccgtgaacttggtgcatgataattttcattcgcctgcgttgcatgaacactatgtagcatgtggttaacttgggggaatagataattgaagacaacttgattgtacttgttccttgttttgtggaaatctttatatgactatcttaacgtccttgacgccttggtggacatgcaacatgaatatttttttctctcaaacccgcatgagaggtgctcatcattatattaagaaaataaaaa

SEQ ID NO: 67799 - DNA, 1593 bp, Zea Mays
gacaacccaggcctggttcggcccggccttcccgatttagtacaacgtctcctgtgtcctctcgcgcgccgcgccgcccctcaggccgagactcccctcaggccccagctctcgctctccggtctccaccgccgctccggtgctcccttccgggattcccctccggcgagcttgctcagctccgctccagcagaagctgcacaaccaagaggcaagagccaacagagcgcagaagctgcacaaccaagaggtaagagccaaccgagcaacgaacgcccaggcacacacgagacacgacacgaaccaggcaaccagctgccgagggaggaaccctagcggaacactgtgcaggtgacggcggcgcgctaccggtgacgggggatacggcggcatcgtccccctcggcccctcctccatccccggcgcggcggcgccagcagccggcctgcagatttccacgtcgtccatggcgctcgtcgtgatgtgtgggcagccgtgcagcggtaaaacagcagccgccgcttgccttgctgtggcgctgcactcctcctcgcctgaccttacagtccgaatcatcgatgagtcatccctccatctcaggcgcaacgatagctacaaagatatggttgtggagaaaaacttgagagggcttcttagatcagaagttgacaggtctgtgtcacgcgacagcataattattgtcgactcgttgaataatattaaggggtaccgctatgagttgtggtgtcttgcgcgtgcatctggtgtaagatattgtgtgcttttttgtgatacagaagtggaccattgtaaggaatggaacagcaaccgccaggagaaaggagaaccagcatatgatactaatatatttgaagatcttgtaagtagatttgagaagccagatagacgcaatcgttgggattcccctctttttgaattgttcccatctagagatgaattagtggaaacagctcctgttattgctgaagctgtgtcatatttgacaaaaaaagtggattccaaaacaagagatgtaaaagttctccagcctacaatagccactcagacggtgcgaacaacagaggctaattccctctatgagatggacaaggcaacacaggaggtggtcaatgcaattgttgaagcacagtcatgcggtcttgggcttgctgtgaataagatctccattgggcccaacttgccaactatcaagcttgagagatctgttggcctacctgagctcagaagcctgcggagaactttcatcaagctggcagggcagtacagtctgagtgggccaccaccaccgacagatgctgacagcgcaaagaggatgtttgtcgactacttaaaccgtgaacttggtgcatgataattttcattcgcctgcgttgcatgaacactatgtagcatgtggttaacttgggggaatagataattgaagacaacttgattgtacttgttccttgttttgtggaaatctttatatgactatcttaacgtccttgacgccttggtggacatgcaacatgaatatttttttctctcaaacccgcatgagaggtgctcatcattatattaagaaaataaaaa

SEQ ID NO: 67800 - DNA, 1316 bp, Zea Mays
gacaacccaggcctggttcggcccggccttcccgatttagtacaacgtctcctgtgtcctctcgcgcgccgcgccgcccctcaggccgagactcccctcaggccccagctctcgctctccggtctccaccgccgctccggtgctcccttccgggattcccctccggcgagcttgctcagctccgctccagatttccacgtcgtccatggcgctcgtcgtgatgtgtgggcagccgtgcagcggtaaaacagcagccgccgcttgccttgctgtggcgctgcactcctcctcgcctgaccttacagtccgaatcatcgatgagtcatccctccatctcaggcgcaacgatagctacaaagatatggttgtggagaaaaacttgagagggcttcttagatcagaagttgacaggtctgtgtcacgcgacagcataattattgtcgactcgttgaataatattaaggggtaccgctatgagttgtggtgtcttgcgcgtgcatctggtgtaagatattgtgtgaagtggaccattgtaaggaatggaacagcaaccgccaggagaaaggagaaccagcatatgatactaatatatttgaagatcttgtaagtagatttgagaagccagatagacgcaatcgttgggattcccctctttttgaattgttcccatctagagatgaattagtggaaacagctcctgttattgctgaagctgtgtcatatttgacaaaaaaagtggattccaaaacaagagatgtaaaagttctccagcctacaatagccactcagacggtgcgaacaacagaggctaattccctctatgagatggacaaggcaacacaggaggtggtcaatgcaattgttgaagcacagtcatgcggtcttgggcttgctgtgaataagatctccattgggcccaacttgccaactatcaagcttgagagatctgttggcctacctgagctcagaagcctgcggagaactttcatcaagctggcagggcagtacagtctgagtgggccaccaccaccgacagatgctgacagcgcaaagaggatgtttgtcgactacttaaaccgtgaacttggtgcatgataattttcattcgcctgcgttgcatgaacactatgtagcatgtggttaacttgggggaatagataattgaagacaacttgattgtacttgttccttgttttgtggaaatctttatatgactatcttaacgtccttgacgccttggtggacatgcaacatgaatatttttttctctcaaacccgcatgagaggtgctcatcattatattaagaaaataaaaa

SEQ ID NO: 67801 - DNA, 1340 bp, Zea Mays
gacaacccaggcctggttcggcccggccttcccgatttagtacaacgtctcctgtgtcctctcgcgcgccgcgccgcccctcaggccgagactcccctcaggccccagctctcgctctccggtctccaccgccgctccggtgctcccttccgggattcccctccggcgagcttgctcagctccgctccagatttccacgtcgtccatggcgctcgtcgtgatgtgtgggcagccgtgcagcggtaaaacagcagccgccgcttgccttgctgtggcgctgcactcctcctcgcctgaccttacagtccgaatcatcgatgagtcatccctccatctcaggcgcaacgatagctacaaagatatggttgtggagaaaaacttgagagggcttcttagatcagaagttgacaggtctgtgtcacgcgacagcataattattgtcgactcgttgaataatattaaggggtaccgctatgagttgtggtgtcttgcgcgtgcatctggtgtaagatattgtgtgaagtggaccattgtaaggaatggaacagcaaccgccaggagaaaggagaaccagcatatgatactaatatatttgaagatcttgtaagtagatttgagaagccagatagacgcaatcgttgggattcccctctttttgaattgttcccatctagagatgaattagtggaaacagctcctgttattgctgaagctgtgtcatatttgacaaaaaaagtggattccaaaacaagagatgtaaaagttctccagcctacaatagccactcagacggtgcgaacaacagaggctaattccctctatgagatggacaaggcaacacaggaggtggtcaatgcaattgttgaagcacagtcatgcggtcttgggcttgctgtgaataagatctccattgggcccaacttgccaactttgggatgcttaactgattgccacatcaagcttgagagatctgttggcctacctgagctcagaagcctgcggagaactttcatcaagctggcagggcagtacagtctgagtgggccaccaccaccgacagatgctgacagcgcaaagaggatgtttgtcgactacttaaaccgtgaacttggtgcatgataattttcattcgcctgcgttgcatgaacactatgtagcatgtggttaacttgggggaatagataattgaagacaacttgattgtacttgttccttgttttgtggaaatctttatatgactatcttaacgtccttgacgccttggtggacatgcaacatgaatatttttttctctcaaacccgcatgagaggtgctcatcattatattaagaaaataaaaa

SEQ ID NO: 67802 - DNA, 1830 bp, Zea Mays
ccagtgttgtagcatgcgcgttggaattggaagagagaaagagagatgagattctttccacccccccccccccccccccccaacttgggcctttgtcgatccaaatcaaagtccaagtgggaaacggtttgggacaacccaggcctggttcggcccggccttcccgatttagtacaacgtctcctgtgtcctctcgcgcgccgcgccgcccctcaggccgagactcccctcaggccccagctctcgctctccggtctccaccgccgctccggtgctcccttccgggattcccctccggcgagcttgctcagctccgctccaggaacgatcagcctggctggctggattgaaatttcggcccagtggcccacttcacttgcccagcggcccagcccagcttcccttttcccgattcccaccacgtgagcagaagctgcacaaccaagaggcaagagccaacagagcgcagaagctgcacaaccaagaggtaagagccaaccgagcaacgaacgcccaggcacacacgagacacgacacgaaccaggcaaccagctgccgagggaggaaccctagcggaacactgtgcaggtgacggcggcgcgctaccggtgacgggggatacggcggcatcgtccccctcggcccctcctccatccccggcgcggcggcgccagcagccggcctgcagatttccacgtcgtccatggcgctcgtcgtgatgtgtgggcagccgtgcagcggtaaaacagcagccgccgcttgccttgctgtggcgctgcactcctcctcgcctgaccttacagtccgaatcatcgatgagtcatccctccatctcaggcgcaacgatagctacaaagatatggttgtggagaaaaacttgagagggcttcttagatcagaagttgacaggtctgtgtcacgcgacagcataattattgtcgactcgttgaataatattaaggggtaccgctatgagttgtggtgtcttgcgcgtgcatctggtgtaagatattgtgtgcttttttgtgatacagaagtggaccattgtaaggaatggaacagcaaccgccaggagaaaggagaaccagcatatgatactaatatatttgaagatcttgtaagtagatttgagaagccagatagacgcaatcgttgggattcccctctttttgaattgttcccatctagagatgaattagtggaaacagctcctgttattgctgaagctgtgtcatatttgacaaaaaaagtggattccaaaacaagagatgtaaaagttctccagcctacaatagccactcagacggtgcgaacaacagaggctaattccctctatgagatggacaaggcaacacaggaggtggtcaatgcaattgttgaagcacagtcatgcggtcttgggcttgctgtgaataagatctccattgggcccaacttgccaactatcaagcttgagagatctgttggcctacctgagctcagaagcctgcggagaactttcatcaagctggcagggcagtacagtctgagtgggccaccaccaccgacagatgctgacagcgcaaagaggatgtttgtcgactacttaaaccgtgaacttggtgcatgataattttcattcgcctgcgttgcatgaacactatgtagcatgtggttaacttgggggaatagataattgaagacaacttgattgtacttgttccttgttttgtggaaatctttatatgactatcttaacgtccttgacgccttggtggacatgcaacatgaatatttttttctctcaaacccgcatgagaggtgctcatcattatattaagaaaataaaaa

SEQ ID NO: 67803 - DNA, 2112 bp, Zea Mays
ttacaatacgtcgaaccaaacacgtcgcaagtgtcgagtgacgcggcactccagcggctcaattctaatccagcagcctggcagcagccgccatcgcccactcgccgtcgcaccaaccgccgccccagtgaagggcccatgccgccgtctccgtccgactccagccccgacatggacccgcgcagcggctactgcgcgtcgacgaggacgttctacagcctgcgcgcggcgccgccttcgccgccgccgccgccggacgccccgctctccttcccggctttcgccctgtccttcctccccaccccgctgccctcgcccttggccgcgagccgcccggcgctcgtagacgctggcacgggcgagtccgtcccgctcccggccttcctctccaggctgcgcgcgctcgccgccgcgctccgcgcccggctccgcctcggcccgggcgacgtcgcgttcgtgctcgcgcccgcgggcgtccacgtccccgtgctctactacgcgctcatgtccgtgggcgccgtcgcgtccccggccgacccgtccctacccgccgccgaggtctcccgcctgctcgcgctctccgacccgcgcgtcgccttcgccgtcgcgggcaccaggggcaagctccctcccgggctccccaccgtgctgctcgactcgccgacgttcctctcgttcctgcacgagcccgaggacgcggcggtggtccggcagtcggacccggtggtggtccggcagtcggacccggcggcggtgctgtactcgtccgggaccacggggcgcgccaaggcggtcgtgctgacccacggcaacctcatggccagcaacgtgacgcgggcgcccgcggccggggagaccctcatgctcgccgtgcccctcttccacgtgtacggcttcaccttctgcctgagggcggcgtcggcggcgcacacgctggtgctgcccgcggccaggaggaggttcgacgccgcggcggtcctgggcgcggtggagaggttcgaagtgacgcgcctggcgctggcgccacccgcgctgctcgccatcgtgcgcgccgccgaggaggacgcggcggcgcctgcccgcgcagcctcgctgcaggctgtgaggtgcggcggcgcccccgtcgcggctgacctcatcgcgcgcttctcgcgcgtgttccccggcgtaagcctcgcgcaggggtacggcctcacggagactacagccggattctgccgcgccgtcggggaggaggaaagcgcgcgagtgggatccgtggggcgtctctcatggggcgcccaggtgaaggtcgttgatccggagacgggggcagccctgcctcctggcgtggcaggggagctttgggtccgaggccctttcgtgatgaaagcgtagcgtaggttaccttggcgacgacgattccacgtctgagatcttggacagccaaggatggctgaggacaggagatctctgctacatcgaccaggatggattcgtcttcatcgtagaccgtctcaaggagttgatcaagtacaaaggctaccaggtgcctcctgcagagctcgaaaacctgctgcagacacaccctgacattgatgaagccgcagttgtcccataccgtagtgacgaggatggtggggagttgccggtagcgttcatcgtcagacgcccaggaagccaccacttgcaggaatcacacatcaaagacttcgtcgccaaacaggtcgcgcactacaagcggatccaccatgttttccttgtggattcgataccgaagaacgcgtcgggcaagattttacgcagggacctggccaagctagcgtcgcggcgcattagctccaagctataggtcaataggtgcattgtatgtgtgacgtccatttctttccttctcttgttgcaatgtactagcagacactgtcagacttgtagttattaccataccggtttatttaatcaagacatggagagtaatcgtgtagcctctcaacaagaaaaaagataagtacacagtactggcttggcaaaccatctgcactataccagaaaagactggataacattcgtcatatctacctgaactgctgaacgacaccaaaatcttctgcagctgatagacagatggggttg

SEQ ID NO: 67804 - DNA, 3147 bp, Zea Mays
ggaccccaaccccgcggcccacacgtcatccactctagccacagcatctcacgtgccgccccccacctccacccttacctcccggcatttgggttactgacgtgtgggaccagatctaggatggacccacacgtcagtgacccaactgcagaggaaatagctgcaaaggatctcatccccccacctagcacatcaactcggagtcggagattcccctcccagccgtcgaaagtcgaaaccctagccccgcctcaccgccggcggtggtggcagcctcagcaccggcacacagcccgccgtacctctcctcgtacgctcccttccggtgtgccgtcgccccctcgaccggtccatcgttcgtcggctcggtagccgccggatcggatcgggatcggccggcgccatgtccaaggccagggtctacaccgacgtcaacgtgctgcgccccaaggagtactgggactacgaggcgctcaccgttcaatggggtgagcaggataactatgaagttgttaggaaagttgggagagggaaatacagtgaagtctttgagggtattaatgttaacaataatgagaaatgcatcattaagatcctcaagcctgtgaagaaaaagaagatcaaaagagaaattaaaattcttcagaatctttatggaggccctaacattgtgaagctgcttgatattgttagagatcagcattcaaaaacaccaagcttgatctttgagtatgtcaacaacacagatttcaaagtgttgtacccgacactaacagattatgacattcgatattacatctatgagttactcaaggcattagattactgccattcacaaggtattatgcaccgagatgtgaagccccacaatgttatgatagatcatgagcttcggaaactccggctgatagactggggccttgctgaattctatcatcctggcaaggaatataatgtccgtgttgcctccaggtacttcaagggtcctgagcttcttgttgacttgcaagattatgattactctctggacatgtggagtctgggctgcatgtttgctggaatgatttttcgtaaggagccatttttttacggtcatgacaaccatgatcaacttgttaagatagccaaggtacttggaacagatgggctgaatgtctatttgaacaagtacagaattgagcttgaccctcagctcgaagcccttgttggaaggcatagcaggaaaccctggacaaagtttattaatgcagacaaccaacacctagtgtctcatgaggccatagatttcctcgacaagcttttgcgttatgatcatcaggacaggcttactgcacgtgaagctatgacacacccatacttccaacaagtgagggctgcagagaacagcaggacgcgggcatgagaggccaaagaccaaagaggcaaagactggtgctaaccgtggatcagatcatctgctcttggtggagccatgctcttaccagtgatgaatagtggtttgggggtttacttggcaaaaacaaacagtagctatggcgcctgttgtacccttaaccgcgtcgagacgtgactgaattactcaggtcatcggcttgtgggacgtgattgcgaacgagattattcatgtaagatgtttgtcataaaaggtcgtcgttggctgattgtgctgtttgtattgttgagctagtaaagaatatccaaaatttgtttggacttcatcgagctctccaggtttattttctcgtaatctctatggaaattaccgttactagagataaatggcatccttgcaatgtcccaaattctcaccgaagaacacaaggaaaagagaagaaaatattgagcaagcacagcacaggcaggcagcatgaatccacacagaaccaatggtttttagcacagcaggctgacagccaagggttacagtacataatcagacggggcaacacgaacgaagcagccgcatcagcagcagcctagaacccattaattgacacacagcgtatatatatatatgtagtacttgtcttttagctgagcagagcatatgcttctgctgcttactagttcttgaggtgggggaagcactggtagaggtcgttcttgggatgcctcgcctccgcatgttctttgcacttggcctcggaggtggtgcagatgaaggtctgcatgcagatcttgcactgcattcagatggaattatcaaaaggttagtgcatttttggccaatgggaggcatcaacctctgtgctcggcggttaatgcttaattgaaaaggtagtagtactcttgaattacactgctaactagagcttttgtaggtacatacatacggcaatgactgctatacaagcagttcttcggcaatgactgctatacaagcagttcttctgttcaagcgtgtaagcaaaccatctgatacattagatcgtgatacaaccgtagatcatatctaacacttaaacacttccaccaccagctcaataatttttataaaaaaaacctaacaaaccatagttgtatctatggatcagatgttgcatgtgtaacagaagaactgtcgttgcccatacatatataaagcagtataaggtttgatttggtgattcgggatccaccaccaaatcaaccctaaaactagaggcatagccatggttgacaattagggttcgagaatcgcgccgtggctggatctgccgaatccagacggagtagcctgaaacccaagcgaatctgggaaaacccccaaaatctcgacaggaacacagggcaagcaagaggaggaagatacctggatgttcatggccttcttgttggcctccagctggctgcctgcaagcaaatacagagcggaaatacgagacggtgagcaaagggcggcggctggggcgggcgggggacatgcatcggtcgggtacttgcctttgccgcccttgttcttctcggcgttcctctcgcgcgccatcttggacttctgggcgttgccgccgcccatggccgctgaatcctgcgatggaagaggcgaagatagagacgagaggagcgggggcgtggtagtgcgggcggcggaccgacgccagccaacgcgtcccttttatttatgcaacaagtccttcgtcccttacttttaattattagaaaaaaaat

SEQ ID NO: 67805 - DNA, 1122 bp, Zea Mays
gcaactaagtttccccttgactgagaaacctgcacataagcaccttaagtacctgaacttggcccctcaccagttgaggcaacttccagtgctacatacagaaatttaggaaattacatcagctggttgaaaacctattagctcttactagaaaatggtttctgacagtacacgaaaaacatgttgctgggtaattaaacaggctaccaggagcagctatcctttgtgtggcattgatatcatctatgttatcaggcgacattgaaagatagtatccaagaaatttaaagtgtatccattcacctgctgggtagtttactgggccagcctatattgagataccagataagtttcaactttcaagaccccacattctgctcattacaggtataacaaatggcaaaacaattctcggcatatcctctgatttgaagtatggtagcatacctatataagaggaatgcattttctttattggatcgtgatattccactttactaattcatcgttcatcacatacaagcaaagctactgggactgggataaagacatacagggtgaacccaaaagaggcaattacctggagtgtggaagctcatgtaggggaaaatgccggagaagaaagtgtccttgaatacctttgtgacccggcgagacatcagatcaatggtgaatagcccatcgcccgtccgcacaaacacgacaccgacgccatccacaaagctaaccacatcaacaaaggccgagagggcaccgacagggagcagcgtgtcaagctcgatggctctggtctgtgtcagcagacaacatgtgagcagacatgttgacgaggtgcagcagccggatggagttctgatggaagatgtaaaggctgcggaaatgggccaagacgatgtcgaagctggaattatcagactgggccgtcgtgttcgcaagcccaatacaagatatccatcgtcttgctggacgcgctgagtcagccgtcatgtaataaatactgtgaacgagagttagagaggggaagaaagaaattaccaacaaatattcttgttatttccattcgtttcctttgtagttagccagtagatagttacaagtggtatcggctttgttcatcctggg

SEQ ID NO: 67806 - DNA, 2548 bp, Zea Mays
gtcactgacttgtgggcccagaggccaaagcgcgcactgcccatcaccgtctcctgaatctcagaaccttatcccctcctttgctccatccctctcctctcttcctcggcgacctccacgccggtctagagccggcagcgctgcggcggagcaccaaccgagctccgatcccaccccgctcccaaccgcgcggccctgtccatggcgcgcgcggtgcggcggcgagcccccatgcattcccgccgccggagcgcggcctgctaagcgacgacaattcctctccctctcctaaatccactcccccacgtgtcttcatgggccctccggcctacaccgcctccccctgcacggggtctgccctcttctccaacacccgagcgccgccgccgccaccgcggcttcttatccgatggggcccggggccgccgtcggccgtggggaggcacggaggccgcgtaactccgtcgcaggagaggcgcggccccgccccgtcgcaggagaggcgccgacccgctccgtctcaggagaggcgccgccccacggagtcttcgtcccagtctcaccagctccaggaacggaagcggcactggaaggcgggggagttcccggggaccgctgccgatggaggaggtggcggcggaaggcgccccgcactagggaaccggcattcgaaggccggggagtttcccgggacggacggcgtccgccccgcccccgcgccgccgcaggggaagcggcactggaaggccggcgagttcccgggcgccgccgccgcccccggttcggggacgccgaggactcccctcaagaacgtcaagaagcggctggacgcccgcgcggacgccaaggcgtgggcgtgcaccgtcaccgaggccctcgcggaccgcgtcagctccaagaactggcaagaggcgctccaggtctttgagatgctcaaggagcagccgttctaccatcccaaagagggcacctacatgaagctcatcgtgctgctgggccggtcagggcagccgacccgtgcacaccaactcttcgacgagatgttgcagcaaggatgccagcccacccccgagctctacaccgccttgatcggggcctactgccgaagcggcctactggacgaggcactccagctcctcaacgacatgaagagctcccctttatgccagcctgacgtctacacctacagcaccatcatcaaggcctgcattgacgctgccaggttcgacctcaccgacgccatgtacaaagacatggcggagcgctccatatcacccaacacggtcacacagaacatcctgattggcgcctacgggaagcggcggatgtatgacaagatgtccgcagtcatggagcacatgcgcaagctcgcgttcccgtggacgaccgcgacgtacaacaacgtgatcgaagcatttgctgaggccggcgacgccgggaacatggagcacgcgttcaaccagatgcgttccgagggcatgaggccggacactaagaccttctgctgcctgatcgacgggttcagcagggcaggccagttccataaggtggtgggcatggtgaagctcgccgagaggctcgacgtgcccgtgaacacgcctttccacaatgctgttcttggcgcgtgcgctagagcggacgatctcgtggagatggagagggtgttcaggcgcatgaagcatacgcagtgcgagcctgatgcttcgacgtactctatcttggtggaggcttatcgcaaggagggaatgaccgacaagatctatgctctgcatcaggagaacccggctctggttccagctgattttgtcatggtttgaatgacccagtgactgagtcacggtcctgaaattttagagcttggttgcattggttgagaatcttcttgctatccaccaaacagagtggcggccattcttcaactccattttttttgtctgttggtatgcagagctagtatagacgtctcctccaactcaaggggggtgaaagtgcgtcagcaacgtacgggtattcatctagtttgatatattccaagaaaaacaaagaccaatgcaggagaagatggacaatgtgacacagaataatctctggaaaatagatacctggaagcttcctcgtcaaacaagactattatgaagactacaaaagccgcccgcccgttcgacagcgagctatatatgagctgtctggaacacgatttcccccctctgttcctgcgtttttcatgcacgaataaatctgagctgatttctgtgaaatttatatgcgaaccccttgaaattcatgtgttccaaacacggcctaaaagaactttgtctagagaaaccctctaggtaacacagacgcgcaaaccttcaagtatcgatctcagagaggacatgcagaagatgatttgcagtttgctgcggggtaggctcctcagggcctttgggactgcttttgtcttcgcctgactccaccttttatttttgtttgaacttgctaccagctggatacttccagagaatccgtacagtacagcccttggctgttgaattccaagtcttcg

SEQ ID NO: 67807 - DNA, 2624 bp, Zea Mays
gtcactgacttgtgggcccagaggccaaagcgcgcactgcccatcaccgtctcctgaatctcagaaccttatcccctcctttgctccatccctctcctctcttcctcggcgacctccacgccggtctagagccggcagcgctgcggcggagcaccaaccgagctccgatcccaccccgctcccaaccgcgcggccctgtccatggcgcgcgcggtgcggcggcgagcccccatgcattcccgccgccggagcgcggcctgctaagcgacgacaattcctctccctctcctaaatccactcccccacgtgtcttcatgggccctccggcctacaccgcctccccctgcacggggtctgccctcttctccaacacccgagcgccgccgccgccaccgcggcttcttatccgatggggcccggggccgccgtcggccgtggggaggcacggaggccgcgtaactccgtcgcaggagaggcgcggccccgccccgtcgcaggagaggcgccgacccgctccgtctcaggagaggcgccgccccacggagtcttcgtcccagtctcaccagctccaggaacggaagcggcactggaaggcgggggagttcccggggaccgctgccgatggaggaggtggcggcggaaggcgccccgcactagggaaccggcattcgaaggccggggagtttcccgggacggacggcgtccgccccgcccccgcgccgccgcaggggaagcggcactggaaggccggcgagttcccgggcgccgccgccgcccccggttcggggacgccgaggactcccctcaagaacgtcaagaagcggctggacgcccgcgcggacgccaaggcgtgggcgtgcaccgtcaccgaggccctcgcggaccgcgtcagctccaagaactggcaagaggcgctccaggtctttgagatgctcaaggagcagccgttctaccatcccaaagagggcacctacatgaagctcatcgtgctgctgggccggtcagggcagccgacccgtgcacaccaactcttcgacgagatgttgcagcaaggatgccagcccacccccgagctctacaccgccttgatcggggcctactgccgaagcggcctactggacgaggcactccagctcctcaacgacatgaagagctcccctttatgccagcctgacgtctacacctacagcaccatcatcaaggcctgcattgacgctgccaggttcgacctcaccgacgccatgtacaaagacatggcggagcgctccatatcacccaacacggtcacacagaacatcgtcctcagcggctacgggaaggccgggcggttggacgacatggagcgagtgctctccgacatgctcgacagcgtgtcatgcaaaccggacgtttggaccatgaacatcatcctcagcctcttcgggaaccggggcgaggttgaactgatggagagatggtacgagaagttccgaggctacggggtcgagccggagacccgcacgctgaacatcctgattggcgcctacgggaagcggcggatgtatgacaagatgtccgcagtcatggagcacatgcgcaagctcgcgttcccgtggacgaccgcgacgtacaacaacgtgatcgaagcatttgctgaggccggcgacgccgggaacatggagcacgcgttcaaccagatgcgttccgagggcatgaggccggacactaagaccttctgctgcctgatcgacgggttcagcagggcaggccagttccataaggtggtgggcatggtgaagctcgccgagaggctcgacgtgcccgtgaacacgcctttccacaatgctgttcttggcgcgtgcgctagagcggacgatctcgtggagatggagagggtgttcaggcgcatgaagcatacgcagtgcgagcctgatgcttcgacgtactctatcttggtggaggcttatcgcaaggagggaatgaccgacaagatctatgctctgcatcaggagaacccggctctggttccagctgattttgtcatgagctagtatagacgtctcctccaactcaaggggggtgaaagtgcgtcagcaacgtacgggtattcatctagtttgatatattccaagaaaaacaaagaccaatgcaggagaagatggacaatgtgacacagaataatctctggaaaatagatacctggaagcttcctcgtcaaacaagactattatgaagactacaaaagccgcccgcccgttcgacagcgagctatatatgagctgtctggaacacgatttcccccctctgttcctgcgtttttcatgcacgaataaatctgagctgatttctgtgaaatttatatgcgaaccccttgaaattcatgtgttccaaacacggcctaaaagaactttgtctagagaaaccctctaggtaacacagacgcgcaaaccttcaagtatcgatctcagagaggacatgcagaagatgatttgcagtttgctgcggggtaggctcctcagggcctttgggactgcttttgtcttcgcctgactccaccttttatttttgtttgaacttgctaccagctggatacttccagagaatccgtacagtacagcccttggctgttgaattccaagtcttcg

SEQ ID NO: 67808 - DNA, 2652 bp, Zea Mays
gtcactgacttgtgggcccagaggccaaagcgcgcactgcccatcaccgtctcctgaatctcagaaccttatcccctcctttgctccatccctctcctctcttcctcggcgacctccacgccggtctagagccggcagcgctgcggcggagcaccaaccgagctccgatcccaccccgctcccaaccgcgcggccctgtccatggcgcgcgcggtgcggcggcgagcccccatgcattcccgccgccggagcgcggcctgctaagcgacgacaattcctctccctctcctaaatccactcccccacgtgtcttcatgggccctccggcctacaccgcctccccctgcacggggtctgccctcttctccaacacccgagcgccgccgccgccaccgcggcttcttatccgatggggcccggggccgccgtcggccgtggggaggcacggaggccgcgtaactccgtcgcaggagaggcgcggccccgccccgtcgcaggagaggcgccgacccgctccgtctcaggagaggcgccgccccacggagtcttcgtcccagtctcaccagctccaggaacggaagcggcactggaaggcgggggagttcccggggaccgctgccgatggaggaggtggcggcggaaggcgccccgcactagggaaccggcattcgaaggccggggagtttcccgggacggacggcgtccgccccgcccccgcgccgccgcaggggaagcggcactggaaggccggcgagttcccgggcgccgccgccgcccccggttcggggacgccgaggactcccctcaagaacgtcaagaagcggctggacgcccgcgcggacgccaaggcgtgggcgtgcaccgtcaccgaggccctcgcggaccgcgtcagctccaagaactggcaagaggcgctccaggtctttgagatgctcaaggagcagccgttctaccatcccaaagagggcacctacatgaagctcatcgtgctgctgggccggtcagggcagccgacccgtgcacaccaactcttcgacgagatgttgcagcaaggatgccagcccacccccgagctctacaccgccttgatcggggcctactgccgaagcggcctactggacgaggcactccagctcctcaacgacatgaagagctcccctttatgccagcctgacgtctacacctacagcaccatcatcaaggcctgcattgacgctgccaggttcgacctcaccgacgccatgtacaaagacatggcggagcgctccatatcacccaacacggtcacacagaacatcgtcctcagcggctacgggaaggccgggcggttggacgacatggagcgagtgctctccgacatgctcgacagcgtgtcatgcaaaccggacgtttggaccatgaacatcatcctcagcctcttcgggaaccggggcgaggttgaactgatggagagatggtacgagaagttccgaggctacggggtcgagccggagacccgcacgctgaacatcctgattggcgcctacgggaagcggcggatgtatgacaagatgtccgcagtcatggagcacatgcgcaagctcgcgttcccgtggacgaccgcgacgtacaacaacgtgatcgaagcatttgctgaggccggcgacgccgggaacatggagcacgcgttcaaccagatgcgttccgagggcatgaggccggacactaagaccttctgctgcctgatcgacgggttcagcagggcaggccagttccataaggtggtgggcatggtgaagctcgccgagaggctcgacgtgcccgtgaacacgcctttccacaatgctgttcttggcgcgtgcgctagagcggacgatctcgtggagatggagagggtgttcaggcgcatgaagcatacgcagtgcgagcctgatgcttcgacgtactctatcttggtggaggcttatcgcaaggagggaatgaccgacaagatctatgctctgcatcaggagaacccggctctggttccagctgattttgtcatggtttgaatgacccagtgactgagtcacgagctagtatagacgtctcctccaactcaaggggggtgaaagtgcgtcagcaacgtacgggtattcatctagtttgatatattccaagaaaaacaaagaccaatgcaggagaagatggacaatgtgacacagaataatctctggaaaatagatacctggaagcttcctcgtcaaacaagactattatgaagactacaaaagccgcccgcccgttcgacagcgagctatatatgagctgtctggaacacgatttcccccctctgttcctgcgtttttcatgcacgaataaatctgagctgatttctgtgaaatttatatgcgaaccccttgaaattcatgtgttccaaacacggcctaaaagaactttgtctagagaaaccctctaggtaacacagacgcgcaaaccttcaagtatcgatctcagagaggacatgcagaagatgatttgcagtttgctgcggggtaggctcctcagggcctttgggactgcttttgtcttcgcctgactccaccttttatttttgtttgaacttgctaccagctggatacttccagagaatccgtacagtacagcccttggctgttgaattccaagtcttcg

SEQ ID NO: 67809 - DNA, 2626 bp, Zea Mays
gtcactgacttgtgggcccagaggccaaagcgcgcactgcccatcaccgtctcctgaatctcagaaccttatcccctcctttgctccatccctctcctctcttcctcggcgacctccacgccggtctagagccggcagcgctgcggcggagcaccaaccgagctccgatcccaccccgctcccaaccgcgcggccctgtccatggcgcgcgcggtgcggcggcgagcccccatgcattcccgccgccggagcgcggcctgctaagcgacgacaattcctctccctctcctaaatccactcccccacgtgtcttcatgggccctccggcctacaccgcctccccctgcacggggtctgccctcttctccaacacccgagcgccgccgccgccaccgcggcttcttatccgatggggcccggggccgccgtcggccgtggggaggcacggaggccgcgtaactccgtcgcaggagaggcgcggccccgccccgtcgcaggagaggcgccgacccgctccgtctcaggagaggcgccgccccacggagtcttcgtcccagtctcaccagctccaggaacggaagcggcactggaaggcgggggagttcccggggaccgctgccgatggaggaggtggcggcggaaggcgccccgcactagggaaccggcattcgaaggccggggagtttcccgggacggacggcgtccgccccgcccccgcgccgccgcaggggaagcggcactggaaggccggcgagttcccgggcgccgccgccgcccccggttcggggacgccgaggactcccctcaagaacgtcaagaagcggctggacgcccgcgcggacgccaaggcgtgggcgtgcaccgtcaccgaggccctcgcggaccgcgtcagctccaagaactggcaagaggcgctccaggtctttgagatgctcaaggagcagccgttctaccatcccaaagagggcacctacatgaagctcatcgtgctgctgggccggtcagggcagccgacccgtgcacaccaactcttcgacgagatgttgcagcaaggatgccagcccacccccgagctctacaccgccttgatcggggcctactgccgaagcggcctactggacgaggcactccagctcctcaacgacatgaagagctcccctttatgccagcctgacgtctacacctacagcaccatcatcaaggcctgcattgacgctgccaggttcgacctcaccgacgccatgtacaaagacatggcggagcgctccatatcacccaacacggtcacacagaacatcgtcctcagcggctacgggaaggccgggcggttggacgacatggagcgagtgctctccgacatgctcgacagcgtgtcatgcaaaccggacgtttggaccatgaacatcatcctcagcctcttcgggaaccggggcgaggttgaactgatggagagatggtacgagaagttccgaggctacggggtcgagccggagacccgcacgctgaacatcctgattggcgcctacgggaagcggcggatgtatgacaagatgtccgcagtcatggagcacatgcgcaagctcgcgttcccgtggacgaccgcgacgtacaacaacgtgatcgaagcatttgctgaggccggcgacgccgggaacatggagcacgcgttcaaccagatgcgttccgagggcatgaggccggacactaagaccttctgctgcctgatcgacgggttcagcagggcaggccagttccataaggtggtgggcatggtgaagctcgccgagaggctcgacgtgcccgtgaacacgcctttccacaatgctgttcttggcgcgtgcgctagagcggacgatctcgtggagatggagagggtgttcaggcgcatgaagcatacgcagtgcgagcctgatgcttcgacgtactctatcttggtggaggcttatcgcaaggagggaatgaccgacaagatctatgctctgcatcaggagaacccggctctggttccagctgattttgtcatgagagctagtatagacgtctcctccaactcaaggggggtgaaagtgcgtcagcaacgtacgggtattcatctagtttgatatattccaagaaaaacaaagaccaatgcaggagaagatggacaatgtgacacagaataatctctggaaaatagatacctggaagcttcctcgtcaaacaagactattatgaagactacaaaagccgcccgcccgttcgacagcgagctatatatgagctgtctggaacacgatttcccccctctgttcctgcgtttttcatgcacgaataaatctgagctgatttctgtgaaatttatatgcgaaccccttgaaattcatgtgttccaaacacggcctaaaagaactttgtctagagaaaccctctaggtaacacagacgcgcaaaccttcaagtatcgatctcagagaggacatgcagaagatgatttgcagtttgctgcggggtaggctcctcagggcctttgggactgcttttgtcttcgcctgactccaccttttatttttgtttgaacttgctaccagctggatacttccagagaatccgtacagtacagcccttggctgttgaattccaagtcttcg

SEQ ID NO: 67810 - DNA, 2152 bp, Zea Mays
tacgggactggacccctagaacaaccaccacactctcctccctccctccccgcccacactccaccacccgcgccccgccgcccgccccgccgccgcctcctacttcgcctcggccgcctcggatccggaccgagcgccggccatggcgctcgccttcgacgagttcgggcgccccttcatcatcctgcgggagcaggagaagaagacgcgcctgcgggggctcgacgcgcagaaggccaacatcggcgcgggcaaggccgtcgcgcggatcctccgcacctcgctcggccccaagggcgcggacaagatgctccagtcccccgacggcgacgtcatcatcacaaatgatggggcgaccatcctggagcagatggatgttgacaaccagatcgcaaagctgatggtggagctgtcccgtagtcaagactacgaaatcggggatggtaccaccggtgtggtagtcatggcaggggcgctccttgagcaggccgagaagcttttagaacgtggtattcaccccattagggttgctgaaggctatgagatggcatcaaaggtagcttttgatcacctagaacgaatctccgaaaagtttgagttcagtgcagacaacattgagcccctggttcagacatgcatgacaactctatcctcaaagattgttaaccgttgcaagcgggcattggcagagattgctgtcaaagcagtacttgcggttgcagatttggagaggaaggatgttaacttggatttaattaaagtagaaggcaaggttggtgggaagctggaggacaccgagcttgtatatggaattattgttgacaaagatatgagccatccacaaatgccaaagagaattgaggatgctaagattgccatcctgacatgcccatttgagccaccgaagcctaagaccaagcataaggttgacattgatactgtcgagaaattccagacactgcgtgagcaagagcagaaatacttcgatgaaatggttcagaagtgcaaagatgctggtgcaaccctggttatttgtcagtggggttttgatgatgaagccaatcatttgttgatgcatagaaatctgccagctgtcagatgggttggtggtgttgaattggaattgattggacgaattgttccgagattccaagagttgagtcctgaaaagcttgggaaggctggattagtcagagagaaatcattcggaacaacaaaggataggatgctttacattgagcagtgtgccaattccagagctgtaactatcttcattcgtggtggaaataaaatgatgattgaggagaccaagcgcagtcttcatgatgctctttgtgtggcaaggaatctgatccggaacaactcaatcgtgtacggcggtggctcagcagagatatcttgctcaattgctgttgaaactgctgcagatcggcaccctggagttgagcagtacgctatcaggtcattcgctgatgcattagacgctgttccactggccttggctgaaaacagtggtttgtcgccaattgataccttgacggcggtaaaagctcagcaagagagcaacccccactgcggcatagactgcaacgatgtaggcaccaacgacatgaaagagcagaacgtctttgagaccctgattggcaagcagcagcagatcctgctggccactcaggtggtgaagatgatcctgaagatcgacgacgtcatctcaccgtccgagtactgatgaagcctgaaggaaggaggaaaaaaaaagagaggaacaggtggctatgctggatgagagtttagtaggcagcattgctgatgtgttgattggtttactccttgttcaggcgtgctccttgtatcttatgagctgcctagcacctttttgtgtgaggggttgtttgtattgcacgatattgcatcgaggaatacgtatgtacgtgttgtcaagaccctaggcaattctcttcagggctgtgagatggttggggtactgataccttttttttgtattgttttcatttcaccacttagctgaagctgtcctttttgttttatgaatgctgcaatagtttggcgccctcactctgtttggtctgaacaaggtaaccttttgtacttcccccgtcttgacgcgctaagtttctctcagatcgcagaa

SEQ ID NO: 67811 - DNA, 2162 bp, Zea Mays
tacgggactggacccctagaacaaccaccacactctcctccctccctccccgcccacactccaccacccgcgccccgccgcccgccccgccgccgcctcctacttcgcctcggccgcctcggatccggaccgagcgccggccatggcgctcgccttcgacgagttcgggcgccccttcatcatcctgcgggagcaggagaagaagacgcgcctgcgggggctcgacgcgcagaaggccaacatcggcgcgggcaaggccgtcgcgcggatcctccgcacctcgctcggccccaagggcgcggacaagatgctccagtcccccgacggcgacgtcatcatcacaaatgatggggcgaccatcctggagcagatggatgttgacaaccagatcgcaaagctgatggtggagctgtcccgtagtcaagactacgaaatcggggatggtaccaccggtgtggtagtcatggcaggggcgctccttgagcaggccgagaagcttttagaacgtggtattcaccccattagggttgctgaaggctatgagatggcatcaaaggtagcttttgatcacctagaacgaatctccgaaaagtttgagttcagtgcagacaacattgagcccctggttcagacatgcatgacaactctatcctcaaagattgttaaccgttgcaagcgggcattggcagagattgctgtcaaagcagtacttgcggttgcagatttggagaggaaggatgttaacttggatttaattaaagtagaaggcaaggttggtgggaagctggaggacaccgagcttgtatatggaattattgttgacaaagatatgagccatccacaaatgccaaagagaattgaggatgctaagattgccatcctgacatgcccatttgagccaccgaagcctaagaccaagcataaggttgacattgatactgtcgagaaattccagacactgcgtgagcaagagcagaaatacttcgatgaaatggttcagaagtgcaaagatgctggtgcaaccctggttatttgtcagtggggttttgatgatgaagccaatcatttgttgatgcatagaaatctgccagctgtcagatgggttggtggtgttgaattggaattgattgccattgcaacaggaggacgaattgttccgagattccaagagttgagtcctgaaaagcttgggaaggctggattagtcagagagaaatcattcggaacaacaaaggataggatgctttacattgagcagtgtgccaattccagagctgtaactatcttcattcgtggtggaaataaaatgatgattgaggagaccaagcgcagtcttcatgatgctctttgtgtggcaaggaatctgatccggaacaactcaatcgtgtacggcggtggctcagcagagatatcttgctcaattgctgttgaaactgctgcagatcggcaccctggagttgagcaggtcattcgctgatgcattagacgctgttccactggccttggctgaaaacagtggtttgtcgccaattgataccttgacggcggtaaaagctcagcaagttaaggagagcaacccccactgcggcatagactgcaacgatgtaggcaccaacgacatgaaagagcagaacgtctttgagaccctgattggcaagcagcagcagatcctgctggccactcaggtggtgaagatgatcctgaagatcgacgacgtcatctcaccgtccgagtactgatgaagcctgaaggaaggaggaaaaaaaaagagaggaacaggtggctatgctggatgagagtttagtaggcagcattgctgatgtgttgattggtttactccttgttcaggcgtgctccttgtatcttatgagctgcctagcacctttttgtgtgaggggttgtttgtattgcacgatattgcatcgaggaatacgtatgtacgtgttgtcaagaccctaggcaattctcttcagggctgtgagatggttggggtactgataccttttttttgtattgttttcatttcaccacttagctgaagctgtcctttttgttttatgaatgctgcaatagtttggcgccctcactctgtttggtctgaacaaggtaaccttttgtacttcccccgtcttgacgcgctaagtttctctcagatcgcagaa

SEQ ID NO: 67812 - DNA, 3968 bp, Zea Mays
ggccggccgacacggttcagcggccacatgcatgcagcgacagtctaatcaaagcccacagcagagaccgtcagtgtcatggatcagtcattcggttttctttatttaattagaccacaactctctccctcataaaaataaaataaaaaaaattcaagtagcataaattgtttatgactttaaatcatttccagctaacataacaagtactacaccggtacatcaaactactctcagcgctcgaatctttgtgcttgaatagtttatccgtgtcctctttttttaattacgaagaaaaaacaaagaacaaaaaaaaggtgcttgattacttgttcataattcgaggagtcgtggtccaatactgaagcccttcctcctcttgttcttcttctttttttctcccgctttacgccttttgcgctattgccttccaagctaagagtctgctatgtagtagtactatagaatgatttatctatctagctagaacgctcttcttccacctggcacagcacaaagaggagggaaaacaaaaacaacatgaacctacttggatgccgtttggttcacgaaatgtaacgtaaatggtaacggtaacgatttacactcgaataccggcgataacaaatttgaataagaaggtatccatttatagtatggtatcgattacaattaaacttaaacaaacatgatctaacgttattggttatccattacgttatcaatatgtgaaccaaacggcaccttggtccggtcagaaatgaaacggccactaagggggtgtttgggagtgaagttttttcacagttttggaagaatactgcagtattctcaaatactgcagtattatatacataatggtgtttggcaagctggctaaaatctctgttttcaaaactgaagtattgcaaatactatagtagttttaagctcttctaaacttaggtctggacctcagttttcaaaactgcggtattgtcatgaccaaagtatactgtagtatttcaaaaactatggttttcaaaaactttgttcccaaacagggcctaatacgatatatactttgagtaaatcatcagatttatgataagaaatggcagtggtcttagttttactttttttttatactatggcgatacggatgtcctcacacatgtccatgtcctcctcccgctgtacgggtggtggtgccgtgccgattcacgtgtcgggtgaacttcctcccagtcccaggccggccgtcgtcaactccaccagtctgtgtggtgtgatgagtgtgtgtgtttgatccccgagacagacaggttgtccgacgctgtccctccctgtcccgctcccggcggccggtgccggacgcggagacgcctctctggctccgctcctcgccaccgcccccgccgctttgctttaccacctcctctcctgtgctgtgcattcatcaaagctccgaacgaatgcgcgtttctctttccgcatgcatttgattaatctgcaacacataccagtccagctataaagcctgcctcgcctcgtcttccccacactccactccactgcctgctggcggctgctgcttccttccagatctaggggatcaagcaaccagccttccccgcgccgccagcaatggcggcacccccgcccgcgccgttcctcctcctgctcgccgtggcagcagcgtcgctcgccggcgccgacgacccttaccgctacttcacctggaccgtcacctacgggccaatcagcccgctcggcaccacgcagcagggcatcctgatcaacggccagttcccgggcccgcgcatcgactgcgtgacgaacgacaacctggtggtgaacgtggtcaacagcctggacgagccgttcctgctcacctggaacggcgtcaagcagcgcaagaactcgtggcaggacggggtagcgggcaccaactgcggcatcccgccgggcgccaactacacgtaccgcttccaggccaaggaccagatcggaaccttcttctacttcccgtccctggccctgcaccgcgccgcgggcggcttcggcgcgctcaacgtgtaccagcggcccgccatcccggtgccctacccgccgccggccggggacttcacgctgctcgtcggcgactggtacgccgccgcgtccccgcacgcggacctccggcgcgcgctggacgacggcggcggcggagcgctcccgccgcccgccgcgctgctcatcaacggcgccgccgcgtccggggccgcgccgttcgtcggcgcccaaggcgggacgtacctgttccgggtgtccaacatcgggctccgcgcctccgtcaacgtccgggtgcagggccacgcgctgcggctggtggaggtggagggcacccacccggtgcagagcgcctacgactcgctcgacgtccacgcgggccagtcgctggcgttcctcgtcacgctggaccaggcgccgctggactacgccgtggtggcgtccacgcgcttcgccgccgccgagctcacggccgtcgccacgctgcattacgcgggggccacggcccgcgcgcccggcccgctgccgccggccccgccgcccggctacggctggtcgctgggccaggcgcggtcgttccggtggaacctcacggccagcgcggcgcgccccaacccgcagggctccttccactacggcgccatcccgacgtccaggacgctggtgctggccagctccgcttccctcgacggcgccgggcgtaggcgctgcgccgtcaacgccgtgtccttcgtcgtgcccgacacgccgctcaagctcgccgacagatacgacatcgccggcgtcatcgactgggacggcctccccgcgcggctcgacggcgccgcggcggtgccgcgcgccgggacgcccgtgctcaggctcggcctgcacgagttcgtggaggtggtgttccagaacacggaggaggagctgcagtcgtggcacctcgatggatacgacttctgggttgtagggtgggtggggtacggcgatggccagtggaatgagacgcagcggcagacgtacaacttggtggacgcgcaggcaagacacaccgttcaggtgtaccccaacgggtggtcggcgatcctggtgtcgctggacaaccaggggatgtggaacctgcggtcggcgatgtgggaccggcagtacctcgggcagcagctctacctcagggtgtggacgccggagcagagcctctccaacgagtacgccatccccgccaacgccatcctctgcgggaaggccgccgccctcccacactgacacgacgacgttcagcagccatactactgcctgctccattcgaccaaccaagtgaaagaagaagaggagaatctatttttgttgctgcaagaattaatgtgaaaaaaaacacaattactgccactggtatacgtatctcctaactcctaattgtccagcaacagttacagcgtttttttatgcaacactgccagacaacaatctcttgtcagttttacctaaaactaaacaaaacattgaaacaaaacataaatcacagtgtttctagggaagggacaaggagaagatacttgtcatctcaaaccaaaacgaaaacctaatgcatctatccatctcattggtgccattactgagaccagacctgctagctaccactgaaactagctctggaaagggtcggccgtcgacagatcgtgtgcacctgctcagcgtgaggcttttgcaatacttgcttccggtgtttatggtaccatccgtccctcacgcagacacttgctgcctgaaaatcccaaaggcaggcaggcaggcagataattaattaaaaaagaaagaaggaaggaaggaaggaatcacatcgatgtacagcttctccaggttgggaacgcagttgagcacgtcaatcagcgcttgcaaggagagcttgacaccagataaagctaggagcttcacgctgacagtgggtaatccct

SEQ ID NO: 67813 - DNA, 1994 bp, Zea Mays
ccagctctgcctcttatcatgtcttctcttctcctacgccgtacgaggcacgtagcatatgcggccgcatatccattgaagcctagacagtgatcgaacgatggagatgacgaccagtggcgctggtggcgtgacaaagctggacgacgacgactatccatcggcggcggcggcagaccggtgtccgccggggacagagaagaagatgtgccgccgggttttgctcgtgggtagcctggtgacgctgcccctcctcgcgttcttcgtcttcagccgagagaacgcgtcagtggcctggttacaggtcgctattgcccagctcaccgccacgaacgacgacgacggagcagcaggcgggtttatggagggcgacgctcctcatggccacgagcccacgacgagttcctcggcgggctgctcgcgccaggcatggaccggcggtcgtgccggagccggtaccagtcgtcgcggtactacaagcacttccccttcgcgccgtcgccgcacctcttgcagaagctgcgcgggtacgaggctcggcacaggcggtgcgcccccggcacgccgctctacgccaaggccgtcgagcagctccggtctggccacagcgccgagggaggcacggagtgcagctacgtcgtgtggctccccttcgacggcctcggcaaccgcatgctgtccatggtgagcggcttcctctacgcgctgctgacgggccgcgtcctcctcgccgcgctgcccccggactcctccgacctcttctgcgagccgttcccgggcgcgacgtggcggctcccggcggaggacttccccgtcgccaacctgttcggggtcgggcaggacatggagcggtcgtacacgaagctcgttgacggcatggtggccgcgaacgcgacggcgggcgtggcaccgtcgtacgtgtacctgagcctagggtggctgctcagggacggtcttttcttctgcggcgagcaccagctcgcgctccgcagggtcgactggctgctgctgtacagcgacctctacttcgcgccgtcgctgtacgcagtggccgagttccaggacgagctccggcggctgttcccggagaaggagagcgtgcaccacctcctgtcccggtatctgctccacccagccaaccccgtgtggagcatggtcaccaggtactaccgcgcctacctggctccggcggcgagaaggatcggcgtgcagatcaggatgttcgaccacgcctccatcccggctgacgacatgtacggccagatcctcaactgctcccggcaggagcacgtactcccggaaactgacgacgttggcgaggctgcgcctagccctacagcgtcgagcggcggctccaaaaaccccaccacggccatcttcgtcgcgtcgctgtacgctgactactacaggcggctgacgtcgaggtactccgcggcgaagggcggcggcgcgacgaggagggtgggcgtgttccagcggacgcacgaggagcggcaggcgacggagagcctggcgcacaaccagagggcgctggcggagatctacctgctcagcttctgcgaggagctggtgacgtccgggctgtccacgttcgggtacgtgagcagcggcctcgcgggcattcggccggcgatcctgctcaccgcgtttgaccacgttgtccccgagacgccgtgccggcgggctgcgtccatcgagccgtgcaacctcacgccgccccggggcgtggagtgcctgagcaggcccgcggacaaggatgacctggcacgccacgtcagggtgtgcgaggatttcaaggacggggtcaagttctttgactagcgggcgtggcgctgttactttattttccatgcattttcctgcttgctatagctacggtagcgtgtgttgattgagcaaggggatgttaacttggtcaaaggtcaactaatgttcctctcggtcaaaacaaatgtttcaccttcatgataacgatcaagtttactattcttctt

SEQ ID NO: 67814 - DNA, 1471 bp, Zea Mays
ccttccgcggcctccctccgttcccatccgccgcccgcgcacttcttccttcgggcacacaggacaccaccgtcgacggattcatcgcgacgatggggctcgacgtcatggagatcgggatgggcgccgatttgagcctggatctgaggcacttcgcctccaaggccgtgaggcagagcaaggacgacacgccggcgccggacatggacgcatgcatccgccgcctcgaggaggagcggggtaagatcgagatgttcaagcgggacctcccgctctgcgcgcgcctcctcgccgacgtaattgatgtcatgaaggaggaggcggggaagaagaagacgacgacgaggaggaggagtgatcgcaggctggcgtctgcggcagctgatgatgaggaggaggaggcggacggcgccaccgcggacaagagcaagtggatgagcacggcgcagctctggacgggcgattccgggcgggaggacgcggaatcagagaagcaagacaaggggcggtgctcgccggaggccaggtcccgcggcgctctcttaccgttcaaggctgatgtgggctctggcgcgccggcgttcgcgccgctcttcttgagaacggacgacaaggctgcggctgcgcgcgtcggggtgccggatctgtcgtccttgctgtcgccgccggcgaccatgcctcctgcggacgccggcgccgaggagagccgtcgccaggttgtgggatttgcgcaagctgcggccagggcggctgccatggcgccgtctgcccctgcgcttgggctccagtcgcagcagcagcagcagcagcagcagcaggcaaggaaggctcggcgttgctggtcgacggagctgcatcgcaagttcgtcgccgccttggatcagctcggtggcccccaagttgccacgccgaagcaaatcagggagctgatgaaggtggatgggctgacaaacgacgaagtgaaaagccatcttcagaaataccggctgcacaaccgcagggcgcctggatccggcgtggtgcgccagccgatcgtgctcgtgggagggctgtggattccccaggagcaaggcagccctcagtctggatctccccacggccccctccaccacctgtccacctcggtggccgccgtctcgtccgccgccaccgccagctgcgaggaggaagacggccggcggaggaaaggcggcagtgcacagcgacagagacgaagacttttggaatcgtccttgggtggatggatggacggacgaacgaggcggggccgcgagctctgaatattcgccgccgtcgatgcatcggcggcctgcctgtcgctctcgacggagagggtggtactggtgtgcgcaaccggacaacgcaatgttcaggccagaagaatcggaatcggaatatcatattccgtctgataaatactatgagggaagaatggaggggatatgaggatatcctcgttgattctgcttga

SEQ ID NO: 67815 - DNA, 1382 bp, Zea Mays
cccatccgccgcccgcgcacttcttccttcgggcacacaggacaccaccgtcgacggattcatcgcgacgatggggctcgacgtcatggagatcgggatgggcgccgatttgagcctggatctgaggcacttcgcctccaaggccgtgaggcagagcaaggacgacacgccggcgccggacatggacgcatgcatccgccgcctcgaggaggagcggggtaagatcgagatgttcaagcgggacctcccgctctgcgcgcgcctcctcgccgacgtaattgatgtcatgaaggaggaggcggggaagaagaagacgacgacgaggaggaggagtgatcgcaggctggcgtctgcggcagctgatgatgaggaggaggaggcggacggcgccaccgcggacaagagcaagtggatgagcacggcgcagctctggacgggcgattccgggcgggaggacgcggaatcagagaagcaagacaaggggcggtgctcgccggaggccaggtcccgcggcgctctcttaccgttcaaggctgatgtgggctctggcgcgccggcgttcgcgccgctcttcttgagaacggacgacaaggctgcggctgcgcgcgtcggggtgccggatctgtcgtccttgctgtcgccgccggcgaccatgcctcctgcggacgccggcgccgaggagagccgtcgccagaaagaaacattgagttcattcatgctacgccatgcctgcagttgccacgccgaagcaaatcagggagctgatgaaggtggatgggctgacaaacgacgaagtgaaaagccatcttcagaaataccggctgcacaaccgcagggcgcctggatccggcgtggtgcgccagccgatcgtgctcgtgggagggctgtggattccccaggagcaaggcagccctcagtctggatctccccacggccccctccaccacctgtccacctcggtggccgccgtctcgtccgccgccaccgccagctgcgaggaggaagacggccggtccgagagctatggctggaaatgatgaagaggctgctgctgctgctgctgcgccaccaatgtgtgttcactgtttagagaggggagggaggtttcttggcatggtggggatcgccatgggccatggcggaggccaccagttgcagcttcaggaatcgggaggggaattgagtgtagtgtagctgtctgtacacatacatacatacatacagtgagatgggatgagatgagagcgggccttgagcgctcgagatcagaactgatggtgcttcgtcgtcgggtttgtacatcccaaagagaaagagatactagctacagttttgcggcttgttaatccatgctctgggggcagagctacagttttcgcccc

SEQ ID NO: 67816 - DNA, 1274 bp, Zea Mays
tccgttcccatccgccgcccgcgcacttcttccttcgggcacacaggacaccaccgtcgacggattcatcgcgacgatggggctcgacgtcatggagatcgggatgggcgccgatttgagcctggatctgaggcacttcgcctccaaggccgtgaggcagagcaaggacgacacgccggcgccggacatggacgcatgcatccgccgcctcgaggaggagcggggtaagatcgagatgttcaagcgggacctcccgctctgcgcgcgcctcctcgccgacgtcagcacaggatctgtgggggtgctgtcgggtgctcgattcgtcggtgggcctaaaagttttggagctttgcgatcgcagaagcaagacaaggggcggtgctcgccggaggccaggtcccgcggcgctctcttaccgttcaaggctgatgtgggctctggcgcgccggcgttcgcgccgctcttcttgagaacggacgacaaggctgcggctgcgcgcgtcggggtgccggatctgtcgtccttgctgtcgccgccggcgaccatgcctcctgcggacgccggcgccgaggagagccgtcgccagaaagaaacattgagttcattcatgctacgccatgcctgcagttgccacgccgaagcaaatcagggagctgatgaaggtggatgggctgacaaacgacgaagtgaaaagccatcttcagaaataccggctgcacaaccgcagggcgcctggatccggcgtggtgcgccagccgatcgtgctcgtgggagggctgtggattccccaggagcaaggcagccctcagtctggatctccccacggccccctccaccacctgtccacctcggtggccgccgtctcgtccgccgccaccgccagctgcgaggaggaagacggccggtccgagagctatggctggaaatgatgaagaggctgctgctgctgctgctgcgccaccaatgtgtgttcactgtttagagaggggagggaggtttcttggcatggtggggatcgccatgggccatggcggaggccaccagttgcagcttcaggaatcgggaggggaattgagtgtagtgtagctgtctgtacacatacatacatacatacagtgagatgggatgagatgagagcgggccttgagcgctcgagatcagaactgatggtgcttcgtcgtcgggtttgtacatcccaaagagaaagagatactagctacagttttgcggcttgttaatccatgctctgggggcagagctacagttttcgcccc

SEQ ID NO: 67817 - DNA, 1417 bp, Zea Mays
tccgttcccatccgccgcccgcgcacttcttccttcgggcacacaggacaccaccgtcgacggattcatcgcgacgatggggctcgacgtcatggagatcgggatgggcgccgatttgagcctggatctgaggcacttcgcctccaaggccgtgaggcagagcaaggacgacacgccggcgccggacatggacgcatgcatccgccgcctcgaggaggagcggggtaagatcgagatgttcaagcgggacctcccgctctgcgcgcgcctcctcgccgacgtcagcacaggatctgtgggggtgctgtcgggtgctcgattcgtcggtgggcctaaaagttttggagctttgcgatcgcagaagcaagacaaggggcggtgctcgccggaggccaggtcccgcggcgctctcttaccgttcaaggctgatgtgggctctggcgcgccggcgttcgcgccgctcttcttgagaacggacgacaaggctgcggctgcgcgcgtcggggtgccggatctgtcgtccttgctgtcgccgccggcgaccatgcctcctgcggacgccggcgccgaggagagccgtcgccaggttgtgggatttgcgcaagctgcggccagggcggctgccatggcgccgtctgcccctgcgcttgggctccagtcgcagcagcagcagcagcagcagcagcaggcaaggaaggctcggcgttgctggtcgacggagctgcatcgcaagttcgtcgccgccttggatcagctcggtggcccccaagttgccacgccgaagcaaatcagggagctgatgaaggtggatgggctgacaaacgacgaagtgaaaagccatcttcagaaataccggctgcacaaccgcagggcgcctggatccggcgtggtgcgccagccgatcgtgctcgtgggagggctgtggattccccaggagcaaggcagccctcagtctggatctccccacggccccctccaccacctgtccacctcggtggccgccgtctcgtccgccgccaccgccagctgcgaggaggaagacggccggtccgagagctatggctggaaatgatgaagaggctgctgctgctgctgctgcgccaccaatgtgtgttcactgtttagagaggggagggaggtttcttggcatggtggggatcgccatgggccatggcggaggccaccagttgcagcttcaggaatcgggaggggaattgagtgtagtgtagctgtctgtacacatacatacatacatacagtgagatgggatgagatgagagcgggccttgagcgctcgagatcagaactgatggtgcttcgtcgtcgggtttgtacatcccaaagagaaagagatactagctacagttttgcggcttgttaatccatgctctgggggcagagctacagttttcgcccc

SEQ ID NO: 67818 - DNA, 1294 bp, Zea Mays
gaaagatcaaccctttggcctttgcggcatcctaataaaacaaaattagtgaagatatacaaagcatgccctctgcattaagtagggaaaagcttgctgatgttggaaaggatagccttgcagaaactaaactgagcaccagcagttctcttggctgaaagccattagtagactagcattgttttagtgctgcaactaaaactgatgtactatcctcaattttatctgtgctgtcatcagtcaaaagcctcaaaagcccatgctcagtgttgttcaccgatcttgctcaaagacacagtgcataaaaaagtagtccttcatattcaacaaagctatcaaatgaacaattcataaaactggattggagtaagctgattttatcccttggtcctatgataaaaagtagaagaggaaaattgtccacagtcatacacagtattaaattccatatgccatgctttcatatgagagtcaataccattatcataatttgattgcaaactcaagttcgggagcacaaacaaggtcagaacagcaacaaaatcatgtagagatatcccacccaaaccatgcttctggtctagtaaatatccttcttgatttagagcttcttattcacttcacaagccagagctcctagccctcgagaccagcttctggtccctcatctgtggatattgctcctggcgctgcataagaaactcaaatacaaaatatgatgaatctatgataacaatgaatattgggtaaacacaaatcatacaaaagccaaaaaaacagcactgatttattatccagttaatggtcacatattgttgggccgtgtctggccgttaccgtgtagcccaagagtcttgtgtatatatatgttttgtatcagctgtaagagatagaatttcacaagcttcaacacatgtaaataacagcatcaagatgaactcaaactacatctaggaatttatcctatttatttttctacgacgttatcatgtgaaattagtatacaagagatggttgaggaacatgtataattaaaggttggcatgatgagactaatgtttgcaccgtagaatacgtgagaacctaaccttttatgtaggtaatatataggtaggagtaatctggttcatgataccaaataccaataaaaaagtattacacaatgttgctgagcccatacacagctgaactactacttattgtgcaagtgcaaatgagcaaaatacagagtgaaagcagggtgccagggtacctggaatgcagaagctcacatagggaataatgcaaccccaac

SEQ ID NO: 67819 - DNA, 1543 bp, Zea Mays
gatgaaacattattcgcaacattgagggacttgccttaccctttattattacccttcataacttaactgtgtagagaacaaatcttccacgcccttttgccgtcgccctagcttgccttcttcagttcagtcccggttgaaactggatggatatgtgattcagtcagtcagagcacacagcagccggattattccctgaaccctaataatggcaaagttcgtcagctcggtacttgtccaagagactgtcagccaggccctatctaatctctggtccgaaagtacgaggagaaagatggatcagactgtagcagggagccagggacacgagcttggagagaggctagagatggcgcacaccaggctggaggccgttctcgagacatccgagaggtggcagatcgccgacgctgccttgctgcgctggcgctcgaagctgaagcgcgtcgcgcgatactggacagtattctcagcacgggcactcagtggcttcgcccagacccgttgtgctgcaagcggcatgatcagcacgagctcgatcggccacggtagcgagtcaggcatcttggggttaggaggaggagggtattcatcagaagactacctgcgtgtggatacagctccggtgatcgcggcagtctacaccgaggagcagcactttttgcacacagaatttagttcctttggtcaggtagaagagatcatgctgcccatggcaattgattacttttgcaagaacgagaaggcgacgatctaccagatgctctggaagggtctaagcatggcactgcgcagtagagtacagacgcaccgacccggttgcagggatcaatcaaggaccggattcgtcacagagatagttataaatcaggtaacacggatcgaatattgaaccaaagtaaaaaaatagaaacttcacaaggatgtacttattattggtactggagcattgattcgaattttaacatatttttaattaggttatgttattagcagaattgtttatatatttcactaaagtttgtttgtcctagtaatatatataatcttgtaatctaacttgttgagtttgtgatccaaattctggataagagaccgagttggcaagcgaagtggagacccatagaggaaggcttcggacgcgatggttgggtcaagaatacatttggcggtcttggatgcctctcaagattctaatttccctgtggttggttggtggctcgtcgtcatcgcctatggactgccgacaaatttcgtaggcatgcatggtttggttggtggaggcaacaactgtgtgtgctcgctttgcgatgaatcagaggagtccacggtttatctgatggcttgttctttcgactgtggtttcgccgcgacttgctggtgatccggagggagcgcaactcacgaattttcagccggagccatcgtgaccgttgcgttgactgctaacttgtgctttcgacctagttctttttgctttctgttacgctttttatcgtcactgctttttgtcttcttcttccttagcctgttctattctttt

SEQ ID NO: 67820 - DNA, 2262 bp, Zea Mays
agaatgcatcttaattctccggccatcaccgcgccggcagagatccacaacagttcgcctctcccactccggttcagtactctcctctcttatctcgactcaagtccggccgagatcgtctcctcccaactgcaaacgaccaagttgtgcgtacagtacatttttgctccctcaggccccgttcgtttacgtcggattggtgggtcggaacgattcctacccggattgtttctctaatttatacaaactttgattagctggaacggtttcgggtgcaatccgacgtaaacgaacaaggcctcaatcggtcctaatggcggcggagatggtcggctccgtggttgcccaggagacggtgagccagatcctctccggcctggttcagaggtacgcggaatcgagcgacgcaacccgaaacctcgagaggctagagatggcgcacatcaggctggaggccgccctggacgcgtccgacaggtggcagatcgccgacgcgtccctgcttcgctggcgcaagaagctgaggcgcgtcgctcaggagtgccacgacgtgctgcacaggtgcaggcagcagcaaggcgtggcgcaagcgcaagcgcaagagccggcgacgccgagctcctccctctcccccctggccgccctgcccacccgcatcgcgcgcgcgaccaagtcgctcatcttctccgccttcgtcggcgacgcaggcgcgccgagcaggtccacggtgcaacggttcgagtggttcgcggacggggccggcgagttcctgcgctacgtggaggtcggcggcggcgcggcgccgcgctgccacgtgccgctcagacggtctctcaccaggcacctcttcgcgggcatggagctgctgctgcagcacaagatcgtctggggaggaggccgcgacgagtgcccgtcctacctgctgtggctggtcccttccgtcacgcccgaccacgggatcgaggcctgcctcaagttcatccacagggaccacagtgcgcccgagaacaacttctttcttggcgccatgctgcagatatcggagagcacggacgtcgtcgggaccgtggtgaactgcctgcggctgttccctccgtgcttccagccgacgatcgaggccatcaagaaggagctcacccagctccccacgcaggacttctcgtgggtgccgtacgtcgatctgtggcacaggaagcactgggacaacctccatggcttctgcacccagtggttccgcccggacccgttgtgctgcaagaagcagcagcaccagcagcaaggtccgaacggtagtagtaggccttcttggtgcagcagcggtgacgacccagacatggttgggatcccggatgtttctctggattcggtcattctaatgcacctggagtgccaagtctcggtgccctcggagtacaacggtgcttacaggtacagcaagcagaaggccaccacggcgtcgccgccgtatcgacgacgatgcagcagcagaactagtccgactccgaccacgcaggacagcgagtactccccatgccgccgtctgaaggccgggctccttttcacgccccatggctgtacgaagcacaggctccccgaagagaagagctccgcggtggtcacggtctacggcgaagagcaacgctgcgtgcacacggacattaccctggaccagctgaacgagatcatgctgccaaaggcggcagactacttctaccggaaccccgaggcgacggcctgccagatgctttggaagtctagacatgggaccgagtacatcgagttcgagaagccaaggacggaggaggaggaggaggaaccgccgtgtgcgaggagggcgatctgtaggggaggcagtaggaagaggaagctgcagctgcaggtgcagcaagatcaggtgcaggtgctcgggagctggaaccgcaaggtggcttgcttcctcaactcgtgggttgcccacgcgcctgtccgcctgcgaggtctgatcctggactggattcggagaggcaaggaaagtcagctaccagcgccaccgccggtgcaccagctggaaatctcaaccatgtgactacttacatattagtttgaccgtaataggctccggatggagattagataatcatcgggtctttttttttgttgctttatgtacttttcttcaaaatccatgatcacaccatgtaaactttgtcttttattgatttaactagtcagatgtatgtgcactactaccgttttttatatatcaaatgaattgattttatt

SEQ ID NO: 67821 - DNA, 2676 bp, Zea Mays
catgcctgtctgctcgacgtttcctggaaacaaggggaggagaaggaagaggatcggagggaggggagagagtgaagtcagccatagccgagcgacgcgatttgtcgatcaggagtctatctagctccttgacttgggactgatatatacagaatgcatcttaattctccggccatcaccgcgccggcagagatccacaacagttcgcctctcccactccggttcagtactctcctctcttatctcgactcaagtccggccgagatcgtctcctcccaactgcaaacgaccaaggtaataagcaagcctagctagctactagcttcatctacctgactacctgtgcttccatctctctcactctcgccatgccatccgatttgaaaaacgacgacgatggtgtcgagctcgatcggcgccgtcgtcctctgttgtctttctgacacaccgtgactccatcttgtctctttttctagcccggaacaccacaccaaacgcattgaggagcactaacttcattattgcagcttgattggatcaccgcttcttcattgcattttgtgcgtacagtacatttttgctccctcaggccccgttcgtttacgtcggattggtgggtcggaacgattcctacccggattgtttctctaatttatacaaactttgattagctggaacggtttcgggtgcaatccgacgtaaacgaacaaggcctcaatcggtcctaatggcggcggagatggtcggctccgtggttgcccaggagacggtgagccagatcctctccggcctggttcagaggtacgcggaatcgagcgacgcaacccgaaacctcgagaggctagagatggcgcacatcaggctggaggccgccctggacgcgtccgacaggtggcagatcgccgacgcgtccctgcttcgctggcgcaagaagctgaggcgcgtcgctcaggagtgccacgacgtgctgcacaggtgcaggcagcagcaaggcgtggcgcaagcgcaagcgcaagagccggcgacgccgagctcctccctctcccccctggccgccctgcccacccgcatcgcgcgcgcgaccaagtcgctcatcttctccgccttcgtcggcgacgcaggcgcgccgagcaggtccacggtgcaacggttcgagtggttcgcggacggggccggcgagttcctgcgctacgtggaggtcggcggcggcgcggcgccgcgctgccacgtgccgctcagacggtctctcaccaggcacctcttcgcgggcatggagctgctgctgcagcacaagatcgtctggggaggaggccgcgacgagtgcccgtcctacctgctgtggctggtcccttccgtcacgcccgaccacgggatcgaggcctgcctcaagttcatccacagggaccacagtgcgcccgagaacaacttctttcttggcgccatgctgcagatatcggagagcacggacgtcgtcgggaccgtggtgaactgcctgcggctgttccctccgtgcttccagccgacgatcgaggccatcaagaaggagctcacccagctccccacgcaggacttctcgtgggtgccgtacgtcgatctgtggcacaggaagcactgggacaacctccatggcttctgcacccagtggttccgcccggacccgttgtgctgcaagaagcagcagcaccagcagcaaggtccgaacggtagtagtaggccttcttggtgcagcagcggtgacgacccagacatggttgggatcccggatgtttctctggattcggtcattctaatgcacctggagtgccaagtctcggtgccctcggagtacaacggtgcttacaggtacagcaagcagaaggccaccacggcgtcgccgccgtatcgacgacgatgcagcagcagaactagtccgactccgaccacgcaggacagcgagtactccccatgccgccgtctgaaggccgggctccttttcacgccccatggctgtacgaagcacaggctccccgaagagaagagctccgcggtggtcacggtctacggcgaagagcaacgctgcgtgcacacggacattaccctggaccagctgaacgagatcatgctgccaaaggcggcagactacttctaccggaaccccgaggcgacggcctgccagatgctttggaagtctagacatgggaccgagtacatcgagttcgagaagccaaggacggaggaggaggaggaggaaccgccgtgtgcgaggagggcgatctgtaggggaggcagtaggaagaggaagctgcagctgcaggtgcagcaagatcaggtgcaggtgctcgggagctggaaccgcaaggtggcttgcttcctcaactcgtgggttgcccacgcgcctgtccgcctgcgaggtctgatcctggactggattcggagaggcaaggaaagtcagctaccagcgccaccgccggtgcaccagctggaaatctcaaccatgtgactacttacatattagtttgaccgtaataggctccggatggagattagataatcatcgggtctttttttttgttgctttatgtacttttcttcaaaatccatgatcacaccatgtaaactttgtcttttattgatttaactagtcagatgtatgtgcactactaccgttttttatatatcaaatgaattgattttatt

SEQ ID NO: 67822 - DNA, 2878 bp, Zea Mays
catgcctgtctgctcgacgtttcctggaaacaaggggaggagaaggaagaggatcggagggaggggagagagtgaagtcagccatagccgagcgacgcgatttgtcgatcaggagtctatctagctccttgacttgggactgatatatacagaatgcatcttaattctccggccatcaccgcgccggcagagatccacaacagttcgcctctcccactccggttcagtactctcctctcttatctcgactcaagtccggccgagatcgtctcctcccaactgcaaacgaccaagcccggaacaccacaccaaacgcattgaggagcactaacttcattattgcagcttgattggatcaccgcttcttcattgcattgtgagtggtagacagagagtcatgtagagatgagcgaaaccccgcctcttatattttttttaatttgttcctacaaatccctcaagaaatcccttattaaataaggttgagaggacaacagcgacccacacaaccagaaaagtctgcgaccgtcaatggctcaatgcattttactttcctccgagtcctctattgacttgaattttcccctcttttccggtcggggggattaggacgtgactgacgaattctttgcattgggagaccaattcctcgacacccatctctatcaccaatgcataacccctgtcgctagctagctgtcctctcaatatattctcatatcatctaaccgctgcagttgtgtgtaaaactttcatgcagttgtgcgtacagtacatttttgctccctcaggccccgttcgtttacgtcggattggtgggtcggaacgattcctacccggattgtttctctaatttatacaaactttgattagctggaacggtttcgggtgcaatccgacgtaaacgaacaaggcctcaatcggtcctaatggcggcggagatggtcggctccgtggttgcccaggagacggtgagccagatcctctccggcctggttcagaggtacgcggaatcgagcgacgcaacccgaaacctcgagaggctagagatggcgcacatcaggctggaggccgccctggacgcgtccgacaggtggcagatcgccgacgcgtccctgcttcgctggcgcaagaagctgaggcgcgtcgctcaggagtgccacgacgtgctgcacaggtgcaggcagcagcaaggcgtggcgcaagcgcaagcgcaagagccggcgacgccgagctcctccctctcccccctggccgccctgcccacccgcatcgcgcgcgcgaccaagtcgctcatcttctccgccttcgtcggcgacgcaggcgcgccgagcaggtccacggtgcaacggttcgagtggttcgcggacggggccggcgagttcctgcgctacgtggaggtcggcggcggcgcggcgccgcgctgccacgtgccgctcagacggtctctcaccaggcacctcttcgcgggcatggagctgctgctgcagcacaagatcgtctggggaggaggccgcgacgagtgcccgtcctacctgctgtggctggtcccttccgtcacgcccgaccacgggatcgaggcctgcctcaagttcatccacagggaccacagtgcgcccgagaacaacttctttcttggcgccatgctgcagatatcggagagcacggacgtcgtcgggaccgtggtgaactgcctgcggctgttccctccgtgcttccagccgacgatcgaggccatcaagaaggagctcacccagctccccacgcaggacttctcgtgggtgccgtacgtcgatctgtggcacaggaagcactgggacaacctccatggcttctgcacccagtggttccgcccggacccgttgtgctgcaagaagcagcagcaccagcagcaaggtccgaacggtagtagtaggccttcttggtgcagcagcggtgacgacccagacatggttgggatcccggatgtttctctggattcggtcattctaatgcacctggagtgccaagtctcggtgccctcggagtacaacggtgcttacaggtacagcaagcagaaggccaccacggcgtcgccgccgtatcgacgacgatgcagcagcagaactagtccgactccgaccacgcaggacagcgagtactccccatgccgccgtctgaaggccgggctccttttcacgccccatggctgtacgaagcacaggctccccgaagagaagagctccgcggtggtcacggtctacggcgaagagcaacgctgcgtgcacacggacattaccctggaccagctgaacgagatcatgctgccaaaggcggcagactacttctaccggaaccccgaggcgacggcctgccagatgctttggaagtctagacatgggaccgagtacatcgagttcgagaagccaaggacggaggaggaggaggaggaaccgccgtgtgcgaggagggcgatctgtaggggaggcagtaggaagaggaagctgcagctgcaggtgcagcaagatcaggtgcaggtgctcgggagctggaaccgcaaggtggcttgcttcctcaactcgtgggttgcccacgcgcctgtccgcctgcgaggtctgatcctggactggattcggagaggcaaggaaagtcagctaccagcgccaccgccggtgcaccagctggaaatctcaaccatgtgactacttacatattagtttgaccgtaataggctccggatggagattagataatcatcgggtctttttttttgttgctttatgtacttttcttcaaaatccatgatcacaccatgtaaactttgtcttttattgatttaactagtcagatgtatgtgcactactaccgttttttatatatcaaatgaattgattttatt

SEQ ID NO: 67823 - DNA, 533 bp, Zea Mays
ctgaagttgcaacctttaaattcgagtaaaacatggcataaccaccatctcaaagctcacacaaaaaaaaaacatatagttacaaatatgtttcactttttttattcccatcacatgatcagctggtcatatatgcataactcaaactgagaacaagtgatgtgttacactttcataagttctaatgtaggttgatagtagtacttcctatttttgtgaccaacagaacacaaactattgatatgtaactcaagaccttcatggtatgggtttgatcctcttcactggaaacatagcttttgacccaaatttctatcaccctggtccctgtatatccgcccttttatttttctgacagatttgctcccttttgtgagtagtaagccaacctttgatgtgttcctgttatctctccaggttaattgattcagaacgtcaggtgcaacagtggtgcactggtgctgctaactggctttccttttctttctgaatccagtccaagatcaagcctcgtagcctaacgggagcatgtg

SEQ ID NO: 67824 - DNA, 1437 bp, Zea Mays
acgaacacggcactagctggccgcgtgcaccccgcgacgaagccggcgttggccacccaccaccacagcgcacgcgtcgctgtcgcgcgcctggggttttcctagggttttgtttttaccaaccccagccgggggagcgcggaggtggcggcggcggcggagatggacggggaggagattggcctggtcctcgcccgcgcctcggacctccgcaccaggatatcggcctgcgccgctgccgcggcgggggcgccgggtccgcggcgggacgatgaggaggcagcgaagcggttggacgcggcggagggcgatgaggagggagccgaggaagaggaggatgaggaggaggaggtggagagccttgtcggcatcagcgacgcgctcgagtcgctcgagcggcagctcgccgcccttcagcaccaacaaagatacgaacgggaaaccatcttgagccagatcgaccgaagccggaggtccctgcttgccaagctcagagagtacaaagggcaggactgcgaggtgatccacgaggctgccgccttcgctggcgagagaatagagcgcgacgacagcctcgtcctgcctccttactcggaccatgtcaccaactcgttcgcgctcgacgacctgtaccctctgagctacatgtccaagcccaagcgcctgcacactcaaccagactccgaggacgacgggactgcgcaggacgacgcgagaaggaacgggcgtgagagcagagataccagggcctcgaaacgcggctcgggaggcggagggggaggaggaggaggaggaggcatcggagccttcatgggatgggtggctaaaacggcggtcatggtggtgggcgccgtctgtgtcatgaaggccgctggatacgagtccgtgacgtggaggaacggcggcgccaggctggacattgcgggtctgttcggtggcggtggtggtaagcaggcggtggcggcgggcggcggagatgagcggcgcgctcctctgcggtgccctcccggcaaagcgatggtggtcgagaacggcagggcgcgttgtgtcgtgaaggaaagggtggaggtgccgttcgacgccgtcctggcaccgccgagttcgaggtacggtttaggctgaagcccactctcccccgctgcgcccgcgcctgtgtgtgtgaatagtagtagtagggtgtagctctatctatgtggtgcgggagttgcttagtagctgctggggaacggttctttgtagaacgtgttgctgggagctttgtttgttaattctgcgtttggtgctgagcattgggcagcctggagatgttgaggctatgtatcatggagaagaataaacccttgtgctctcacactggcgttgtggtgagcagtgagctcttctattatccggcatgtctggcactatatgagccaatcactgtaccattgaaaattc

SEQ ID NO: 67825 - DNA, 2624 bp, Zea Mays
ctggcgcctagtgtgtgtttgtgcgtcttctgccttctgaaggcacgcacgcaccattctgccctcctgctctctccccctcctccttcccactcctgtctctccccgtcctcctctgcttgagccttgagccattcagcaggtccagcaaaattttccagtcagtttcattcattcgcaaggtcggtgtctggagagaagaagagaaatggcggcgctagagaggagaggaggccaccacactgctgctttcatcagagcagcgaaggcctccagtcctcctcctcctccagcgaggcagaggcagaggcagaggcgctccaagagcggtgccggtttggacgacgacgacgacgacagagatgccagggccgcgccgcgttctccgcagaaggcgtccagacagaccaagctgcaagagcagaaacgcgaggccgagacggaagttcagcggcgcaggaggaggagcgaggcacacaactccctgaggaaagagattcagcagctggagacgcgcctcagggatcagcaggtggtgcgcggcgcactggagaaagcgctggggcctgagcctgagcctgagcccgacgacgacggcgctggtccacgtccactcactctccagaacgagagcccagcgctaaagctgataagggaggttgcgacactggagctggagatcaagcacttggagcactacctgctggcactctaccggaaagcattcgagcagcagcaagcacccaccaccaccaccgcgctgccgccttcagacgatcgccgggacgcggcgcgcaagctgtcggtgagctcacggcccgacgacgagacgcccagggcgagggcccccgtgatcaggggaggcggcggcaacgggaggaggaacggcggcacggccgacgactgctcgccgtcgtcgacgtgcccccggaggacggccgcggactcggacccggccggcctccggagccagtcggcgctgtcgttccgaggcgcgtggtcgtcgtcgtcgtcgacgtcgtccaggatatcgcccacggaggacagcctcgcgcgggcgctgcggtcctgccactcccagcccttctccttcctggagcaaggcgagacgacggcgccgtcaggaggagtggtgagcctggcggactacctcggcacgagcgtggcggaccacatcccggagacccccagcaacctgtcggaggagatggtgcgttgcatggccggggtgtactgcaggctggccgacccgccgctgctggcgcgccaccgcccgtcggcgtcgtcggcgtcggcgtcgctgtcctcggcggcgagcgcggtctccccaacacagtgcctcggcggcggcgacaacaacacgtggagcccgaccagcagcagcagctaccactgcggcaggagagacgccgcccggctagtcatcaacccgttccgcgtcgagggggtcaaggagttgttcagcgggccctacagcgccatggtcgaggtgccggcgatctcccgcgaccgccccaggctcagggaggccgaggacctgctccagacgtacaagctgattctctaccggctggagacggtggatctgaggcggatgacgggcggggagaagctcgcgttctggatcaacgtccacaacgcgctggtcatgcatgcgtacctcaagtatggagtcccgcagcagaaccagctgaagacgacgacatcactgcttgtcaaggcggagtgcaagatcgcggggcgcgccatcaacgcggcggccatccaggggctggttctcgggtgcacggcgcactgctcctccgggcattggctgcgggctttgctgcgctacccgaggacgacgacgaaggcgagccggcgggcgagcagagccgggggcgaggagtggcgagccttcgccgtccgccagccggagccccttctgcgttttgcgctctgctccgggagccactccgatcccgcggtacgggtgtacttcccgaagcggctggcgcagcagctggaggcggcgcgggaggagtacgtccgggccacggcgggggtgcggaaggacgaccgccgggtgctgctgcccaggctgctggacgcctacgcccgggacgccggcctcaccgcggaccgcctcctcgacgccgtgcagcggtgcctcccggagacgctgcggacggcggtgcagcgatgccgccgccgcggagacgggcccggtgccgcgaaggcagtcgtcgagtgggtgccccaccggcggagcttccggtacctgttggccagggacctcgccttcccgcacctcagcctcagctagctataagctgcacgtacgtcgtgaagatgattcctcgtacggtgactagttgaaagattggtagttgtggtggggtgtggatgacttgatagattttggttctagattaatgataatgatgatgattgcacatggtccattaggcacgggcattcttcatcttaatttgcgtgtgtgtgtgctgtaaacagatgacacatcgagcttagcttgtagatatagcaacaaatgaaagagataaactaagtttgtattattgcattgtacaccacaaaagtaatttcacgagatgatcaaatggctggagcaaggaatcaag

SEQ ID NO: 67826 - DNA, 2910 bp, Zea Mays
gtcaataatgtcttttttttttgcagctgcaggtagtaggaggagcgcaccaggatggcatgctgttttttttctgcagatggaggtgaagctaaagaggagaggctttcccagtttcccttcctcgtcttgggaaaatgttgggtctttgaccctggggagtagtagtagactagtagtagtaggttgcctagttggtttggtggcggtagatgccatgccacattggctgctgcctgctgctgctggtgggtatatagttatatacacattacaggctgcagtgcagacagggcttgctggcgcctagtgtgtgtttgtgcgtcttctgccttctgaaggcacgcacgcaccattctgccctcctgctctctccccctcctccttcccactcctgtctctccccgtcctcctctgcttgagccttgagccattcagcagttccagtcagtttcattcattcgcaaggtcggtgtctggagagaagaagagaaatggcggcgctagagaggagaggaggccaccacactgctgctttcatcagagcagcgaaggcctccagtcctcctcctcctccagcgaggcagaggcagaggcagaggcgctccaagagcggtgccggtttggacgacgacgacgacgacagagatgccagggccgcgccgcgttctccgcagaaggcgtccagacagaccaagctgcaagagcagaaacgcgaggccgagacggaagttcagcggcgcaggaggaggagcgaggcacacaactccctgaggaaagagattcagcagctggagacgcgcctcagggatcagcaggtggtgcgcggcgcactggagaaagcgctggggcctgagcctgagcctgagcccgacgacgacggcgctggtccacgtccactcactctccagaacgagagcccagcgctaaagctgataagggaggttgcgacactggagctggagatcaagcacttggagcactacctgctggcactctaccggaaagcattcgagcagcagcaagcacccaccaccaccaccgcgctgccgccttcagacgatcgccgggacgcggcgcgcaagctgtcggtgagctcacggcccgacgacgagacgcccagggcgagggcccccgtgatcaggggaggcggcggcaacgggaggaggaacggcggcacggccgacgactgctcgccgtcgtcgacgtgcccccggaggacggccgcggactcggacccggccggcctccggagccagtcggcgctgtcgttccgaggcgcgtggtcgtcgtcgtcgtcgacgtcgtccaggatatcgcccacggaggacagcctcgcgcgggcgctgcggtcctgccactcccagcccttctccttcctggagcaaggcgagacgacggcgccgtcaggaggagtggtgagcctggcggactacctcggcacgagcgtggcggaccacatcccggagacccccagcaacctgtcggaggagatggtgcgttgcatggccggggtgtactgcaggctggccgacccgccgctgctggcgcgccaccgcccgtcggcgtcgtcggcgtcggcgtcgctgtcctcggcggcgagcgcggtctccccaacacagtgcctcggcggcggcgacaacaacacgtggagcccgaccagcagcagcagctaccactgcggcaggagagacgccgcccggctagtcatcaacccgttccgcgtcgagggggtcaaggagttgttcagcgggccctacagcgccatggtcgaggtgccggcgatctcccgcgaccgccccaggctcagggaggccgaggacctgctccagacgtacaagctgattctctaccggctggagacggtggatctgaggcggatgacgggcggggagaagctcgcgttctggatcaacgtccacaacgcgctggtcatgcatgcgtacctcaagtatggagtcccgcagcagaaccagctgaagacgacgacatcactgcttgtcaaggcggagtgcaagatcgcggggcgcgccatcaacgcggcggccatccaggggctggttctcgggtgcacggcgcactgctcctccgggcattggctgcgggctttgctgcgctacccgaggacgacgacgaaggcgagccggcgggcgagcagagccgggggcgaggagtggcgagccttcgccgtccgccagccggagccccttctgcgttttgcgctctgctccgggagccactccgatcccgcggtacgggtgtacttcccgaagcggctggcgcagcagctggaggcggcgcgggaggagtacgtccgggccacggcgggggtgcggaaggacgaccgccgggtgctgctgcccaggctgctggacgcctacgcccgggacgccggcctcaccgcggaccgcctcctcgacgccgtgcagcggtgcctcccggagacgctgcggacggcggtgcagcgatgccgccgccgcggagacgggcccggtgccgcgaaggcagtcgtcgagtgggtgccccaccggcggagcttccggtacctgttggccagggacctcgccttcccgcacctcagcctcagctagctataagctgcacgtacgtcgtgaagatgattcctcgtacggtgactagttgaaagattggtagttgtggtggggtgtggatgacttgatagattttggttctagattaatgataatgatgatgattgcacatggtccattaggcacgggcattcttcatcttaatttgcgtgtgtgtgtgctgtaaacagatgacacatcgagcttagcttgtagatatagcaacaaatgaaagagataaactaagtttgtattattgcattgtacaccacaaaagtaatttcacgagatgatcaaatggctggagcaaggaatcaag

SEQ ID NO: 67827 - DNA, 1236 bp, Zea Mays
atgtgacttgcactgagaagtatattgtatagaagtatgttgaaagggaggacatggtctgcatcgaagatgtgaacagaaacaattatctctgtctgagacggagatgtcaagattacctgccatagtgaacgtgttgaaagagacatcattttatcacacaagtaagcttgcagatgctgatatgacattgttggtaaagatattgaagtcttggcctccacaaatgatgtttccagtcattgattttctgagaatgttcgtgttgcatcctgatggagcttctttacttctcaagaccatcgaaactggaaatgatatacttttggaaacctttcgtaaagctgttgcgtcgcctgtacagccagcaaatttgcttacagtcctcaaagctgtgacaaacttgtttggcaactcatgcttgcaccagtggctgaggacccactgtgctgagatcattgattcggtgtcaaactgcaagtcttcttttagcaagaatgcacacttggcatatgccacgcttctactgaactacgctgttctttcgattgaatcaaaggaggaacagagtcaggcgcagattctttctgccgcccttgaaatcgccgaagatgacacccaagatttcgactcaaagtaccgggcacttgtcgcaatcggttctcttatgctcaagggccttgtgaagtcccttgccctcgaccttgatgttaagagcgttgcaagcagcgccaagtcttcaatggaccagaagattgcggaagtaggaggtgacatcgaatcgctaacaagatgactacaataggtttgcgtgcacttggtcgttgcggacattgttgctccttcgctcgaggcgctaccatgcataacttaaagccggtctgtgttgcagaccaattcagacgccctccacgtctctaccgaaaaatcgcaatgggttatgattattttttcacctttgtaaccatcatggaagtgtggattttgggtggtagcgcttagattttgtaaattgaatagctgggctactctgcagatacagttcaatatttctcgcggagggatgcagatcagacacgcaacgaatatttcgatatcatctgcatttctatcaggcacgcaactacacacaaaggacctcctaaacgtgtcacctaaagggcaagaaacgaagcaaatggaagaaaaacgaaaaggaaaataaacaagtaaatcatcacacaaaaaacaaaaata

SEQ ID NO: 67828 - DNA, 2802 bp, Zea Mays
ccgtctactcgtctcccactcccccctgcaccaacaccaccaatcgggtcccccaccacttccgtcgccctcgcccgctccgccgcgccccgtacagcggcgacatggccgagtaccgcctcggacttcagctgcacggccacaccgacgacgttcgtggcatctgtgtatgcggcgatgctgggatcgcgacatcatcgagggaccgtactgtgaagttctggacccggaacccagaaaaggagagcgaatatgttctctccaagacactcgcaggacattcgagttttgtcggcccattggcttggatacctccttcagaccgttttcctgaaggtggaatcgtctctggtggaatggacacatttgttttcctctgggatctgcaaaaaggagaagttgccgagacaatgaaggggcacagttcgcaagtcactggactcgctgtggacactaacggtgacatcatctcttcatccatggattgtactgtaagacgttggagaaatggcaatgctatagaggtttgggaagcgcacaaggttgcagtgcaaactgttctaaagctgcccacaggggaactcttcactggttcaagtgattccactattaagctatggaaaggaaggacttgcctacagactttctcaggacatacactgttagatttttagcctcaatgccaggtctaggaattctttccgcctcacacgacagcactgtcaagttatgggcgttgtcaggtcagcccctgctggacatgatcggacattcttctcttgtatattctgtggatgcacattcttcaggtctaattgctagtggtagtgaggatcgctctttgaagatatggaaagatggtgtctgcgttcaaagcattgaacacccaggatgtatatgggatgctaagttcttgggaaatggagatattgtaactgcttgttctgatggcactacaaggatatggacagcagattctaacaggttctgcagtgatgaggaaattgcagcttatacagatcttatttctcaatacacacttagcagaaagactgttggtggacttaagttgatggatctaccaggtgtggaggcgctgcaagttccagggaactccgatggacaaacattaatcgttcgagaaggggataatggtgttgcatattcatggaattcagcagagttaaaatgggacaaaattggtgaagtagtggatggacctggtgaagctgctcaaggccaagttcatgatggtgttcggtatgattttgtttttaatgttgatattggagatggagaacccatacgaaaactaccctataatcgttcagatgacccatacacagtcgcggacaagtggctcctgaaagaaaatctgcctttgacatatcgccaacaggttgtagaatttatactgcagaattctggccagaacaactttgttccagatccatcttttcgggatccctatactggggccaatgcatatgtgcctgggcaaccatcatcatcatccaatggtaatactccggaaccaattttcaagcacataccgaagagtggaatgctgtcatttgagacagctcagtttgatggaatcctaaagaaagttgcagagtttaattcaaaactttcatctgactcgaaacaattatctctgtctgagacggagatgtcaagattacctgccatagtgaacgtgttgaaagagacatcattttatcacacaagtaagcttgcagatgctgatatgacattgttggtaaagatattgaagtcttggcctccacaaatgatgtttccagtcattgattttctgagaatgttcgtgttgcatcctgatggagcttctttacttctcaagaccatcgaaactggaaatgatatacttttggaaacctttcgtaaagctgttgcgtcgcctgtacagccagcaaatttgcttacagtcctcaaagctgtgacaaacttgtttggcaactcatgcttgcaccagtggctgaggacccactgtgctgagatcattgattcggtgtcaaactgcaagtcttcttttagcaagaatgcacacttggcatatgccacgcttctactgaactacgctgttctttcgattgaatcaaaggaggaacagagtcaggcgcagattctttctgccgcccttgaaatcgccgaagatgacacccaagatttcgactcaaagtaccgggcacttgtcgcaatcggttctcttatgctcaagggccttgtgaagtcccttgccctcgaccttgatgttaagagcgttgcaagcagcgccaagtcttcaatggaccagaagattgcggaagtaggaggtgacatcgaatcgctaacaagatgactacaataggtttgcgtgcacttggtcgttgcggacattgttgctccttcgctcgaggcgctaccatgcataacttaaagccggtctgtgttgcagaccaattcagacgccctccacgtctctaccgaaaaatcgcaatgggttatgattattttttcacctttgtaaccatcatggaagtgtggattttgggtggtagcgcttagattttgtaaattgaatagctgggctactctgcagatacagttcaatatttctcgcggagggatgcagatcagacacgcaacgaatatttcgatatcatctgcatttctatcaggcacgcaactacacacaaaggacctcctaaacgtgtcacctaaagggcaagaaacgaagcaaatggaagaaaaacgaaaaggaaaataaacaagtaaatcatcacacaaaaaacaaaaata

SEQ ID NO: 67829 - DNA, 2743 bp, Zea Mays
ccgtctactcgtctcccactcccccctgcaccaacaccaccaatcgggtcccccaccacttccgtcgccctcgcccgctccgccgcgccccgtacagcggcgacatggccgagtaccgcctcggacttcagctgcacggccacaccgacgacgttcgtggcatctgtgtatgcggcgatgctgggatcgcgacatcatcgagggaccgtactgtgaagttctggacccggaacccagaaaaggagagcgaatatgttctctccaagacactcgcaggacattcgagttttgtcggcccattggcttggatacctccttcagaccgttttcctgaaggtggaatcgtctctggtggaatggacacatttgttttcctctgggatctgcaaaaaggagaagttgccgagacaatgaaggggcacagttcgcaagtcactggactcgctgtggacactaacggtgacatcatctcttcatccatggattgtactgtaagacgttggagaaatggcaatgctatagaggtttgggaagcgcacaaggttgcagtgcaaactgttctaaagctgcccacaggggaactcttcactgacactgttagatttttagcctcaatgccaggtctaggaattctttccgcctcacacgacagcactgtcaagttatgggcgttgtcaggtcagcccctgctggacatgatcggacattcttctcttgtatattctgtggatgcacattcttcaggtctaattgctagtggtagtgaggatcgctctttgaagatatggaaagatggtgtctgcgttcaaagcattgaacacccaggatgtatatgggatgctaagttcttgggaaatggagatattgtaactgcttgttctgatggcactacaaggatatggacagcagattctaacaggttctgcagtgatgaggaaattgcagcttatacagatcttatttctcaatacacacttagcagaaagactgttggtggacttaagttgatggatctaccaggtgtggaggcgctgcaagttccagggaactccgatggacaaacattaatcgttcgagaaggggataatggtgttgcatattcatggaattcagcagagttaaaatgggacaaaattggtgaagtagtggatggacctggtgaagctgctcaaggccaagttcatgatggtgttcggtatgattttgtttttaatgttgatattggagatggagaacccatacgaaaactaccctataatcgttcagatgacccatacacagtcgcggacaagtggctcctgaaagaaaatctgcctttgacatatcgccaacaggttgtagaatttatactgcagaattctggccagaacaactttgttccagatccatcttttcgggatccctatactggggccaatgcatatgtgcctgggcaaccatcatcatcatccaatggtaatactccggaaccaattttcaagcacataccgaagagtggaatgctgtcatttgagacagctcagtttgatggaatcctaaagaaagttgcagagtttaattcaaaactttcatctgactcggaacagaaacaattatctctgtctgagacggagatgtcaagattacctgccatagtgaacgtgttgaaagagacatcattttatcacacaagtaagcttgcagatgctgatatgacattgttggtaaagatattgaagtcttggcctccacaaatgatgtttccagtcattgattttctgagaatgttcgtgttgcatcctgatggagcttctttacttctcaagaccatcgaaactggaaatgatatacttttggaaacctttcgtaaagctgttgcgtcgcctgtacagccagcaaatttgcttacagtcctcaaagctgtgacaaacttgtttggcaactcatgcttgcaccagtggctgaggacccactgtgctgagatcattgattcggtgtcaaactgcaagtcttcttttagcaagaatgcacacttggcatatgccacgcttctactgaactacgctgttctttcgattgaatcaaaggaggaacagagtcaggcgcagattctttctgccgcccttgaaatcgccgaagatgacacccaagatttcgactcaaagtaccgggcacttgtcgcaatcggttctcttatgctcaagggccttgtgaagtcccttgccctcgaccttgatgttaagagcgttgcaagcagcgccaagtcttcaatggaccagaagattgcggaagtaggaggtgacatcgaatcgctaacaagatgactacaataggtttgcgtgcacttggtcgttgcggacattgttgctccttcgctcgaggcgctaccatgcataacttaaagccggtctgtgttgcagaccaattcagacgccctccacgtctctaccgaaaaatcgcaatgggttatgattattttttcacctttgtaaccatcatggaagtgtggattttgggtggtagcgcttagattttgtaaattgaatagctgggctactctgcagatacagttcaatatttctcgcggagggatgcagatcagacacgcaacgaatatttcgatatcatctgcatttctatcaggcacgcaactacacacaaaggacctcctaaacgtgtcacctaaagggcaagaaacgaagcaaatggaagaaaaacgaaaaggaaaataaacaagtaaatcatcacacaaaaaacaaaaata

SEQ ID NO: 67830 - DNA, 2751 bp, Zea Mays
ccgtctactcgtctcccactcccccctgcaccaacaccaccaatcgggtcccccaccacttccgtcgccctcgcccgctccgccgcgccccgtacagcggcgacatggccgagtaccgcctcggacttcagctgcacggccacaccgacgacgttcgtggcatctgtgtatgcggcgatgctgggatcgcgacatcatcgagggaccgtactgtgaagttctggacccggaacccagaaaaggagagcgaatatgttctctccaagacactcgcaggacattcgagttttgtcggcccattggcttggatacctccttcagaccgttttcctgaaggtggaatcgtctctggtggaatggacacatttgttttcctctgggatctgcaaaaaggagaagttgccgagacaatgaaggggcacagttcgcaagtcactggactcgctgtggacactaacggtgacatcatctcttcatccatggattgtactgtaagacgttggagaaatggcaatgctatagaggtttgggaagcgcacaaggttgcagtgcaaactgttctaaagctgcccacaggggaactcttcactggttcaagtgattccactattaagctatggaaaggaaggacttgcctacagactttctcaggacatgcagcactgtcaagttatgggcgttgtcaggtcagcccctgctggacatgatcggacattcttctcttgtatattctgtggatgcacattcttcaggtctaattgctagtggtagtgaggatcgctctttgaagatatggaaagatggtgtctgcgttcaaagcattgaacacccaggatgtatatgggatgctaagttcttgggaaatggagatattgtaactgcttgttctgatggcactacaaggatatggacagcagattctaacaggttctgcagtgatgaggaaattgcagcttatacagatcttatttctcaatacacacttagcagaaagactgttggtggacttaagttgatggatctaccaggtgtggaggcgctgcaagttccagggaactccgatggacaaacattaatcgttcgagaaggggataatggtgttgcatattcatggaattcagcagagttaaaatgggacaaaattggtgaagtagtggatggacctggtgaagctgctcaaggccaagttcatgatggtgttcggtatgattttgtttttaatgttgatattggagatggagaacccatacgaaaactaccctataatcgttcagatgacccatacacagtcgcggacaagtggctcctgaaagaaaatctgcctttgacatatcgccaacaggttgtagaatttatactgcagaattctggccagaacaactttgttccagatccatcttttcgggatccctatactggggccaatgcatatgtgcctgggcaaccatcatcatcatccaatggtaatactccggaaccaattttcaagcacataccgaagagtggaatgctgtcatttgagacagctcagtttgatggaatcctaaagaaagttgcagagtttaattcaaaactttcatctgactcggaacagaaacaattatctctgtctgagacggagatgtcaagattacctgccatagtgaacgtgttgaaagagacatcattttatcacacaagtaagcttgcagatgctgatatgacattgttggtaaagatattgaagtcttggcctccacaaatgatgtttccagtcattgattttctgagaatgttcgtgttgcatcctgatggagcttctttacttctcaagaccatcgaaactggaaatgatatacttttggaaacctttcgtaaagctgttgcgtcgcctgtacagccagcaaatttgcttacagtcctcaaagctgtgacaaacttgtttggcaactcatgcttgcaccagtggctgaggacccactgtgctgagatcattgattcggtgtcaaactgcaagtcttcttttagcaagaatgcacacttggcatatgccacgcttctactgaactacgctgttctttcgattgaatcaaaggaggaacagagtcaggcgcagattctttctgccgcccttgaaatcgccgaagatgacacccaagatttcgactcaaagtaccgggcacttgtcgcaatcggttctcttatgctcaagggccttgtgaagtcccttgccctcgaccttgatgttaagagcgttgcaagcagcgccaagtcttcaatggaccagaagattgcggaagtaggaggtgacatcgaatcgctaacaagatgactacaataggtttgcgtgcacttggtcgttgcggacattgttgctccttcgctcgaggcgctaccatgcataacttaaagccggtctgtgttgcagaccaattcagacgccctccacgtctctaccgaaaaatcgcaatgggttatgattattttttcacctttgtaaccatcatggaagtgtggattttgggtggtagcgcttagattttgtaaattgaatagctgggctactctgcagatacagttcaatatttctcgcggagggatgcagatcagacacgcaacgaatatttcgatatcatctgcatttctatcaggcacgcaactacacacaaaggacctcctaaacgtgtcacctaaagggcaagaaacgaagcaaatggaagaaaaacgaaaaggaaaataaacaagtaaatcatcacacaaaaaacaaaaata

SEQ ID NO: 67831 - DNA, 3252 bp, Zea Mays
caactccctactcccaacacctcgccgtctactcgtctcccactcccccctgcaccaacaccaccaatcgggtcccccaccacttccgtcgccctcgcccgctccgccgcgccccgtacagcggcgacatggccgagtaccgcctcggacttcagctgcacggccacaccgacgacgttcgtggcatctgtgtatgcggcgatgctgggatcgcgacatcatcgagggaccgtactgtgaagttctggacccggaacccagaaaaggagagcgaatatgttctctccaagacactcgcaggacattcgagttttgtcggcccattggcttggatacctccttcagaccgttttcctgaaggtggaatcgtctctggtggaatggacacatttgttttcctctgggatctgcaaaaaggagaagttgccgagacaatgaaggggcacagttcgcaagtcactggactcgctgtggacactaacggtgacatcatctcttcatccatggattgtactgtaagacgttggagaaatggcaatgctatagaggtttgggaagcgcacaaggttgcagtgcaaactgttctaaagctgcccacaggggaactcttcactggttcaagtgattccactattaagctatggaaaggaaggacttgcctacagactttctcaggacatgcagacactgttagatttttagcctcaatgccaggtctaggaattctttccgcctcacacgacagcactgtcaagttatgggcgttgtcaggtcagcccctgctggacatgatcggacattcttctcttgtatattctgtggatgcacattcttcaggtctaattgctagtggtagtgaggatcgctctttgaagatatggaaagatggtgtctgcgttcaaagcattgaacacccaggatgtatatgggatgctaagttcttgggaaatggagatattgtaactgcttgttctgatggcactacaaggatatggacagcagattctaacaggttctgcagtgatgaggaaattgcagcttatacagatcttatttctcaatacacacttagcagaaagactgttggtggacttaagttgatggatctaccaggtgtggaggcgctgcaagttccagggaactccgatggacaaacattaatcgttcgagaaggggataatggtgttgcatattcatggaattcagcagagttaaaatgggacaaaattggtgaagtagtggatggacctggtgaagctgctcaaggccaagttcatgatggtgttcggtatgattttgtttttaatgttgatattggagatggagaacccatacgaaaactaccctataatcgttcagatgacccatacacagtcgcggacaagtggctcctgaaagaaaatctgcctttgacatatcgccaacaggttgtagaatttatactgcagaattctggccagaacaactttgttccagatccatcttttcgggatccctatactggggccaatgcatatgtgcctgggcaaccatcatcatcatccaatggtaatactccggaaccaattttcaagcacataccgaagatctggtgctggcggttaccacatgagtggggtctagggaaggaataaccgagccaagcctaactcctgcatttttgcagagaggatgcattgaaccgagaacccaggacctttggctcagtggaaaggcttctcatcactgtgccagacctatccttctaacaatattgattatgttaatataatatatatgtaacatgaactaattgtcttgccaaatcaaacaaagccttgtgcaaaacaataaagcagtatagatcaaaatttttatccaatcatctgcctcatcttgttacattaactgttgattgatgctttatattttttaaaccagaagcaagttgccatgaaaataatacatgagttattttacaacttttgtgaattaacccggagcctgcttatttgatttgcagagtggaatgctgtcatttgagacagctcagtttgatggaatcctaaagaaagttgcagagtttaattcaaaactttcatctgactcggaacagaaacaattatctctgtctgagacggagatgtcaagattacctgccatagtgaacgtgttgaaagagacatcattttatcacacaagtaagcttgcagatgctgatatgacattgttggtaaagatattgaagtcttggcctccacaaatgatgtttccagtcattgattttctgagaatgttcgtgttgcatcctgatggagcttctttacttctcaagaccatcgaaactggaaatgatatacttttggaaacctttcgtaaagctgttgcgtcgcctgtacagccagcaaatttgcttacagtcctcaaagctgtgacaaacttgtttggcaactcatgcttgcaccagtggctgaggacccactgtgctgagatcattgattcggtgtcaaactgcaagtcttcttttagcaagaatgcacacttggcatatgccacgcttctactgaactacgctgttctttcgattgaatcaaaggaggaacagagtcaggcgcagattctttctgccgcccttgaaatcgccgaagatgacacccaagatttcgactcaaagtaccgggcacttgtcgcaatcggttctcttatgctcaagggccttgtgaagtcccttgccctcgaccttgatgttaagagcgttgcaagcagcgccaagtcttcaatggaccagaagattgcggaagtaggaggtgacatcgaatcgctaacaagatgactacaataggtttgcgtgcacttggtcgttgcggacattgttgctccttcgctcgaggcgctaccatgcataacttaaagccggtctgtgttgcagaccaattcagacgccctccacgtctctaccgaaaaatcgcaatgggttatgattattttttcacctttgtaaccatcatggaagtgtggattttgggtggtagcgcttagattttgtaaattgaatagctgggctactctgcagatacagttcaatatttctcgcggagggatgcagatcagacacgcaacgaatatttcgatatcatctgcatttctatcaggcacgcaactacacacaaaggacctcctaaacgtgtcacctaaagggcaagaaacgaagcaaatggaagaaaaacgaaaaggaaaataaacaagtaaatcatcacacaaaaaacaaaaata

SEQ ID NO: 67832 - DNA, 2832 bp, Zea Mays
cccaactccctactcccaacacctcgccgtctactcgtctcccactcccccctgcaccaacaccaccaatcgggtcccccaccacttccgtcgccctcgcccgctccgccgcgccccgtacagcggcgacatggccgagtaccgcctcggacttcagctgcacggccacaccgacgacgttcgtggcatctgtgtatgcggcgatgctgggatcgcgacatcatcgagggaccgtactgtgaagttctggacccggaacccagaaaaggagagcgaatatgttctctccaagacactcgcaggacattcgagttttgtcggcccattggcttggatacctccttcagaccgttttcctgaaggtggaatcgtctctggtggaatggacacatttgttttcctctgggatctgcaaaaaggagaagttgccgagacaatgaaggggcacagttcgcaagtcactggactcgctgtggacactaacggtgacatcatctcttcatccatggattgtactgtaagacgttggagaaatggcaatgctatagaggtttgggaagcgcacaaggttgcagtgcaaactgttctaaagctgcccacaggggaactcttcactggttcaagtgattccactattaagctatggaaaggaaggacttgcctacagactttctcaggacatgcagacactgttagatttttagcctcaatgccaggtctaggaattctttccgcctcacacgacagcactgtcaagttatgggcgttgtcaggtcagcccctgctggacatgatcggacattcttctcttgtatattctgtggatgcacattcttcaggtctaattgctagtggtagtgaggatcgctctttgaagatatggaaagatggtgtctgcgttcaaagcattgaacacccaggatgtatatgggatgctaagttcttgggaaatggagatattgtaactgcttgttctgatggcactacaaggatatggacagcagattctaacaggttctgcagtgatgaggaaattgcagcttatacagatcttatttctcaatacacacttagcagaaagactgttggtggacttaagttgatggatctaccaggtgtggaggcgctgcaagttccagggaactccgatggacaaacattaatcgttcgagaaggggataatggtgttgcatattcatggaattcagcagagttaaaatgggacaaaattggtgaagtagtggatggacctggtgaagctgctcaaggccaagttcatgatggtgttcggtatgattttgtttttaatgttgatattggagatggagaacccatacgaaaactaccctataatcgttcagatgacccatacacagtcgcggacaagtggctcctgaaagaaaatctgcctttgacatatcgccaacaggttgtagaatttatactgcagaattctggccagaacaactttgttccagatccatcttttcgggatccctatactggggccaatgcatatgtgcctgggcaaccatcatcatcatccaatggtaatactccggaaccaattttcaagcacataccgaagagtggaatgctgtcatttgagacagctcagtttgatggaatcctaaagaaagttgcagagtttaattcaaaactttcatctgactcgaaacaattatctctgtctgagacggagatgtcaagattacctgccatagtgaacgtgttgaaagagacatcattttatcacacaagtaagcttgcagatgctgatatgacattgttggtaaagatattgaagtcttggcctccacaaatgatgtttccagtcattgattttctgagaatgttcgtgttgcatcctgatggagcttctttacttctcaagaccatcgaaactggaaatgatatacttttggaaacctttcgtaaagctgttgcgtcgcctgtacagccagcaaatttgcttacagtcctcaaagctgtgacaaacttgtttggcaactcatgcttgcaccagtggctgaggacccactgtgctgagatcattgattcggtgtcaaactgcaagtcttcttttagcaagaatgcacacttggcatatgccacgcttctactgaactacgctgttctttcgattgaatcaaaggaggaacagagtcaggcgcagattctttctgccgcccttgaaatcgccgaagatgacacccaagatttcgactcaaagtaccgggcacttgtcgcaatcggttctcttatgctcaagggccttgtgaagtcccttgccctcgaccttgatgttaagagcgttgcaagcagcgccaagtcttcaatggaccagaagattgcggaagtaggaggtgacatcgaatcgctaacaagatgactacaataggtttgcgtgcacttggtcgttgcggacattgttgctccttcgctcgaggcgctaccatgcataacttaaagccggtctgtgttgcagaccaattcagacgccctccacgtctctaccgaaaaatcgcaatgggttatgattattttttcacctttgtaaccatcatggaagtgtggattttgggtggtagcgcttagattttgtaaattgaatagctgggctactctgcagatacagttcaatatttctcgcggagggatgcagatcagacacgcaacgaatatttcgatatcatctgcatttctatcaggcacgcaactacacacaaaggacctcctaaacgtgtcacctaaagggcaagaaacgaagcaaatggaagaaaaacgaaaaggaaaataaacaagtaaatcatcacacaaaaaacaaaaata

SEQ ID NO: 67833 - DNA, 820 bp, Zea Mays
cttctccgaatccaccacttccacttgcgttgcccccgcccgcctctgtcgtctcccgtcgcgccgcgcgcaggctgtccagcatgataagtagctgccgcgccgcgccgtaatcgatccctcctcacaacacaggacgcaacgcatccaacgcgccccgcccgcccggttggattcgattcctcccaaacttgtcgtccccaagcagcagcctttccctctctttcccatggccaccaagcccggcagggcggccgccgcggtgctgctcctcaccctgctcgccgctctacacgcggccgcccgcaacaacaacaacaacgagaaccgcaacccgggcggcggcggcggcgacccgggcgccttcttcgccgggatgccgcggttcagcggcggcggaggctgcagcttcgactgcaccgagcgctgcgccgccacctgctgagtgaatctgggatgtattagaggagggcgtggccgtagctatagctaaagctcgtgtactccttcctctactggcatgcggtgcactgcttcttcctgctcgtccactgatacgaattatcgctactactaatagtatcgaggtggtttggtttggtttagctgttggtttgttgcgagttgtgatcggtcgtgatcacgtacgtgatgactgatgagatcatttatgcatgtgtgtctgtaaatttggtgtctgccagtgccagtgccagactgatcaataatagcagaggagaggagatgaataaagagaaatttagatatgtactattaaaagattacaattttagatatataacatttctaaagttcacag

SEQ ID NO: 67834 - DNA, 1327 bp, Zea Mays
ctttgatatgaccatataaagaaccatcttgcaagaacgcatacggcacatgcaagatgtatttaaaaaggagagaagtaaatgtcgggattatcgaaattgggatagccataatcccaactattatcagcatcatcaaagagatgactggtactggaacgcagaagcattttatgccaatcaaaggacaaatttcagggcaatgaccagggaagccatgacttacactatgtcacaccactattctgttttgggccttgacaggtcaaggtcagagccattttcagatgctgaaatcaagaatgctttcaggagaaaagcaatggagtatcatccagaccaaaaccaaaataataaagaggttgctgaggcaaaattcaaagaggttatggattcttacgaagcaataaaacgagaacgacgagacagaagttgctgaatgtgaaatgtgctcatggttctcaggcggagtgaggaactgttgtatataaattgtttgatgtgggacaaactaaatctagggctagtttggcatccccatttttccatgggatttctaatttcccaagggaaaatgaactaatttcccttgggaaaatgaaaaacccttgggaaaatgaggtttccaaactagcccctaaggtataaaactaccgctctgatccaaaagagcgtgtagcttagtggttacaagggccacaatgccacattagtattttatgttctggcttcgactctctgtagaagggaaaaaaatacgggagataatgaattcagatgggggacgatggcaggtcaattcagccattcttgtttctatttttctcttgggggtgggggccggggcagatatagatgtactcagacgaatgaaggctattgaaagaatgcacggatgagctggacgtgtgttttagagaacaaatcagatccttcactcatgattgttaaattatgcaggacagatcagtttgatttgtctgagccagggtggtagcatcgtatcgtattggcagaagctatgaattacttccattcttgcaatgagagcatgatattgggacatttattaaactttaaatcctaaaaaaatgatactattcaacaactcccaacattttccctgtacactatcttggccatttgccacagcaccatccaactgaaagcgctgctgacaagcaaaccaattgccctttcctagaaaactaattggctttagtctctagtccctcacatgggtgctaaaagagattaaaggataacatttacaccaattacccttctagaaaactggcatcatacacatgaaacaaaaaaaaagaga

SEQ ID NO: 67835 - DNA, 1350 bp, Zea Mays
gaagaaaactttgatatgaccatataaagaaccatcttgcaatactgatttctgtaggaacgcatacggcacatgcaagatgtatttaaaaaggagagaagtaaatgtcgggattatcgaaattgggatagccataatcccaactattatcagcatcatcaaagagatgactggtactggaacgcagaagcattttatgccaatcaaaggacaaatttcagggcaatgaccagggaagccatgacttacactatgtcacaccactattctgttttgggccttgacaggtcaaggtcagagccattttcagatgctgaaatcaagaatgctttcaggagaaaagcaatggagtatcatccagaccaaaaccaaaataataaagaggttgctgaggcaaaattcaaagaggttatggattcttacgaagcaataaaacgagaacgacgagacagaagttgctgaatgtgaaatgtgctcatggttctcaggcggagtgaggaactgttgtatataaattgtttgatgtgggacaaactaaatctagggctagtttggcatccccatttttccatgggatttctaatttcccaagggaaaatgaactaatttcccttgggaaaatgaaaaacccttgggaaaatgaggtttccaaactagcccctaaggtataaaactaccgctctgatccaaaagagcgtgtagcttagtggttacaagggccacaatgccacattagtattttatgttctggcttcgactctctgtagaagggaaaaaaatacgggagataatgaattcagatgggggacgatggcaggtcaattcagccattcttgtttctatttttctcttgggggtgggggccggggcagatatagatgtactcagacgaatgaaggctattgaaagaatgcacggatgagctggacgtgtgttttagagaacaaatcagatccttcactcatgattgttaaattatgcaggacagatcagtttgatttgtctgagccagggtggtagcatcgtatcgtattggcagaagctatgaattacttccattcttgcaatgagagcatgatattgggacatttattaaactttaaatcctaaaaaaatgatactattcaacaactcccaacattttccctgtacactatcttggccatttgccacagcaccatccaactgaaagcgctgctgacaagcaaaccaattgccctttcctagaaaactaattggctttagtctctagtccctcacatgggtgctaaaagagattaaaggataacatttacaccaattacccttctagaaaactggcatcatacacatgaaacaaaaaaaaagaga

SEQ ID NO: 67836 - DNA, 1771 bp, Zea Mays
cttctactagcccacccaactccaggaaaagacaagggcccacttgcagcccgagccccttgattccctcgccggtgtcacgcgactccagatccccaattcggacagccacctgctcggcgagccatggccggccgccgcgaaggcgagcaccaggcgagcccgtggcgatccgggacgcccgcggcggaggaggactcgggcgccttcccctccgccatcatcttcttcgctctcgttggcgctaccgccaccaccgccgccgtcggacaactgcgccggacggtcagctggttctacactcaataggtcggaaccatatgttttctgggaagacatacctcgtcgaccaaatcgtcatcggtgcggtgaagcctgggaacgatatcaccagaggatgcgtgacaggaccgaggatcaaagggaaagagtggaacgcatacggcacatgcaagatgtatttaaaaaggagagaagtaaatgtcgggattatcgaaattgggatagccataatcccaactattatcagcatcatcaaagagatgactggtactggaacgcagaagcattttatgccaatcaaaggacaaatttcagggcaatgaccagggaagccatgacttacactatgtcacaccactattctgttttgggccttgacaggtcaaggtcagagccattttcagatgctgaaatcaagaatgctttcaggagaaaagcaatggagtatcatccagaccaaaaccaaaataataaaggtgaacacagtttccttgtgtctccaggtcttctcagcccctcataggttgctgaggcaaaattcaaagaggttatggattcttacgaagcaataaaacgagaacgacgagacagaagttgctgaatgtgaaatgtgctcatggttctcaggcggagtgaggaactgttgtatataaattgtttgatgtgggacaaactaaatctagggctagtttggcatccccatttttccatgggatttctaatttcccaagggaaaatgaactaatttcccttgggaaaatgaaaaacccttgggaaaatgaggtttccaaactagcccctaaggtataaaactaccgctctgatccaaaagagcgtgtagcttagtggttacaagggccacaatgccacattagtattttatgttctggcttcgactctctgtagaagggaaaaaaatacgggagataatgaattcagatgggggacgatggcaggtcaattcagccattcttgtttctatttttctcttgggggtgggggccggggcagatatagatgtactcagacgaatgaaggctattgaaagaatgcacggatgagctggacgtgtgttttagagaacaaatcagatccttcactcatgattgttaaattatgcaggacagatcagtttgatttgtctgagccagggtggtagcatcgtatcgtattggcagaagctatgaattacttccattcttgcaatgagagcatgatattgggacatttattaaactttaaatcctaaaaaaatgatactattcaacaactcccaacattttccctgtacactatcttggccatttgccacagcaccatccaactgaaagcgctgctgacaagcaaaccaattgccctttcctagaaaactaattggctttagtctctagtccctcacatgggtgctaaaagagattaaaggataacatttacaccaattacccttctagaaaactggcatcatacacatgaaacaaaaaaaaagaga

SEQ ID NO: 67837 - DNA, 1776 bp, Zea Mays
cttctactagcccacccaactccaggaaaagacaagggcccacttgcagcccgagccccttgattccctcgccggtgtcacgcgactccagatccccaattcggacagccacctgctcggcgagccatggccggccgccgcgaaggcgagcaccaggcgagcccgtggcgatccgggacgcccgcggcggaggaggactcgggcgccttcccctccgccatcatcttcttcgctctcgttggcgctaccgccaccaccgccgccgtcggacaactgcgccggacggtcagctggttctacactcaacttagtaggtcggaaccatatgttttctgggaagacatacctcgtcgaccaaatcgtcatcggtgcggtgaagcctgggaacgatatcaccagaggatgcgtgacaggaccgaggatcaaagggaaagagtggaacgcatacggcacatgcaagatgtatttaaaaaggagagaagtaaatgtcgggattatcgaaattgggatagccataatcccaactattatcagcatcatcaaagagatgactggtactggaacgcagaagcattttatgccaatcaaaggacaaatttcagggcaatgaccagggaagccatgacttacactatgtcacaccactattctgttttgggccttgacaggtcaaggtcagagccattttcagatgctgaaatcaagaatgctttcaggagaaaagcaatggagtatcatccagaccaaaaccaaaataataaaggtgaacacagtttccttgtgtctccaggtcttctcagcccctcataggttgctgaggcaaaattcaaagaggttatggattcttacgaagcaataaaacgagaacgacgagacagaagttgctgaatgtgaaatgtgctcatggttctcaggcggagtgaggaactgttgtatataaattgtttgatgtgggacaaactaaatctagggctagtttggcatccccatttttccatgggatttctaatttcccaagggaaaatgaactaatttcccttgggaaaatgaaaaacccttgggaaaatgaggtttccaaactagcccctaaggtataaaactaccgctctgatccaaaagagcgtgtagcttagtggttacaagggccacaatgccacattagtattttatgttctggcttcgactctctgtagaagggaaaaaaatacgggagataatgaattcagatgggggacgatggcaggtcaattcagccattcttgtttctatttttctcttgggggtgggggccggggcagatatagatgtactcagacgaatgaaggctattgaaagaatgcacggatgagctggacgtgtgttttagagaacaaatcagatccttcactcatgattgttaaattatgcaggacagatcagtttgatttgtctgagccagggtggtagcatcgtatcgtattggcagaagctatgaattacttccattcttgcaatgagagcatgatattgggacatttattaaactttaaatcctaaaaaaatgatactattcaacaactcccaacattttccctgtacactatcttggccatttgccacagcaccatccaactgaaagcgctgctgacaagcaaaccaattgccctttcctagaaaactaattggctttagtctctagtccctcacatgggtgctaaaagagattaaaggataacatttacaccaattacccttctagaaaactggcatcatacacatgaaacaaaaaaaaagaga

SEQ ID NO: 67838 - DNA, 2131 bp, Zea Mays
cttctactagcccacccaactccaggaaaagacaagggcccacttgcagcccgagccccttgattccctcgccggtgtcacgcgactccagatccccaattcggacagccacctgctcggcgagccatggccggccgccgcgaaggcgagcaccaggcgagcccgtggcgatccgggacgcccgcggcggaggaggactcgggcgccttcccctccgccatcatcttcttcgctctcgttggcgctaccgccaccaccgccgccgtcggacaactgcgccggacggtcagctggttctacactcaacttagtaggtcggaaccatatgttttctgggaagacatacctcgtcgaccaaatcgtcatcggtgcggtgaagcctgggaacgatatcaccagaggatgcgtgacaggaccgaggatcaaagggaaagagtgtactgatttctgtaggaacgcatacggcacatgcaagatgtatttaaaaaggagagaagtaaatgtcgggattatcgaaattgggatagccataatcccaactattatcagcatcatcaaagagatgactggtactggaacgcagaagcattttatgccaatcaaaggacaaatttcagggcaatgaccagggaagccatgacttacactatgtcacaccactattctgttttgggccttgacaggtatgtactagcagtctttcctgtcaatgaacattcacatatatttggcaggtgtatgtgagtatggccgagtttgttgtaaaaacactcaccactgtcattgtttggcccccttatctatctgtagcagtcaatgttagcaaagaaccataattatgccacatacatttgaatagcttattgtaatttttctcacctttgacttttatatgttatgattgcacctggttaaagaaaagaatcaccctgctttgctattttagtcattcacatacttagcatttatgatgccctgaaattgttgctaacatgaccatagtgatgttgagtaatcgacaccatcataattgcccgtaaaaataagttttttctttccattccacaggtcaaggtcagagccattttcagatgctgaaatcaagaatgctttcaggagaaaagcaatggagtatcatccagaccaaaaccaaaataataaagaggttgctgaggcaaaattcaaagaggttatggattcttacgaagcaataaaacgagaacgacgagacagaagttgctgaatgtgaaatgtgctcatggttctcaggcggagtgaggaactgttgtatataaattgtttgatgtgggacaaactaaatctagggctagtttggcatccccatttttccatgggatttctaatttcccaagggaaaatgaactaatttcccttgggaaaatgaaaaacccttgggaaaatgaggtttccaaactagcccctaaggtataaaactaccgctctgatccaaaagagcgtgtagcttagtggttacaagggccacaatgccacattagtattttatgttctggcttcgactctctgtagaagggaaaaaaatacgggagataatgaattcagatgggggacgatggcaggtcaattcagccattcttgtttctatttttctcttgggggtgggggccggggcagatatagatgtactcagacgaatgaaggctattgaaagaatgcacggatgagctggacgtgtgttttagagaacaaatcagatccttcactcatgattgttaaattatgcaggacagatcagtttgatttgtctgagccagggtggtagcatcgtatcgtattggcagaagctatgaattacttccattcttgcaatgagagcatgatattgggacatttattaaactttaaatcctaaaaaaatgatactattcaacaactcccaacattttccctgtacactatcttggccatttgccacagcaccatccaactgaaagcgctgctgacaagcaaaccaattgccctttcctagaaaactaattggctttagtctctagtccctcacatgggtgctaaaagagattaaaggataacatttacaccaattacccttctagaaaactggcatcatacacatgaaacaaaaaaaaagaga

SEQ ID NO: 67839 - DNA, 1773 bp, Zea Mays
cttctactagcccacccaactccaggaaaagacaagggcccacttgcagcccgagccccttgattccctcgccggtgtcacgcgactccagatccccaattcggacagccacctgctcggcgagccatggccggccgccgcgaaggcgagcaccaggcgagcccgtggcgatccgggacgcccgcggcggaggaggactcgggcgccttcccctccgccatcatcttcttcgctctcgttggcgctaccgccaccaccgccgccgtcggacaactgcgccggacggtcagctggttctacactcaacttagtaggtcggaaccatatgttttctgggaagacatacctcgtcgaccaaatcgtcatcggtgcggtgaagcctgggaacgatatcaccagaggatgcgtgacaggaccgaggatcaaagggaaagagtgtactgatttctgtaggaacgcatacggcacatgcaagatgtatttaaaaaggagagaagtaaatgtcgggattatcgaaattgggatagccataatcccaactattatcagcatcatcaaagagatgactggtactggaacgcagaagcattttatgccaatcaaaggacaaatttcagggcaatgaccagggaagccatgacttacactatgtcacaccactattctgttttgggccttgacaggtcaaggtcagagccattttcagatgctgaaatcaagaatgctttcaggagaaaagcaatggagtatcatccagaccaaaaccaaaataataaaggtgaacacagtttccttgtgtctccagaggttgctgaggcaaaattcaaagaggttatggattcttacgaagcaataaaacgagaacgacgagacagaagttgctgaatgtgaaatgtgctcatggttctcaggcggagtgaggaactgttgtatataaattgtttgatgtgggacaaactaaatctagggctagtttggcatccccatttttccatgggatttctaatttcccaagggaaaatgaactaatttcccttgggaaaatgaaaaacccttgggaaaatgaggtttccaaactagcccctaaggtataaaactaccgctctgatccaaaagagcgtgtagcttagtggttacaagggccacaatgccacattagtattttatgttctggcttcgactctctgtagaagggaaaaaaatacgggagataatgaattcagatgggggacgatggcaggtcaattcagccattcttgtttctatttttctcttgggggtgggggccggggcagatatagatgtactcagacgaatgaaggctattgaaagaatgcacggatgagctggacgtgtgttttagagaacaaatcagatccttcactcatgattgttaaattatgcaggacagatcagtttgatttgtctgagccagggtggtagcatcgtatcgtattggcagaagctatgaattacttccattcttgcaatgagagcatgatattgggacatttattaaactttaaatcctaaaaaaatgatactattcaacaactcccaacattttccctgtacactatcttggccatttgccacagcaccatccaactgaaagcgctgctgacaagcaaaccaattgccctttcctagaaaactaattggctttagtctctagtccctcacatgggtgctaaaagagattaaaggataacatttacaccaattacccttctagaaaactggcatcatacacatgaaacaaaaaaaaagaga

SEQ ID NO: 67840 - DNA, 866 bp, Zea Mays
cttctactagcccacccaactccaggaaaagacaagggcccacttgcagcccgagccccttgattccctcgccggtgtcacgcgactccagatccccaattcggacagccacctgctcggcgagccatggccggccgccgcgaaggcgagcaccaggcgagcccgtggcgatccgggacgcccgcggcggaggaggactcgggcgccttcccctccgccatcatcttcttcgctctcgttggcgctaccgccaccaccgccgccgtcggacaactgcgccggacggtcagctggttctacactcaacttagtaggtcggaaccatatgttttctgggaagacatacctcgtcgaccaaatcgtcatcggtgcggtgaagcctgggaacgatatcaccagaggatgcgtgacaggaccgaggatcaaagggaaagagtggtagcaatcgcgttggagtcgagccagtcgacaccgaccactgtattggacgaacttgtcaatatcgacccgaacacggaacgcatacggcacatgcaagatgtatttaaaaaggagagaagtaaatgtcgggattatcgaaattgggatagccataatcccaactattatcagcatcatcaaagagatgactggtactggaacgcagaagcattttatgccaatcaaaggacaaatttcagggcaatgaccagggaagccatgacttacactatgtcacaccactattctgttttgggccttgacaggtcaaggtcagagccattttcagatgctgaaatcaagaatgctttcaggagaaaagcaatggagtatcatccagaccaaaaccaaaataataaaggtatatacgtgctcagaaacttcct

SEQ ID NO: 67841 - DNA, 788 bp, Zea Mays
cttctactagcccacccaactccaggaaaagacaagggcccacttgcagcccgagccccttgattccctcgccggtgtcacgcgactccagatccccaattcggacagccacctgctcggcgagccatggccggccgccgcgaaggcgagcaccaggcgagcccgtggcgatccgggacgcccgcggcggaggaggactcgggcgccttcccctccgccatcatcttcttcgctctcgttggcgctaccgccaccaccgccgccgtcggacaactgcgccggacggtcagctggttctacactcaacttagtaggtcggaaccatatgttttctgggaagacatacctcgtcgaccaaatcgtcatcggtgcggtgaagcctgggaacgatatcaccagaggatgcgtgacaggaccgaggatcaaagggaaagagtggaacgcatacggcacatgcaagatgtatttaaaaaggagagaagtaaatgtcgggattatcgaaattgggatagccataatcccaactattatcagcatcatcaaagagatgactggtactggaacgcagaagcattttatgccaatcaaaggacaaatttcagggcaatgaccagggaagccatgacttacactatgtcacaccactattctgttttgggccttgacaggtcaaggtcagagccattttcagatgctgaaatcaagaatgctttcaggagaaaagcaatggagtatcatccagaccaaaaccaaaataataaaggtatatacgtgctcagaaacttcct

SEQ ID NO: 67842 - DNA, 1591 bp, Zea Mays
ggaccaacctgaagatggttaaattaagcaagtgctcggtcgagggatactcgtcaagcggacatcgtctaacaaacactaacgtagtgttattccaggcaagccccggtgcatttaccccttccttgtgttttaaatactttttcaccttatctgatgcattaggtgataggagttgtgtgataaacaattgatgcattatcattccttggagactccttaatcccggttttataaaaagaactgataatgcttagccctgcttagaaactgaaaaatcatttgttttcaaaaagaatgattgtggcacattggttatgggcctttcgtttcaaaaatcaaagcaaacttatggtgatgattccacttcggccggagtgggttcatcatttggaaaagagtacccctgccgggtaccaaaaatgggaaaatggttcgaatacatctagaccagacgttgagcggacatggtcgcccgtctgtgtcgattaaggaccgttcgatgtaggcctgatgaggtgagactttgcaactaaccacatgctccggtaagcctgaacctggctattccatacgtgaaaagacaaccgcgcactgggcgtgggagatggtgggagtagcgtgtaccctcctggctagaggctggatggaggagtactgtgctcccgggtagcgcggaccggttcacgttgtggaggatctatgggaacagttgacatatgcaagggttaagtgctacatatgtcgtgtggttagggatctccagctgggtataatcggttcgaatcgtcgttgctcctcggttatggagactcgactcactgaccactcatcgtagttgacaagtgaaacatgattgtagttggttaaaagaaagctagatcaggacaagtgaatgctctagattagacaaatctagattcaggaaaagtacttaacttgtgaagtaaaattttggcataaggattcactactagtaagctcttctgcaaaatgagtccttgattattgcttaaccttaccttgactcctaatcagccagcatatccttgagagtcttttctttagtcgggtaagtcttgctgagtaattccgtactcagggttttattccctgttgtttttcaggttatagttttgtgctgctgttgatggtgttatgtgccggtgggctcggccttcttataagtctaagtaattcttctatacttcttattgaggatggtcacttgagctagcatatatttcaaacttacaaataatttataacatctcaaagttattcctttgaaccacttttgcaatcactccgataaatacaatgtaaacttgttgtaacttgtaaaatttggtaataagattttccgctgcaaaatgttggtgtgtgatttgtgtttacttaatcttgcgatcctggttgtaagtggtttatccggggtccttgggacactcggacggatcctgttaagttatctggtgcacatgcatagctgtctgaggtctttgagataaggacaggtgcatgtgggcccgataacttgggaggttctgccacaataaatacgagatagacaggcgaacctagggcccac

SEQ ID NO: 67843 - DNA, 773 bp, Zea Mays
atgtccgccgtagctcagctcgaccgctcggcttcccctagcctcttcccctgcgagctcgactcctgctcgcccatggagttcgcccagctccctgctccggtgactagcgctcggcgtcctgctctctatgccctgctcgtccctgcgcacgcgccgcggtttcccccgagctccctcgccgtggattctttctgcgcgtcctctccggcgctgcggtgccccagcttggcctctgcccattcctcagccgcaccctgctccagtcgctcacccatcggacgctacacgctcgcctctgctcgttccgtgggtgcgcactgccttctctgtccatggtgcgccctcacctctacttctctgctggccggcgtttttccagccgtggatctccttgtgtgccgcgtccggctccctgacgtgccgcggtgcccatcgccctgcgcgcgctctgtttcctcgcgcggcttcgtgctcgcctggccgttgtcttggatgcgcaggagtagtgtaggtgcttgcagttgggggatcctcgatatcgggctgggattagagaagacagtactgttccgtgcgtcgcttatccgatgctcgacggaatgtccaactgggaggtgatagcttcgtgtgtcggcgagccgtcgttttcctcgttcagtgtttgcgcggccttgcctgaaccgtgctgccatctcccgaccgttggctcttgccccctgcacgggcttgtcgtgctagtcaaccccgcctcgatcctcgtcgtcgatact

SEQ ID NO: 67844 - DNA, 724 bp, Zea Mays
ttgtgttttgatctgttctatttatatcacacccaaactctaattctaataccagtattctttgagaaagaagaaaagaccaaatagaaaatatctgaaatctttccaccgtttagcattttttgaccaccgcatggaactcttccacgcgtctctctctcctccttatattgaccacgtcatctgcgggactccattatctggtgccgtgtggacgaaacagcggttcggccactcccgtccgtcaaaatcaagtggcgctactagcttgtcgtcgtcgtcgctggccatatccattctcttctcgacggactccattatccggccacctctccgcatcgcacatattttctatcccctacagttctgcgctcagagcttgcagacgcccgaccgccgctccaagtcgtcgttccagccaacctcgccggagctcctccctctgctattctcatgtgcccaggaagaaaaatctcgcggctctatccttccagccgtcttcttcccttatccccgccgccgctcagctcaagatttttctcaccgccgttgcctcgttcccatccgctcggccaccctgaataaaaatcccatcgcggtgtccatcttctgctcttagccgagtgcctctgctcctcttctccccggcgcctggtcggatgtggatcctctgctcgaagctcccagcgccggattccctgcaagcttcagcttcctgcgcgcc

SEQ ID NO: 67845 - DNA, 3202 bp, Zea Mays
cgtccacacatgcttctagatgcctctcctctcctcgcttcatccacctcatctcactccagcgtcttccatttgacctcggtgccttctcctcttgcttgtggccacagtctgagccatgccgcgcgtgcgacgaccagtagaaaccgctctcgagcgcgacgctgcagcaggcacaggcgaggtcccgctcatccagatcacaccagcccatcgacgacagcaacaccttctcgggcgccgccgccgcgacgcagtcctcgcacatgtctccggcgtccacgagctagcggtgggtcccgaagaggctgccgatgccgaggcgggagcagagcgcgcacggcggcgagagatcgaagaagccggcgaaccgagctatgaggattaggattttggttttaaggttctttttttagctcgagcatccttataaaaaaattatttcaatggctgtttccttagagctagtttgacaactccattttcccaagaaaaaatgaactaatttcccttgaaaaatgaaaatcccccctatattatttctctatgtgtcgcactacattataaatatcaagtaattgtaatggtgcttctttcctttaaatatgcgtattaattcttgcagcagttaagtctacatgcacatttgtgtatctatttacgtagcgaactgccaaatatcatgtgtggagctatttttacaagtttattaaccacattccttgtcatgcgcagggtaatttttcccaatcactatatgctcctatactcttctcaaatattgatgtggtatgcgagtaacaaaacttcttctcaatataaataggtttggtagtgtggccttactgttacgttactttccttcttttaaaaaaattaaatgtaactacaagatattgaccatggatatctattgtttgtagcatgatatatatttcgaatgtgtgttaatcatggccaggtcgcacaatgtgtcatgctatatagtaaatatcaaataattgcaattgagcttcttttctgtgaataaaattcagctcaacataaataggtttagtagtgtgtgtttactgttaatattttcatgacatttgttattaacaactttggaactaagttgattatatctatactcatacttttattatttccctttacatcgataatttgtacatgtgtgtgcttattcattttcacatatcctgatttgagtttttttctcctcaacaggtgagttgtaggtactatctgtctattgtatgatagttacgcttataaattctatatgtgcaatatattaatattgctgcttcgatgttgattgctttacaacagtttgctgttgctcaagccatttattttcttttcgaaatctgcgctttcataaatattaatagttgttggccacttactgttagcaaaaaaaaattacctaaaatctaagagcttagttgattgtattattaaccatacatttattgtttctatttacatcaagaattttcacttatgtgtgcttattgatttgcacagttgttagcatggctttttttatttatcttgctcccctacaggtgagttgtatgtactatctacctgaccaacagcatttacgcttacaaattatttctatgtgatctattagtatttcttgttcgattgcttcacacatctttgttgttgctcaggtcatatttttttcaattgtatgtttgcatacagactaatagctacgcacagtccatttgttgttatcagaacaacaaaaaacttatatgtgcaccgatatatttattatttgtctttgcatcgatgattcacgtggatatacacttattcattttacaattttccataagattgttttattcctttgcaggtaagctctaaagcctgtctctttaattgacactatatacatttatgtatttttccaaacaagtataaagtcatataggttactttgtggttgattaatatattatgcgtggtaaagtatatattctatgcggagaagtggaaacgacctcatcgttgattgcggtgttctggtactcgctgttctaaactttctgttgcagtaagatacccctccctccttgattgtaggtcctcaattcacacatgagtttatgttttaggttgtttttttcctggaatactctatgtcgactaaacaattttggttctttcgatttccttcatgtgaagtaaagatgttatactatgccttggctacatgtgccatgtttgactattattattatttaaggtaacttatagtttctgtttgcactacattcatcgttgtttacgctttcctttatgatttaccttcaaagatcataaaatatttgggccagaaaaaaatggttaagctctaggccatgaatgaccttcaaccgttaggacatagaattcagcttattttcaggaatggaactatttgtcttggtgatagctggcttgtgtttgcttccaataataaaggtgaacaaggttgcatattgttttgttgatatacttctgtggactctttgctttaagtggtcatctttgaccataccacatgtccaaaaaggtacttaagcagtgatggaactatcacatttggtacacttaattttatagtgttgcttgtctctcttttatacctttttgtggtttttgcgccatacactcatctcttttttacagcttgccaactaaaatttgttttttgttttgcatttgctttaggcctaatgaaaggcaaaacagttgtcgatgttgtgggaaagttcacctggacccaataagacaagaaaaaggcaaagagcacaatagttctcatatgcctaattattcccttgattcatgattatagctttgcctcctgatttaatgtccctttcctatcatttgagatatacaggtcaccctaaggtaagagaggtatttcctttattggagattacaattttgcctcatgttccattggattcttttttttgttgtcatcatatatgtttagcaggcataaaagaagaaagaccatttcttgtggagatttatgctgatgacataaatccaactacaactataaaagggaagcactacatcggctctggcggtgcctggttctaatgacttgcatgtattttatgcattgactacatgataagaaccgtgcacgttgttgatgacccaattattacctctg

SEQ ID NO: 67846 - DNA, 2924 bp, Zea Mays
cgtccacacatgcttctagatgcctctcctctcctcgcttcatccacctcatctcactccagcgtcttccatttgacctcggtgccttctcctcttgcttgtggccacagtctgagccatgccgcgcgtgcgacgaccagtagaaaccgctctcgagcgcgacgctgcagcaggcacaggcgaggtcccgctcatccagatcacaccagcccatcgacgacagcaacaccttctcgggcgccgccgccgcgacgcagtcctcgcacatgtctccggcgtccacgagctagcggtgggtcccgaagaggctgccgatgccgaggcgggagcagagcgcgcacggcggcgagagatcgaagaagccggcgaaccgagctatgaggattaggattttggttttaagggtaatttttcccaatcactatatgctcctatactcttctcaaatattgatgtggtatgcgagtaacaaaacttcttctcaatataaataggtttggtagtgtggccttactgttacgttactttccttcttttaaaaaaattaaatgtaactacaagatattgaccatggatatctattgtttgtagcatgatatatatttcgaatgtgtgttaatcatggccaggtcgcacaatgtgtcatgctatatagtaaatatcaaataattgcaattgagcttcttttctgtgaataaaattcagctcaacataaataggtttagtagtgtgtgtttactgttaatattttcatgacatttgttattaacaactttggaactaagttgattatatctatactcatacttttattatttccctttacatcgataatttgtacatgtgtgtgcttattcattttcacatatcctgatttgagtttttttctcctcaacaggtgagttgtaggtactatctgtctattgtatgatagttacgcttataaattctatatgtgcaatatattaatattgctgcttcgatgttgattgctttacaacagtttgctgttgctcaagccatttattttcttttcgaaatctgcgctttcataaatattaatagttgttggccacttactgttagcaaaaaaaaattacctaaaatctaagagcttagttgattgtattattaaccatacatttattgtttctatttacatcaagaattttcacttatgtgtgcttattgatttgcacagttgttagcatggctttttttatttatcttgctcccctacaggtgagttgtatgtactatctacctgaccaacagcatttacgcttacaaattatttctatgtgatctattagtatttcttgttcgattgcttcacacatctttgttgttgctcaggtcatatttttttcaattgtatgtttgcatacagactaatagctacgcacagtccatttgttgttatcagaacaacaaaaaacttatatgtgcaccgatatatttattatttgtctttgcatcgatgattcacgtggatatacacttattcattttacaattttccataagattgttttattcctttgcaggtaagctctaaagcctgtctctttaattgacactatatacatttatgtatttttccaaacaagtataaagtcatataggttactttgtggttgattaatatattatgcgtggtaaagtatatattctatgcggagaagtggaaacgacctcatcgttgattgcggtgttctggtactcgctgttctaaactttctgttgcagtaagatacccctccctccttgattgtaggtcctcaattcacacatgagtttatgttttaggttgtttttttcctggaatactctatgtcgactaaacaattttggttctttcgatttccttcatgtgaagtaaagatgttatactatgccttggctacatgtgccatgtttgactattattattatttaaggtaacttatagtttctgtttgcactacattcatcgttgtttacgctttcctttatgatttaccttcaaagatcataaaatatttgggccagaaaaaaatggttaagctctaggccatgaatgaccttcaaccgttaggacatagaattcagcttattttcaggaatggaactatttgtcttggtgatagctggcttgtgtttgcttccaataataaaggtgaacaaggttgcatattgttttgttgatatacttctgtggactctttgctttaagtggtcatctttgaccataccacatgtccaaaaaggtacttaagcagtgatggaactatcacatttggtacacttaattttatagtgttgcttgtctctcttttatacctttttgtggtttttgcgccatacactcatctcttttttacagcttgccaactaaaatttgttttttgttttgcatttgctttaggcctaatgaaaggcaaaacagttgtcgatgttgtgggaaagttcacctggtattttattctttgctcgagctaacattcaagcttcttttgtgtgtttatccttgatcctttataatccttttagtgatgcatatgggaatgactaagtcaacaaatatgtgtgcaggacccaataagacaagaaaaaggcaaagagcacaatagttctcatatgcctaattattcccttgattcatgattatagctttgcctcctgatttaatgtccctttcctatcatttgagatatacaggtcaccctaaggtaagagaggtatttcctttattggagattacaattttgcctcatgttccattggattcttttttttgttgtcatcatatatgtttagcaggcataaaagaagaaagaccatttcttgtggagatttatgctgatgacataaatccaactacaactataaaagggaagcactacatcggctctgaacaagcaatcatggaatattgagctaag

SEQ ID NO: 67847 - DNA, 3227 bp, Zea Mays
gtcaattgaattattttcagcccctcgatcatcaatcaagggcttgcgtccggtagcgggtaaaaaagataaaactctacatactcccacagtccctctgcctctcgagagttccgtccacacatgcttctagatgcctctcctctcctcgcttcatccacctcatctcactccagcgtcttccatttgacctcggtgccttctcctcttgcttgtggccacagtctgagccatgccgcgcgtgcgacgaccagtagaaaccgctctcgagcgcgacgctgcagcaggcacaggcgaggtcccgctcatccagatcacaccagcccatcgacgacagcaacaccttctcgggcgccgccgccgcgacgcagtcctcgcacatgtctccggcgtccacgagctagcggtgggtcccgaagaggctgccgatgccgaggcgggagcagagcgcgcacggcggcgagagatcgaagaagccggcgaaccgagctatgaggattaggattttggttttaaggttctttttttagctcgagcatccttataaaaaaattatttcaatggctgtttccttagagctagtttgacaactccattttcccaagaaaaaatgaactaatttcccttgaaaaatgaaaatcccccctatattatttctctatgtgtcgcactacattataaatatcaagtaattgtaatggtgcttctttcctttaaatatgcgtattaattcttgcagcagttaagtctacatgcacatttgtgtatctatttacgtagcgaactgccaaatatcatgtgtggagctatttttacaagtttattaaccacattccttgtcatgcgcagggtaatttttcccaatcactatatgctcctatactcttctcaaatattgatgtggtatgcgagtaacaaaacttcttctcaatataaataggtttggtagtgtggccttactgttacgttactttccttcttttaaaaaaattaaatgtaactacaagatattgaccatggatatctattgtttgtagcatgatatatatttcgaatgtgtgttaatcatggccaggtcgcacaatgtgtcatgctatatagtaaatatcaaataattgcaattgagcttcttttctgtgaataaaattcagctcaacataaataggtttagtagtgtgtgtttactgttaatattttcatgacatttgttattaacaactttggaactaagttgattatatctatactcatacttttattatttccctttacatcgataatttgtacatgtgtgtgcttattcattttcacatatcctgatttgagtttttttctcctcaacaggtgagttgtaggtactatctgtctattgtatgatagttacgcttataaattctatatgtgcaatatattaatattgctgcttcgatgttgattgctttacaacagtttgctgttgctcaagccatttattttcttttcgaaatctgcgctttcataaatattaatagttgttggccacttactgttagcaaaaaaaaattacctaaaatctaagagcttagttgattgtattattaaccatacatttattgtttctatttacatcaagaattttcacttatgtgtgcttattgatttgcacagttgttagcatggctttttttatttatcttgctcccctacaggtgagttgtatgtactatctacctgaccaacagcatttacgcttacaaattatttctatgtgatctattagtatttcttgttcgattgcttcacacatctttgttgttgctcaggtcatatttttttcaattgtatgtttgcatacagactaatagctacgcacagtccatttgttgttatcagaacaacaaaaaacttatatgtgcaccgatatatttattatttgtctttgcatcgatgattcacgtggatatacacttattcattttacaattttccataagattgttttattcctttgcaggtaagctctaaagcctgtctctttaattgacactatatacatttatgtatttttccaaacaagtataaagtcatataggttactttgtggttgattaatatattatgcgtggtaaagtatatattctatgcggagaagtggaaacgacctcatcgttgattgcggtgttctggtactcgctgttctaaactttctgttgcagtaagatacccctccctccttgattgtaggtcctcaattcacacatgagtttatgttttaggttgtttttttcctggaatactctatgtcgactaaacaattttggttctttcgatttccttcatgtgaagtaaagatgttatactatgccttggctacatgtgccatgtttgactattattattatttaaggtaacttatagtttctgtttgcactacattcatcgttgtttacgctttcctttatgatttaccttcaaagatcataaaatatttgggccagaaaaaaatggttaagctctaggccatgaatgaccttcaaccgttaggacatagaattcagcttattttcaggaatggaactatttgtcttggtgatagctggcttgtgtttgcttccaataataaaggtgaacaaggttgcatattgttttgttgatatacttctgtggactctttgctttaagtggtcatctttgaccataccacatgtccaaaaaggtacttaagcagtgatggaactatcacatttggtacacttaattttatagtgttgcttgtctctcttttatacctttttgtggtttttgcgccatacactcatctcttttttacagcttgccaactaaaatttgttttttgttttgcatttgctttaggcctaatgaaaggcaaaacagttgtcgatgttgtgggaaagttcacctggacccaataagacaagaaaaaggcaaagagcacaatagttctcatatgcctaattattcccttgattcatgattatagctttgcctcctgatttaatgtccctttcctatcatttgagatatacaggtcaccctaaggcataaaagaagaaagaccatttcttgtggagatttatgctgatgacataaatccaactacaactataaaagggaagcactacatcggctctggtacttcagtgaaaagatttcaccatatgcaggtccatgtttatgacaaatcatagttctccgttacattacatcgatataatcttcacacgaag

SEQ ID NO: 67848 - DNA, 2498 bp, Zea Mays
taattgaggcaagaggcaccaatcgtgtggtggcccttgcgggaagtttgattcccaagtgatttgagaagagaagctcactcggtccaagggaccgtttgagagagggaagggttgaaagagacccggcctttgtggcctcctcaacggggagtaggtttgagagaaccgaacctcggtaaaacaaatccgcgtgtctcactttactatttgcttgcgatttgtttttcgccctctctcgtggactcgattatatttctaacgctaacccggcttgtagttgtgattattttgagaatttcagtttcgccctattcacccccctctaggcgactatcagggagtaaatgctacattctagtgaagaagggtagaaattctaagtttgctcccaaagccgtagaagggtttttgttaggttatgactcaaatacaaaggcgtatagagtcttcaacaaatcatcgggtttggttgaagtctctagcgacgttgtatttgatgagactaatggctctccaagagagcaagttgttgatcttgatgatgtagatgaagaagacgttccaacggccgcaatacgcaccatggcgattggagatgtacggcctcaggaacatttggagcgagatcaaccttcttcctcaacaaccgtgcatcccccaactcaagacgatgaacaggttcatcaaaaggaggcgtgtgatcaagggggagcacaagatgatcacgtgatggaggaagaagcgcaaccggcaccttcaacccaagttcgagcgatgattcaaagggatcatcccgtcgaccaaattttgggtgacattagtaagggagtaactactcgatctcgattagttaatttttgtgaacattactcctttgtctcttctattgagcctttcagggtagaggaggacttgctagatccggattgggtattggccatgcaggaggaacttaacaacttcaagcgcaatgaagtttggacactggtgcctcgtcccaagcaaaatgttgtgggaaccaagtgggtgttccgcaacaaacaggacgagcacggggtggtgacgaggaacaaggctcgacttgtggcaaaaggttatgcccaagtcgcaggtttggactttgaggagacttttgctcctgtggctaggctagaatcaattcgtatcttgctagcatatgccgctcaccattctttcaggttgtaccaaatggatgtgaagagcgcgttcctcaacgggccgatcaaggaggaggtgtacgtagagcaaccccctggcttcgaggatgaacggtaccccgaccatgtgtgtaagctctctaaggcgctctatggacttaagcaagccccaagagcatggtatgaatgccttagagactttttaattgctaatgctttcaaggttgggaaagccgatccaactcttttcactaagacttgcaatggtgatctttttgtgtgccaaatttatgtcgatgacataatatttggttctactaatcaaaagtcgtgtgaagagtttagcagggtgatgacgcagaaatatgagatgtcaatgatgggcgagttgaactatttccttgggttccaagtgaagcaactcaaggacggcaccttcatctcccaaacgaagtacacgcaagatctgctaaagcgatttgggatgaaggacgccaagcccgcaaagactccgatggggaccgacggacacaccgacctcaacaaaggaggtaagtccgttgatcaaaaagcataccgatcaatgatagggtctttactttatttatgtgctagtagaccggatattatgcttagcgtatgcatgtgtgctagatttcaatccgatcctaaggagtgtcacttagtggcggtgaagcgaattcttagatatttggttgctacgccttgcttcgggctctggtatccaaaggggtctacctttgacttggttggatactcagattccgactatgctggatgtaaggtcgataggaagagtacatcagggacgtgccaattcttaggaaggtccctggtgtcgtggaactctaagaaacaaacctccgttgccctatccaccgctgaggccgagtatgttgccgcaggacagtgttgcgcgcaactactttggatgaggcaaaccctccgggactttggctacaatctgagcaaagtcccactcctatgtgacaatgagagtgctatccgcatggcggaaaatcctgttgaacacagccgcacaaagcacattgacatccggcatcactttttgagagaccaccagcaaaagggagatatcgaagtgtttcatgttagcaccgagaaccagctagccgatatctttaccaagcctctagatgagaagaccttttgcaggctgcgtagtgagctaaatgtcttagattcgcggaacttggattgaattgtagcatacatgtgtttatgcctttgatcatgttcattctgcattttgttgcttattgtggtgctcaagtt

SEQ ID NO: 67849 - DNA, 315 bp, Zea Mays
cggccatggtggtgtccgtgctgctcacacttgcgtgatctacctgtcggtggaggacttcttgcataagagggaaaaggagaagtttgagaaggaggaggccgaaaagcagaaagaggaggcgaggaagaagagggctaagtccaggcagaagagaagaaattattgatctcaggatgaactaccccccaccaatgtgaccatttcttcttcttttccaccctgtttcttgtaatagcaatgattttgtatgtagtgttgcacctttggtatcacattgtggttttccttcactccattgccggctcttggatg

SEQ ID NO: 67850 - DNA, 4381 bp, Zea Mays
cgtctccccgaccctgcattctcctctctgggaagattcaaatcccccacgggccacggcccacgccacgccatctctacccagccacggcgagcgccaccggccccgccgcgccgcaagaactctaccgtaacgtaaccgagaaaccccgccgccggcgcgatggactggtactccgacgactcggaccccgacatcgacgaggacctgcgggaggacctcgacgcgctgcgccgctcctgcatcctctccggggccgacccggacgctgccgtagcgcaggtctcctccggcctcgcgggcccctccaccccagccctcgccgcggcgccgggggcggcggccgaccatcatcatcatgcctcctcttcggacgacgaggaggacgaggacctcgccctcgtccgcagcatacgcgccaacctccaccacctccataatagtaaggcctcgaccgtcctcccggacgccgcccccgcgccccgggacgacgacgacccgtcctcgcgcccgatctgcacgtggccgccgtccgacactgacgaggaagaggatgacctcgagacgctccgcgccatccagcgccgcttctcgcattaccagtcaagtacctccactgcatcgccaaagaccatgaaacctgaggcgtcacagggagtccacagtgacctttttgccgacaggtctggtgatgattttgctgtgcagaagcaaaatgcaattgttcctcatggagatgggtttccaaaggctgcgctattgttagtggatgctctcaagaagaacagagcataccagaagttcattagaagaaaaatggtaaacattgaagcgaaaattgaagaaaacaaagatctcagggatcgtgtaaaatgtcttttgggctatcagttaagctgccgaaaatcagtcagcagatctttaggacagaaggaggatcctcgtgtcaggttgatttcccccctgaaatcaactcagccgtgtacaaagaacaaatacaggaagattcctgcactatttctcggcccagctgagaacccacatgtttcaaagtatgaaatggcgctgaagcaatttccaatgtcatttaagaagcaaccatggtcagatgcggagaaagataaacttgccagaggaataaagcagcaataccaagaaacattgattttggattcgctgaataatggaagtgctgatggtgacttcagtgcacttgatatggcatatgcactgacaaatggtgctggtaattttgaggtgactccggaaaatcttagatcggttctaccattaataaactgggataagatttctgccatgtaccttcctggtcgatctggtgctgaatgtgaatcgaggtggctaaactgtgatgatccattgattaaccatgaagcctggactgcagacgaggaaacaagacttctactaattattcaagaaaagggaatgtgcaactggattgacattgcagtcacattgggtacttaccggactcctttccaatgtcttgttcgttatcaacgaagtttgaatccccacatactgaacaaggcctggacaaaggaggaagaccttcaactccaagcagctgttgagacctttggtcagaaatggcaacttgtatcggctagtctggatggtcgcactggcactcagtgctctaataggtggagaaaaaccttgcaccctgaaaagaccagtgtgggaagatggcttctggatgaggacaaacgcctcatggtcactgttaaactaattggacctggcaggtggagtttgattgctccgtttattcctggccgaacacaaacacaaatctttgagaggtggtgcaatattcttgatccagatctatatcttgatgactggcggcctgacgaagattccacattattggctgcagtatctgagtttgggccttgctggtcgaagatttctaaaacgataattcctggacgtaatgataacgatggagaaaactttgtaaacatgaagtccagaaagctagagaagccagacaattgaagaaagctatttttcagaacaattttgttgatagagaaaaagagcggcctgcaatttgccctcgtgacctaatatcacttttaccctcgaaaggtgacggatgtgatgtggccattgtaaggggtggatctgaaaagcaaggggaagagaaccacctagctctgtccaatattgtcaacatttcatctggtcttgattgtgttgctgctaattctgttttgaatgctagctcaaggaggccaaggagagtatcgtcaggacgtagatcaaaaaagcataccgaagggaataatattgctgcgcctgatgatctcaatgcttcatccagcgcccctagcagttccataaagagaaaatctactactggtaacaatgtagctgcaaaaaagagatcgagggtatctatcagtgttaatgctgataacgaggtagagaaaaatagaataacagactctgtggctgttagtgaagaggggttagtcaaaaagagaacaaggcgtccaaaacctgttggcaatgagggggctgtcagaaagagaggaggctctaataatgaggtagggacaaatatcataacggaatctgtggctgttggtgaagagggagtagtcaaaaagagaacaagacgttcgaaacccgtagggaatgagggggctgataatgaggtaggaacatatagaataacgggctctgtggttgttggtgaagagggagtagtcaaaaagagaacaaggcgtagttcaaaacctgttgacaatgaggaggttgtcagaaagatgaggggctctatcaataattatgatgaggcaggaacaaatacaatgatgaattctgcgtttggggaggaggaagtagtcaaaaagaaaacgagacactcaaaacctgttggcactgaaggggctgcctctattggtggtgatggcatggtcaacaagagaaggacaggttctgtctccaccgagaatcttggtgctgtgagaaaaaggaagatagtgtcatcaaggaggaaattagctgaagttaatttgccaacagaggagggtgtaccgaatgctgtccctgacttggactttccttgtgcaatttctgaagaaagagctgttgatgttggaaatatggataaaggcagaagaaaatcaactccgagacccaagcagataaacatgcctgaagaggatgctgataaaaactccacattcacacgacttgtcaattgcctgtcgtttgcccgtatgaaaggaatcgacaggaacaaaagataattgaagttgagaaaccgtcgcttgaaaagggtttagtttcacctgtgatgatggttttgcgcgtggaggttgcagtcagtacgcgtggaatgcccaaaggtagtaaaatgtgatctagaactatccaggctcaagggatgagaaattttcttattgtttctccctgttcaggatgacgctttttaagctggagtgtcatcaggcacattgccttgtgtgtgagcagctccacagtagattcccttacacaaggtctcttttaactactggaggacatctattataatgagcttgttttgccgatgcgttactgtgctgcctcgctcttatgcagggatgttttttttagacagaaccagggtcatctggatgtcatctgttgattcgaaaactggcaccacatatacaggtagtaataacttgtaagtgcatgcaaagagtatcacatgaggtttggattggatctaattgatatacgttctccattgcgattctttgttttttggtggcttattgctaaacagaggtcatttctatcttggatggggaacgaaatttgtacgacctgtttcgttggagacccggcagtttgtttccagttggtggtatataggtgttgggcatttaatgcgtcgatgacagttgacggcatccattgttttatccatactctgaaatttctgatcttgccccatcaattgatgaatcgctacctttatcagattcatgtcacgcagcagtgcaagaaattcattagcaacattgagaccaacaaatagctgaaaccaaagggtgcctagctccatctgttctccgtggggacttgttgtttcgttatgcattttatcaattataaatttgatttacaaagtatcactattaacttttgtatatcaccttccaatctctcaactaggcctgggcaaaaagaaccggaaccgaggaaccgaaccgaaccgaaataaccgagaaccggaaccgaactaaccgaaccgaaggaaccgttatgaatttcggttctggttttttgagaaccgaaataaatgagatattttcggttctgcactccaaagaaccgaaagaaccgaaaa

SEQ ID NO: 67851 - DNA, 4152 bp, Zea Mays
cgtctccccgaccctgcattctcctctctgggaagattcaaatcccccacgggccacggcccacgccacgccatctctacccagccacggcgagcgccaccggccccgccgcgccgcaagaactctaccgtaacgtaaccgagaaaccccgccgccggcgcgatggactggtactccgacgactcggaccccgacatcgacgaggacctgcgggaggacctcgacgcgctgcgccgctcctgcatcctctccggggccgacccggacgctgccgtagcgcaggtctcctccggcctcgcgggcccctccaccccagccctcgccgcggcgccgggggcggcggccgaccatcatcatcatgcctcctcttcggacgacgaggaggacgaggacctcgccctcgtccgcagcatacgcgccaacctccaccacctccataatagtaaggcctcgaccgtcctcccggacgccgcccccgcgccccgggacgacgacgacccgtcctcgcgcccgatctgcacgtggccgccgtccgacactgacgaggaagaggatgacctcgagacgctccgcgccatccagcgccgcttctcgcattaccagtcaagtacctccactgcatcgccaaagaccatgaaacctgaggcgtcacagggagtccacagtgacctttttgccgacaggtctggtgatgattttgctgtgcagaagcaaaatgcaattgttcctcatggagatgggtttccaaaggctgcgctattgttagtggatgctctcaagaagaacagagcataccagaagttcattagaagaaaaatggtaaacattgaagcgaaaattgaagaaaacaaagatctcagggatcgtgtaaaatgtcttttgggctatcagttaagctgccgaaaatcagtcagcagatctttaggacagaaggaggatcctcgtgtcaggttgatttcccccctgaaatcaactcagccgtgtacaaagaacaaatacaggaagattcctgcactatttctcggcccagctgagaacccacatgtttcaaagtatgaaatggcgctgaagcaatttccaatgtcatttaagaagcaaccatggtcagatgcggagaaagataaacttgccagaggaataaagcagcaataccaagaaacattgattttggattcgctgaataatggaagtgctgatggtgacttcagtgcacttgatatggcatatgcactgacaaatggtgctggtaattttgaggtgactccggaaaatcttagatcggttctaccattaataaactgggataagatttctgccatgtaccttcctggtcgatctggtgctgaatgtgaatcgaggtggctaaactgtgatgatccattgattaaccatgaagcctggactgcagacgaggaaacaagacttctactaattattcaagaaaagggaatgtgcaactggattgacattgcagtcacattgggtacttaccggactcctttccaatgtcttgttcgttatcaacgaagtttgaatccccacatactgaacaaggcctggacaaaggaggaagaccttcaactccaagcagctgttgagacctttggtcagaaatggcaacttgtatcggctagtctggatggtcgcactggcactcagtgctctaataggtggagaaaaaccttgcaccctgaaaagaccagtgtgggaagatggcttctggatgaggacaaacgcctcatggtcactgttaaactaattggacctggcaggtggagtttgattgctccgtttattcctggccgaacacaaacacaaatctttgagaggtggtgcaatattcttgatccagatctatatcttgatgactggcggcctgacgaagattccacattattggctgcagtatctgagtttgggccttgctggtcgaagatttctaaaacgataattcctggacgtaatgatagtatgtgctatagacgatggagaaaactttgtaaacatgaagtccagaaagctagagaagccagacaattgaagaaagctatttttcagaacaattttgttgatagagaaaaagagcggcctgcaatttgccctcgtgacctaatatcacttttaccctcgaaaggtgacggatgtgatgtggccattgtaaggtattgcaaatttctatgtagtagttgtatacttatctcattgggtggatctgaaaagcaaggggaagagaaccacctagctctgtccaatattgtcaacatttcatctggtcttgattgtgttgctgctaattctgttttgaatgctagctcaaggaggccaaggagagtatcgtcaggacgtagatcaaaaaagcataccgaagggaataatattgctgcgcctgatgatctcaatgcttcatccagcgcccctagcagttccataaagagaaaatctactactggtaacaatgtagctgcaaaaaagagatcgagggtatctatcagtgttaatgctgataacgaggtagagaaaaatagaataacagactctgtggctgttagtgaagaggggttagtcaaaaagagaacaaggcgtccaaaacctgttggcaatgagggggctgtcagaaagagaggaggctctaataatgaggtagggacaaatatcataacggaatctgtggctgttggtgaagagggagtagtcaaaaagagaacaagacgttcgaaacccgtagggaatgagggggctgataatgaggtaggaacatatagaataacgggctctgtggttgttggtgaagagggagtagtcaaaaagagaacaaggcgtagttcaaaacctgttgacaatgaggaggttgtcagaaagatgaggggctctatcaataattatgatgaggcaggaacaaatacaatgatgaattctgcgtttggggaggaggaagtagtcaaaaagaaaacgagacactcaaaacctgttggcactgaaggggctgcctctattggtggtgatggcatggtcaacaagagaaggacaggttctgtctccaccgagaatcttggtgctgtgagaaaaaggaagatagtgtcatcaaggaggaaattagctgaagttaatttgccaacagaggagggtgtaccgaatgctgtccctgacttggactttccttgtgcaatttctgaagaaagagctgttgatgttggaaatatggataaaggcagaagaaaatcaactccgagacccaagcagataaacatgcctgaagaggatgctgataaaaactccacattcacacgacttgtcaattgcctgtcgtttgcccgtatgaaaggaatcgacaggaacaaaagataattgaagttgagaaaccgtcgcttgaaaagggtttagtttcacctgtgatgatggttttgcgcgtggaggttgcagtcagtacgcgtggaatgcccaaaggatgacgctttttaagctggagtgtcatcaggcacattgccttgtgtgtgagcagctccacagtagattcccttacacaagacagaaccagggtcatctggatgtcatctgttgattcgaaaactggcaccacatatacagaggtcatttctatcttggatggggaacgaaatttgtacgacctgtttcgttggagacccggcagtttgtttccagttggtggtatataggtgttgggcatttaatgcgtcgatgacagttgacggcatccattgttttatccatactctgaaatttctgatcttgccccatcaattgatgaatcgctacctttatcagattcatgtcacgcagcagtgcaagaaattcattagcaacattgagaccaacaaatagctgaaaccaaagggtgcctagctccatctgttctccgtggggacttgttgtttcgttatgcattttatcaattataaatttgatttacaaagtatcactattaacttttgtatatcaccttccaatctctcaactaggcctgggcaaaaagaaccggaaccgaggaaccgaaccgaaccgaaataaccgagaaccggaaccgaactaaccgaaccgaaggaaccgttatgaatttcggttctggttttttgagaaccgaaataaatgagatattttcggttctgcactccaaagaaccgaaagaaccgaaaa

SEQ ID NO: 67852 - DNA, 4096 bp, Zea Mays
cttcctctgtcgtctccccgaccctgcattctcctctctgggaagattcaaatcccccacgggccacggcccacgccacgccatctctacccagccacggcgagcgccaccggccccgccgcgccgcaagaactctaccgtaacgtaaccgagaaaccccgccgccggcgcgatggactggtactccgacgactcggaccccgacatcgacgaggacctgcgggaggacctcgacgcgctgcgccgctcctgcatcctctccggggccgacccggacgctgccgtagcgcaggtctcctccggcctcgcgggcccctccaccccagccctcgccgcggcgccgggggcggcggccgaccatcatcatcatgcctcctcttcggacgacgaggaggacgaggacctcgccctcgtccgcagcatacgcgccaacctccaccacctccataatagtaaggcctcgaccgtcctcccggacgccgcccccgcgccccgggacgacgacgacccgtcctcgcgcccgatctgcacgtggccgccgtccgacactgacgaggaagaggatgacctcgagacgctccgcgccatccagcgccgcttctcgcattaccagtcaagtacctccactgcatcgccaaagaccatgaaacctgaggcgtcacagggagtccacagtgacctttttgccgacaggtctggtgatgattttgctgtgcagaagcaaaatgcaattgttcctcatggagatgggtttccaaaggctgcgctattgttagtggatgctctcaagaagaacagagcataccagaagttcattagaagaaaaatggtaaacattgaagcgaaaattgaagaaaacaaagatctcagggatcgtgtaaaatgtcttttgggctatcagttaagctgccgaaaatcagtcagcagatctttaggacagaaggaggatcctcgtgtcaggttgatttcccccctgaaatcaactcagccgtgtacaaagaacaaatacaggaagattcctgcactatttctcggcccagctgagaacccacatgtttcaaagtatgaaatggcgctgaagcaatttccaatgtcatttaagaagcaaccatggtcagatgcggagaaagataaacttgccagaggaataaagcagcaataccaagaaacattgattttggattcgctgaataatggaagtgctgatggtgacttcagtgcacttgatatggcatatgcactgacaaatggtgctggtaattttgaggtgactccggaaaatcttagatcggttctaccattaataaactgggataagatttctgccatgtaccttcctggtcgatctggtgctgaatgtgaatcgaggtggctaaactgtgatgatccattgattaaccatgaagcctggactgcagacgaggaaacaagacttctactaattattcaagaaaagggaatgtgcaactggattgacattgcagtcacattgggtacttaccggactcctttccaatgtcttgttcgttatcaacgaagtttgaatccccacatactgaacaaggcctggacaaaggaggaagaccttcaactccaagcagctgttgagacctttggtcagaaatggcaacttgtatcggctagtctggatggtcgcactggcactcagtgctctaataggtggagaaaaaccttgcaccctgaaaagaccagtgtgggaagatggcttctggatgaggacaaacgcctcatggtcactgttaaactaattggacctggcaggtggagtttgattgctccgtttattcctggccgaacacaaacacaaatctttgagaggtggtgcaatattcttgatccagatctatatcttgatgactggcggcctgacgaagattccacattattggctgcagtatctgagtttgggccttgctggtcgaagatttctaaaacgataattcctggacgtaatgatagtatgtgctatagacgatggagaaaactttgtaaacatgaagtccagaaagctagagaagccagacaattgaagaaagctatttttcagaacaattttgttgatagagaaaaagagcggcctgcaatttgccctcgtgacctaatatcacttttaccctcgaaaggtgacggatgtgatgtggccattgtaaggtattgcaaatttctatgtagtagttgtatacttatctcattgggtggatctgaaaagcaaggggaagagaaccacctagctctgtccaatattgtcaacatttcatctggtcttgattgtgttgctgctaattctgttttgaatgctagctcaaggaggccaaggagagtatcgtcaggacgtagatcaaaaaagcataccgaagggaataatattgctgcgcctgatgatctcaatgcttcatccagcgcccctagcagttccataaagagaaaatctactactggtaacaatgtagctgcaaaaaagagatcgagggtatctatcagtgttaatgctgataacgaggtagagaaaaatagaataacagactctgtggctgttagtgaagaggggttagtcaaaaagagaacaaggcgtccaaaacctgttggcaatgagggggctgtcagaaagagaggaggctctaataatgaggtagggacaaatatcataacggaatctgtggctgttggtgaagagggagtagtcaaaaagagaacaagacgttcgaaacccgtagggaatgagggggctgataatgaggtaggaacatatagaataacgggctctgtggttgttggtgaagagggagtagtcaaaaagagaacaaggcgtagttcaaaacctgttgacaatgaggaggttgtcagaaagatgaggggctctatcaataattatgatgaggcaggaacaaatacaatgatgaattctgcgtttggggaggaggaagtagtcaaaaagaaaacgagacactcaaaacctgttggcactgaaggggctgcctctattggtggtgatggcatggtcaacaagagaaggacaggttctgtctccaccgagaatcttggtgctgtgagaaaaaggaagatagtgtcatcaaggaggaaattagctgaagttaatttgccaacagaggagggtgtaccgaatgctgtccctgacttggactttccttgtgcaatttctgaagaaagagctgttgatgttggaaatatggataaaggcagaagaaaatcaactccgagacccaagcagataaacatgcctgaagaggatgctgataaaaactccacattcacacgacttgtcaattgcctgtcgtttgcccgtatgaaaggaatcgacaggaacaaaagataattgaagttgagaaaccgtcgcttgaaaagggtttagtttcacctgtgatgatggttttgcgcgtggaggttgcagtcagtacgcgtggaatgcccaaagggatgttttttttagacagaaccagggtcatctggatgtcatctgttgattcgaaaactggcaccacatatacagaggtcatttctatcttggatggggaacgaaatttgtacgacctgtttcgttggagacccggcagtttgtttccagttggtggtatataggtgttgggcatttaatgcgtcgatgacagttgacggcatccattgttttatccatactctgaaatttctgatcttgccccatcaattgatgaatcgctacctttatcagattcatgtcacgcagcagtgcaagaaattcattagcaacattgagaccaacaaatagctgaaaccaaagggtgcctagctccatctgttctccgtggggacttgttgtttcgttatgcattttatcaattataaatttgatttacaaagtatcactattaacttttgtatatcaccttccaatctctcaactaggcctgggcaaaaagaaccggaaccgaggaaccgaaccgaaccgaaataaccgagaaccggaaccgaactaaccgaaccgaaggaaccgttatgaatttcggttctggttttttgagaaccgaaataaatgagatattttcggttctgcactccaaagaaccgaaagaaccgaaaa

SEQ ID NO: 67853 - DNA, 4239 bp, Zea Mays
aaagaaaaacccccgacaacgtcgcaaattccagcgctgtttcgagcccttccccgcgccgccttcctctgtcgtctccccgaccctgcattctcctctctgggaagattcaaatcccccacgggccacggcccacgccacgccatctctacccagccacggcgagcgccaccggccccgccgcgccgcaagaactctaccgtaacgtaaccgagaaaccccgccgccggcgcgatggactggtactccgacgactcggaccccgacatcgacgaggacctgcgggaggacctcgacgcgctgcgccgctcctgcatcctctccggggccgacccggacgctgccgtagcgcaggtctcctccggcctcgcgggcccctccaccccagccctcgccgcggcgccgggggcggcggccgaccatcatcatcatgcctcctcttcggacgacgaggaggacgaggacctcgccctcgtccgcagcatacgcgccaacctccaccacctccataatagtaaggcctcgaccgtcctcccggacgccgcccccgcgccccgggacgacgacgacccgtcctcgcgcccgatctgcacgtggccgccgtccgacactgacgaggaagaggatgacctcgagacgctccgcgccatccagcgccgcttctcgcattaccagtcaagtacctccactgcatcgccaaagaccatgaaacctgaggcgtcacagggagtccacagtgacctttttgccgacaggtctggtgatgattttgctgtgcagaagcaaaatgcaattgttcctcatggagatgggtttccaaaggctgcgctattgttagtggatgctctcaagaagaacagagcataccagaagttcattagaagaaaaatggtaaacattgaagcgaaaattgaagaaaacaaagatctcagggatcgtgtaaaatgtcttttgggctatcagttaagctgccgaaaatcagtcagcagatctttaggacagaaggaggatcctcgtgtcaggttgatttcccccctgaaatcaactcagccgtgtacaaagaacaaatacaggaagattcctgcactatttctcggcccagctgagaacccacatgtttcaaagtatgaaatggcgctgaagcaatttccaatgtcatttaagaagcaaccatggtcagatgcggagaaagataaacttgccagaggaataaagcagcaataccaagaaacattgattttggattcgctgaataatggaagtgctgatggtgacttcagtgcacttgatatggcatatgcactgacaaatggtgctggtaattttgaggtgactccggaaaatcttagatcggttctaccattaataaactgggataagatttctgccatgtaccttcctggtcgatctggtgctgaatgtgaatcgaggtggctaaactgtgatgatccattgattaaccatgaagcctggactgcagacgaggaaacaagacttctactaattattcaagaaaagggaatgtgcaactggattgacattgcagtcacattgggtacttaccggactcctttccaatgtcttgttcgttatcaacgaagtttgaatccccacatactgaacaaggcctggacaaaggaggaagaccttcaactccaagcagctgttgagacctttggtcagaaatggcaacttgtatcggctagtctggatggtcgcactggcactcagtgctctaataggtggagaaaaaccttgcaccctgaaaagaccagtgtgggaagatggcttctggatgaggacaaacgcctcatggtcactgttaaactaattggacctggcaggtggagtttgattgctccgtttattcctggccgaacacaaacacaaatctttgagaggtggtgcaatattcttgatccagatctatatcttgatgactggcggcctgacgaagattccacattattggctgcagtatctgagtttgggccttgctggtcgaagatttctaaaacgataattcctggacgtaatgatagtatgtgctatagacgatggagaaaactttgtaaacatgaagtccagaaagctagagaagccagacaattgaagaaagctatttttcagaacaattttgttgatagagaaaaagagcggcctgcaatttgccctcgtgacctaatatcacttttaccctcgaaaggtgacggatgtgatgtggccattgtaaggtattgcaaatttctatgtagtagttgtatacttatctcattgggtggatctgaaaagcaaggggaagagaaccacctagctctgtccaatattgtcaacatttcatctggtcttgattgtgttgctgctaattctgttttgaatgctagctcaaggaggccaaggagagtatcgtcaggacgtagatcaaaaaagcataccgaagggaataatattgctgcgcctgatgatctcaatgcttcatccagcgcccctagcagttccataaagagaaaatctactactggtaacaatgtagctgcaaaaaagagatcgagggtatctatcagtgttaatgctgataacgaggtagagaaaaatagaataacagactctgtggctgttagtgaagaggggttagtcaaaaagagaacaaggcgtccaaaacctgttggcaatgagggggctgtcagaaagagaggaggctctaataatgaggtagggacaaatatcataacggaatctgtggctgttggtgaagagggagtagtcaaaaagagaacaagacgttcgaaacccgtagggaatgagggggctgataatgaggtaggaacatatagaataacgggctctgtggttgttggtgaagagggagtagtcaaaaagagaacaaggcgtagttcaaaacctgttgacaatgaggaggttgtcagaaagatgaggggctctatcaataattatgatgaggcaggaacaaatacaatgatgaattctgcgtttggggaggaggaagtagtcaaaaagaaaacgagacactcaaaacctgttggcactgaaggggctgcctctattggtggtgatggcatggtcaacaagagaaggacaggttctgtctccaccgagaatcttggtgctgtgagaaaaaggaagatagtgtcatcaaggaggaaattagctgaagttaatttgccaacagaggagggtgtaccgaatgctgtccctgacttggactttccttgtgcaatttctgaagaaagagctgttgatgttggaaatatggataaaggcagaagaaaatcaactccgagacccaagcagataaacatgcctgaagaggatgctgataaaaactccacattcacacgacttgtcaattgcctgtcgtttgcccgtatgaaaggaatcgacaggaacaaaagataattgaagttgagaaaccgtcgcttgaaaagggtttagtttcacctgtgatgatggttttgcgcgtggaggttgcagtcagtacgcgtggaatgcccaaaggatgacgctttttaagctggagtgtcatcaggcacattgccttgtgtgtgagcagctccacagtagattcccttacacaagggatgttttttttagacagaaccagggtcatctggatgtcatctgttgattcgaaaactggcaccacatatacagaggtcatttctatcttggatggggaacgaaatttgtacgacctgtttcgttggagacccggcagtttgtttccagttggtggtatataggtgttgggcatttaatgcgtcgatgacagttgacggcatccattgttttatccatactctgaaatttctgatcttgccccatcaattgatgaatcgctacctttatcagattcatgtcacgcagcagtgcaagaaattcattagcaacattgagaccaacaaatagctgaaaccaaagggtgcctagctccatctgttctccgtggggacttgttgtttcgttatgcattttatcaattataaatttgatttacaaagtatcactattaacttttgtatatcaccttccaatctctcaactaggcctgggcaaaaagaaccggaaccgaggaaccgaaccgaaccgaaataaccgagaaccggaaccgaactaaccgaaccgaaggaaccgttatgaatttcggttctggttttttgagaaccgaaataaatgagatattttcggttctgcactccaaagaaccgaaagaaccgaaaa

SEQ ID NO: 67854 - DNA, 4242 bp, Zea Mays
aagaaatagtaaatccaggacaaacatttaggaaaaatataatatatgctaaggaaaacaaaagaaaaacccccgacaacgtcgcaaattccagcgctgtttcgagcccttccccgcgccgccttcctctgtcgtctccccgaccctgcattctcctctctgggaagattcaaatcccccacgggccacggcccacgccacgccatctctacccagccacggcgagcgccaccggccccgccgcgccgcaagaactctaccgtaacgtaaccgagaaaccccgccgccggcgcgatggactggtactccgacgactcggaccccgacatcgacgaggacctgcgggaggacctcgacgcgctgcgccgctcctgcatcctctccggggccgacccggacgctgccgtagcgcaggtctcctccggcctcgcgggcccctccaccccagccctcgccgcggcgccgggggcggcggccgaccatcatcatcatgcctcctcttcggacgacgaggaggacgaggacctcgccctcgtccgcagcatacgcgccaacctccaccacctccataatagtaaggcctcgaccgtcctcccggacgccgcccccgcgccccgggacgacgacgacccgtcctcgcgcccgatctgcacgtggccgccgtccgacactgacgaggaagaggatgacctcgagacgctccgcgccatccagcgccgcttctcgcattaccagtcaagtacctccactgcatcgccaaagaccatgaaacctgaggcgtcacagggagtccacagtgacctttttgccgacaggtctggtgatgattttgctgtgcagaagcaaaatgcaattgttcctcatggagatgggtttccaaaggctgcgctattgttagtggatgctctcaagaagaacagagcataccagaagttcattagaagaaaaatggtaaacattgaagcgaaaattgaagaaaacaaagatctcagggatcgtgtaaaatgtcttttgggctatcagttaagctgccgaaaatcagtcagcagatctttaggacagaaggaggatcctcgtgtcaggttgatttcccccctgaaatcaactcagccgtgtacaaagaacaaatacaggaagattcctgcactatttctcggcccagctgagaacccacatgtttcaaagtatgaaatggcgctgaagcaatttccaatgtcatttaagaagcaaccatggtcagatgcggagaaagataaacttgccagaggaataaagcagcaataccaagaaacattgattttggattcgctgaataatggaagtgctgatggtgacttcagtgcacttgatatggcatatgcactgacaaatggtgctggtaattttgaggtgactccggaaaatcttagatcggttctaccattaataaactgggataagatttctgccatgtaccttcctggtcgatctggtgctgaatgtgaatcgaggtggctaaactgtgatgatccattgattaaccatgaagcctggactgcagacgaggaaacaagacttctactaattattcaagaaaagggaatgtgcaactggattgacattgcagtcacattgggtacttaccggactcctttccaatgtcttgttcgttatcaacgaagtttgaatccccacatactgaacaaggcctggacaaaggaggaagaccttcaactccaagcagctgttgagacctttggtcagaaatggcaacttgtatcggctagtctggatggtcgcactggcactcagtgctctaataggtggagaaaaaccttgcaccctgaaaagaccagtgtgggaagatggcttctggatgaggacaaacgcctcatggtcactgttaaactaattggacctggcaggtggagtttgattgctccgtttattcctggccgaacacaaacacaaatctttgagaggtggtgcaatattcttgatccagatctatatcttgatgactggcggcctgacgaagattccacattattggctgcagtatctgagtttgggccttgctggtcgaagatttctaaaacgataattcctggacgtaatgatagtatgtgctatagacgatggagaaaactttgtaaacatgaagtccagaaagctagagaagccagacaattgaagaaagctatttttcagaacaattttgttgatagagaaaaagagcggcctgcaatttgccctcgtgacctaatatcacttttaccctcgaaaggtgacggatgtgatgtggccattgtaaggggtggatctgaaaagcaaggggaagagaaccacctagctctgtccaatattgtcaacatttcatctggtcttgattgtgttgctgctaattctgttttgaatgctagctcaaggaggccaaggagagtatcgtcaggacgtagatcaaaaaagcataccgaagggaataatattgctgcgcctgatgatctcaatgcttcatccagcgcccctagcagttccataaagagaaaatctactactggtaacaatgtagctgcaaaaaagagatcgagggtatctatcagtgttaatgctgataacgaggtagagaaaaatagaataacagactctgtggctgttagtgaagaggggttagtcaaaaagagaacaaggcgtccaaaacctgttggcaatgagggggctgtcagaaagagaggaggctctaataatgaggtagggacaaatatcataacggaatctgtggctgttggtgaagagggagtagtcaaaaagagaacaagacgttcgaaacccgtagggaatgagggggctgataatgaggtaggaacatatagaataacgggctctgtggttgttggtgaagagggagtagtcaaaaagagaacaaggcgtagttcaaaacctgttgacaatgaggaggttgtcagaaagatgaggggctctatcaataattatgatgaggcaggaacaaatacaatgatgaattctgcgtttggggaggaggaagtagtcaaaaagaaaacgagacactcaaaacctgttggcactgaaggggctgcctctattggtggtgatggcatggtcaacaagagaaggacaggttctgtctccaccgagaatcttggtgctgtgagaaaaaggaagatagtgtcatcaaggaggaaattagctgaagttaatttgccaacagaggagggtgtaccgaatgctgtccctgacttggactttccttgtgcaatttctgaagaaagagctgttgatgttggaaatatggataaaggcagaagaaaatcaactccgagacccaagcagataaacatgcctgaagaggatgctgataaaaactccacattcacacgacttgtcaattgcctgtcgtttgcccgtatgaaaggaatcgacaggaacaaaagataattgaagttgagaaaccgtcgcttgaaaagggtttagtttcacctgtgatgatggttttgcgcgtggaggttgcagtcagtacgcgtggaatgcccaaaggatgacgctttttaagctggagtgtcatcaggcacattgccttgtgtgtgagcagctccacagtagattcccttacacaagacagaaccagggtcatctggatgtcatctgttgattcgaaaactggcaccacatatacagaggtcatttctatcttggatggggaacgaaatttgtacgacctgtttcgttggagacccggcagtttgtttccagttggtggtatataggtgttgggcatttaatgcgtcgatgacagttgacggcatccattgttttatccatactctgaaatttctgatcttgccccatcaattgatgaatcgctacctttatcagattcatgtcacgcagcagtgcaagaaattcattagcaacattgagaccaacaaatagctgaaaccaaagggtgcctagctccatctgttctccgtggggacttgttgtttcgttatgcattttatcaattataaatttgatttacaaagtatcactattaacttttgtatatcaccttccaatctctcaactaggcctgggcaaaaagaaccggaaccgaggaaccgaaccgaaccgaaataaccgagaaccggaaccgaactaaccgaaccgaaggaaccgttatgaatttcggttctggttttttgagaaccgaaataaatgagatattttcggttctgcactccaaagaaccgaaagaaccgaaaa

SEQ ID NO: 67855 - DNA, 408 bp, Zea Mays
ctgctagggttaatccactggctctcctatatagaagcgcggcgagagctcgcaccgccgccgccgccgctgtcgcatcacaggcctctcttccggtttccccccaaacccgtccgagaggcagtcatcccgccgcgatgagggccaagtggaagaagaagcggatgaggcggcttaagaggaagcgccgaaagatgaggcagaggtccaagtaggcagattcatggagtgtccccgcctggagtctctctgcgttcggttgttgtttactgagtaattttagtttttttactaagacagtctgttatggatcagaaattccttgcgtttgtccgtggtctagatattgcatcaagtgttctgcactttattctttagttgttagttgatgcgagtgcttaaaaaaaa

SEQ ID NO: 67856 - DNA, 603 bp, Zea Mays
cttcattctaattcgatccatgaaactccacaatgacatggaagaagaagcggatgaggcggcttaagaggaagcgccgaaagatgaggcagaggtccaagtaggcagattcatggagtgtccccgcctggagtctctctgcgttcggttgttgtttactgagtaattttagtttttttactaagacagtctgttatggatcagaaattccttgcgtttgtccgtggtctagatattgcatcaagtgttctgcactttattctttagttgttagttgatgcgagtgcttgtcaatggttgtggacttcgaaattgctatatgtaggtagggcctgagcctgacgtgcatatatagggacactcgttaccaaagtcgtttagaaaaccgtttgttgctaccaaatcgttagcagacaatggtaagctgacctgacatgcatatatgttcgtggcttgtggtcggaattaggcaactatgaatcagtttttggcagctaaatgtttcccaacttaggccggagtactttaaattttattcctttctagtttcttctataaaaaaggtccagctccatgtgctttgttgtaacttaaaaaatgaaa

SEQ ID NO: 67857 - DNA, 774 bp, Zea Mays
gccggcgctcgcgaacagctcctccggcagctgcacgcggggcacgctggacgagaagatggaccaggcgaactggacggccatgccgagcgcgagcatgaagcagaggatggtgaggaagtggtagtccagccactcgaagaagacccacaccagcgtcgccacgcccagcacgctggacgagatcttcttgttccgccacagaagcacgtcggcggctgcgtgcaggtgcagcagagcagcccaccgtcagcaggaggacgaaacttgcagccattagatgaaggagcggaagaggccaagaagacccaggagggccgaggcccgagggcgtgcagtgcaaattgcaatgcgcggtacgtacatttgccgccgcccagcacgtggtgtaccgacttcttcctgctctcgccgccgccgaacagcttcttggcctgctcggagatggaggagccgtcgccgtcgtcgaaccgcacggacttctgcctcgggaggttctccgcgatggtctccatgatgttgcccatcaggtccgccgaacagcagcggttcgagttcggcgcggtgagctcaagtcggggcgccctggccttagcgggtgggcacggcacgcgacggaccaggtgccggaggatgaggactctcttgctcgtcaatggcgccggagaggcagcagagcagcccggtcgggttgattggacggatggggaaagaggagaggaaagagggaacaatgtagttcgtcgaatcgacgggatcagctggacaggtggg

SEQ ID NO: 67858 - DNA, 3054 bp, Zea Mays
ctccatcaccataggcaatcctgtaagcagccccagctggagaagagaccatatgattatgctgacaatagtgttaatgatcagaaataagattcaacttcactgtataattatatgataatcatttgtatgcaaatattgtgggcctgcaacagatcttgtgataatgtaattaaatggcacacaaagcttactgctcaatgggattgatggggcaggtattttagaataatgaaagttctgaccacagtgcacgttttgtcctctttttgtaggtaggaacaatttgacaacgacacatcattatctggatattgtgttcttgctgaaagatcctgttcaacattcagactgtcttcgatatacttgcaacccttaacaggtttgatttgctttcttcatgcctgaccttcactaaaatcacaaaaactttttgacttaactccatttttactttttatgctttagggtcctctattttttgaatctactaaagtttagtggtcctctttctataataacttttggtcttcccatcagtcagatatatggtgtaattgtaattaaaatatgacataggttaattaacttgtgtgtatttggggtattttttggggtataaaattttataagcatgattcctgtatatagatgttgatgctaaacttgagatacatgaaagtgggatttatggtcctctctttttgaatctactgaagtttagatgtcatctttctataataacttttggccttcccatcagtgagtttagtaagatatatggtaaattttgtaattaaaatatgacatgagttcattccattgtgtgtattgggggtatttttgggggtataaaattctatatgcatgcttcctgtatatataggttgatgctaaacttgagataacatgatagtgggaaggcttagctggtagtatactttgagtacggtgcgcttgcatccgttcccaactctatttctcacttgcttctctttctgcttctttagcgggtctaacattaaacacaaagacaaaaacaaaaaccctttattgctcagcaaatttatcgtgcattagtgtttaaacaaatataatcatgtactaaaccttgtttcgcttgccccctctactcaattataaaaataaaaatttaaacattgttaaaggatacaaattttcgatggaacccgtcgtattgaatcgtgaaagagctgcagcggaccgcccaaaaaggatgcctatgtaagttatattaaatggttacacacgctttgtctatcaaacttatgacccttatatttaatcgaatggttaatatagcttcaggttgttcgatgactatcgtgatgaagatttttatgggctaccacggaagtacaatattgtcgctcgggtagaagttaaatttcctattgatccacgttatcgagacaaccaacatttcattttgtctgacatcaatgtaagacaacattttcataattttcatttcaaaaattatatatgaccttaataccatcgcctctttaactattaaagtaatattagggatccaagatcgaggccatgacaagttcatatgagacagtcaaacacttcgatagtttgtattaatacctaaatacaaatattagggatgagctatatgacagttttaccaggtatattattactattatgacatatatgcacatctacaatcagtgttacatataatgctaagtaaattgtttcttatttgcaggatgacatgtcacactttaggaaaaaattggctgctatattactatcttcatacatgaacaaaagaaggggatatccgatatacaaatatgataaagaagttcatattggaagcccctctgatgttgagatattagatagcccaacaaatcataagaagaggaaactactccatgtgcttgataatagcgaggtattgatggaagatgaggatggccccattactcaagcagacttacaaaggtggtttgttgatgaatgggataaaagaactcctacaaaagtctcagcggatgggtgcacagacgactttttaatgagtggtctctccataaaagacatgccagttactaaagccgatttaatagatgtgctatgtgattacattatggcaatccaagacgataggacattagagatgatatgggtgcgaagtttcaatccttttaagatagaaatatctgtcaaagacctgcagaacatattaagtataaatctagatatgactctaaaatgttttgacatggctgttcgattgcttgccaataaagagtcacgtagaccgaaaggtgaaatcataaagaatagaaagcattatatggacatgcgcttcttggtttttatgccatggaaatttaacggttgctacgccctttttgtaatagatcatggtaaaaacacgtcacttttattgactttgcacctattcaagattggtgtaagcacatgccatacaagaggttcgcagaagcgattatcatcgcttcaaagaaatataagattgcctatagcaagaaacgtactggatggacagaggatatttttaagtggcaacatacaattcaacctggtgttccaattgacttaaaagagtattttctctgtaccatcttcttagtaatttcatttttttctatgatttccattgtatgtaacttagttggcaaaacattattttataggcttaacaccagctaccttatcctacaagctatggccatgtgagggaatgatagtccaatgaaatttgttaggatgagtggagtacgttcctttcatattcaaacatatattccaattaaataataaaaattgatgttttgttctcttatatgtcttatgtgtaggatgcaaagattcttcgaaggaactttattattgaactgttaagttacgaggaaaattcgtgcagatatgctatcccggcaaatatacaacagagagttaacaatattattaaaaaagattagattagtgtacagggtgtcaacatatttacttatgattaagcattatatatttactctt

SEQ ID NO: 67859 - DNA, 1961 bp, Zea Mays
ctagagattcgtctacattatgagatcccaaatacatcggagttatttgttcacagcaagggagaactgcacgagcagggaagaaaggcagtgcaattctaatatacacgtatgaacagactagagctgtaagggtcatcgagcaagatataggatgcaggttcacagagcttccgaagatgccagtttcagacgaggctgcagacatgtttaatgtcatgagagatactcgctctagatcagttggaagcagaagaacaggtggaccttttagccgtgaaggttatggtgactttgaagaccatcgttccagaggcttcggtgattttgagagatttggtggttcctctgaccgcggcggtggattccgtgactcaggttcaaggtaccacggtggatctggaggtttcagacgatcttccagtgactttggcaggcctagcttcagtcgttctgatagatttggcgactttggagacagtgatttcagcagacgtggtaacgctgactttgggcgttcccggagctctgatgattcaggctcctcacgttatccaagaggctatggtggttctggcacgtcagattccggcaacttcggtggcttcaagggttccaagtgatgaatcggatagggttttcttgttaaatcttaaatcctcccggggagcctgggaggccagatatttttaccaacgaccacaagcgcagatgggctagcccaaaatcgtccagggcccaagaaaacgaacaaaagtgcacgggcttcctctttcctgccaggagaggcacccacgacggcgacgcattggattggcttgggacagaacgagcgacggcgaggagacggcgataagatttgctacacctcggactgtagctgggagactgcacgaacggcggcgtccacgagtcacgaggagcccagaggcttcttcacagcagcagcggcaggtccgctgatgccagactccccccagctccaccaaccgcctccccctcccgcgccgccgccggccagcgcaacaccagccgcgccagcggcagcaaatgcgcaacccaagctgactgccgtgaagctgaggatgatcatcaagggcgtgctcgggcggtaccagcgctggaaccccgtgcacccgacggccggcaccttctggggtgtggggctcggcgtcggctgtggcgtcggctggggccccggcttcgggcctgaggtgattgggtacgtaggcgccgggtgcggcgtggggttcagcgttgggttcacgctcgccggcgtcggcatcggcctgccgcagcacagcctcatcaggaaccacgaccacggtggttttgcgagcagcgtccctgttgattcagcgagattctacgccctaaccatcatcagaggtctggtatgggacgccatcagctacgtgggcaatgcagcggctatgaggaaagaatctcgacagaagcttccgaggttccaggacagccctcaggttccaggaggagttgatctgccgaagctggggaagggcgtgtcgagtagcatccggtccacggtagaatgcatcagggccttcaaagatcagcgttggcctccttaaaagactcgttggaaatcaaagctggtttcaagttgaatggtaccgccatgggaacttaaacatggtgatatacaagtttttgttttttgttttgttttgttttgatatggaaggggaaattagttgttctagctggaaatgttagtctgcattctagatattatttttgttatgtggatgcatctgtaaatatgactgctgctcttttgctccctccttattcaagcactgtgaaacagggattgtagcacgaaatagaatagaattcccctcttaaattaaccatgtagccctacatctgtgctggtctgtggatgccatggaagtttgaaagcgtataattgaggcatgccttcggtgcagccgtct

SEQ ID NO: 67860 - DNA, 2400 bp, Zea Mays
ctagagattcgtctacattatgagatcccaaatacatcggagttatttgttcacagcaagggagaactgcacgagcagggaagaaaggcagtgcaattctaatatacacgtatgaacagactagagctgtaagggtcatcgagcaagatataggatgcaggttcacagagcttccgaagatgccagtttcagacgaggctgcagacatgtttaatgtcatgagagatactcgctctagatcagttggaagcagaagaacaggtggaccttttagccgtgaaggttatggtgactttgaagaccatcgttccagaggcttcggtgattttgagagatttggtggttcctctgaccgcggcggtggattccgtgactcaggttcaaggtaccacggtggatctggaggtttcagacgatcttccagtgactttggcaggcctagcttcagtcgttctgatagatttggcgactttggagacagtgatttcagcagacgtggtaacgctgactttgggcgttcccggagctctgatgattcaggctcctcacgttatccaagaggctatggtggttctggcacgtcagattccggcaacttcggtggcttcaagggttccaagtgatgaatcggatagggttttcttgttaaatcttaaatcctcccggggagcctgggaggccagatatttttaccaacgaccacaagcgcagatgggctagcccaaaatcgtccagggcccaagaaaacgaacaaaagtgcacgggcttcctctttcctgccaggagaggcacccacgacggcgacgcattggattggcttgggacagaacgagcgacggcgaggagacggcgataagatttgctacacctcggactgtagctgggagactgcacgaacggcggcgtccacgagtcacgaggagcccagaggcttcttcacagcagcagcggcaggtccgctgatgccagactccccccagctccaccaaccgcctccccctcccgcgccgccgccggccagcgcaacaccagccgcgccagcggcagcaaatgcgcaacccaagctgactgccgtgaagctgaggatgatcatcaagggcgtgctcgggcggtaccagcgctggaaccccgtgcacccgacggccggcaccttctggggtgtggggctcggcgtcggctgtggcgtcggctggggccccggcttcgggcctgaggtgattgggtacgtaggcgccgggtgcggcgtggggttcagcgttgggttcacgctcgccggcgtcggcatcggcctgccgcagcacagcctcatcaggaaccacgaccacggtggtaattagtcatgctctgttattgcgtccccttcaataaataatccatgtgcaccacggttggtattggtgtactaattcttggatccagtgtgagtttcagttagtgtagtgcagtagtgcttttattatctctacctgattgttgtgagaaatagaatggaaatatttgggcaagtagcaatcaattaattggtgatttggtggaaacaaatgtctgtagttggatattcagtcaaccatgcttcacctgtccttgccagtgttagttggtgcacatgatttagcaacctgacagtatgctatcattactgatgcacaattagcaggcctcaccgcctcagtgcaggcccgattatttgttgctattcccgacctttgtgtacaagcatctgacacatgaatgacggacagatctgccttctgaatttcacctacaggttttgcgagcagcgtccctgttgattcagcgagattctacgccctaaccatcatcagaggtctggtatgggacgccatcagctacgtgggcaatgcagcggctatgaggaaagaatctcgacagaagcttccgaggttccaggacagccctcaggttccaggaggagttgatctgccgaagctggggaagggcgtgtcgagtagcatccggtccacggtagaatgcatcagggccttcaaagatcagcgttggcctccttaaaagactcgttggaaatcaaagctggtttcaagttgaatggtaccgccatgggaacttaaacatggtgatatacaagtttttgttttttgttttgttttgttttgatatggaaggggaaattagttgttctagctggaaatgttagtctgcattctagatattatttttgttatgtggatgcatctgtaaatatgactgctgctcttttgctccctccttattcaagcactgtgaaacagggattgtagcacgaaatagaatagaattcccctcttaaattaaccatgtagccctacatctgtgctggtctgtggatgccatggaagtttgaaagcgtataattgaggcatgccttcggtgcagccgtct

SEQ ID NO: 67861 - DNA, 1854 bp, Zea Mays
ctagagattcgtctacattatgagatcccaaatacatcggagttatttgttcacagcaagggagaactgcacgagcagggaagaaaggcagtgcaattctaatatacacgtatgaacagactagagctgtaagggtcatcgagcaagatataggatgcaggttcacagagcttccgaagatgccagtttcagacgaggctgcagacatgtttaatgtcatgagagatactcgctctagatcagttggaagcagaagaacaggtggaccttttagccgtgaaggttatggtgactttgaagaccatcgttccagaggcttcggtgattttgagagatttggtggttcctctgaccgcggcggtggattccgtgactcaggttcaaggtaccacggtggatctggaggtttcagacgatcttccagtgactttggcaggcctagcttcagtcgttctgatagatttggcgactttggagacagtgatttcagcagacgtggtaacgctgactttgggcgttcccggagctctgatgattcaggctcctcacgttatccaagaggctatggtggttctggcacgtcagattccggcaacttcggtggcttcaagggttccaagtgatgaatcggatagggttttcttgttaaatcttaaatcctcccggggagcctgggaggccagatatttttaccaacgaccacaagcgcagatgggctagcccaaaatcgtccagggcccaagaaaacgaacaaaagtgcacgggcttcctctttcctgccaggagaggcacccacgacggcgacgcattggattggcttgggacagaacgagcgacggcgaggagacggcgataagatttgctacacctcggactgtagctgggagactgcacgaacggcggcgtccacgagtcacgaggagcccagaggcttcttcacagcagcagcggcaggtccgctgatgccagactccccccagctccaccaaccgcctccccctcccgcgccgccgccggccagcgcaacaccagccgcgccagcggcagcaaatgcgcaacccaagctgactgccgtgaagctgaggatgatcatcaagggcgtgctcgggcggtaccagcgctggaaccccgtgcacccgacggccggcaccttctggggtgtggggctcggcgtcggctgtggcgtcggctggggccccggcttcgggcctgaggtgattgggttttgcgagcagcgtccctgttgattcagcgagattctacgccctaaccatcatcagaggtctggtatgggacgccatcagctacgtgggcaatgcagcggctatgaggaaagaatctcgacagaagcttccgaggttccaggacagccctcaggttccaggaggagttgatctgccgaagctggggaagggcgtgtcgagtagcatccggtccacggtagaatgcatcagggccttcaaagatcagcgttggcctccttaaaagactcgttggaaatcaaagctggtttcaagttgaatggtaccgccatgggaacttaaacatggtgatatacaagtttttgttttttgttttgttttgttttgatatggaaggggaaattagttgttctagctggaaatgttagtctgcattctagatattatttttgttatgtggatgcatctgtaaatatgactgctgctcttttgctccctccttattcaagcactgtgaaacagggattgtagcacgaaatagaatagaattcccctcttaaattaaccatgtagccctacatctgtgctggtctgtggatgccatggaagtttgaaagcgtataattgaggcatgccttcggtgcagccgtct

SEQ ID NO: 67862 - DNA, 1992 bp, Zea Mays
ctagagattcgtctacattatgagatcccaaatacatcggagttatttgttcacagcaagggagaactgcacgagcagggaagaaaggcagtgcaattctaatatacacgtatgaacagactagagctgtaagggtcatcgagcaagatataggatgcaggttcacagagcttccgaagatgccagtttcagacgaggctgcagacatgtttaatgtcatgagagatactcgctctagatcagttggaagcagaagaacaggtggaccttttagccgtgaaggttatggtgactttgaagaccatcgttccagaggcttcggtgattttgagagatttggtggttcctctgaccgcggcggtggattccgtgactcaggttcaaggtaccacggtggatctggaggtttcagacgatcttccagtgactttggcaggcctagcttcagtcgttctgatagatttggcgactttggagacagtgatttcagcagacgtggtaacgctgactttgggcgttcccggagctctgatgattcaggctcctcacgttatccaagaggctatggtggttctggcacgtcagattccggcaacttcggtggcttcaagggttccaagtgatgaatcggatagggttttcttgtacagttctgaaccttttctaacacctgttgttaaatcttaaatcctcccggggagcctgggaggccagatatttttaccaacgaccacaagcgcagatgggctagcccaaaatcgtccagggcccaagaaaacgaacaaaagtgcacgggcttcctctttcctgccaggagaggcacccacgacggcgacgcattggattggcttgggacagaacgagcgacggcgaggagacggcgataagatttgctacacctcggactgtagctgggagactgcacgaacggcggcgtccacgagtcacgaggagcccagaggcttcttcacagcagcagcggcaggtccgctgatgccagactccccccagctccaccaaccgcctccccctcccgcgccgccgccggccagcgcaacaccagccgcgccagcggcagcaaatgcgcaacccaagctgactgccgtgaagctgaggatgatcatcaagggcgtgctcgggcggtaccagcgctggaaccccgtgcacccgacggccggcaccttctggggtgtggggctcggcgtcggctgtggcgtcggctggggccccggcttcgggcctgaggtgattgggtacgtaggcgccgggtgcggcgtggggttcagcgttgggttcacgctcgccggcgtcggcatcggcctgccgcagcacagcctcatcaggaaccacgaccacggtggttttgcgagcagcgtccctgttgattcagcgagattctacgccctaaccatcatcagaggtctggtatgggacgccatcagctacgtgggcaatgcagcggctatgaggaaagaatctcgacagaagcttccgaggttccaggacagccctcaggttccaggaggagttgatctgccgaagctggggaagggcgtgtcgagtagcatccggtccacggtagaatgcatcagggccttcaaagatcagcgttggcctccttaaaagactcgttggaaatcaaagctggtttcaagttgaatggtaccgccatgggaacttaaacatggtgatatacaagtttttgttttttgttttgttttgttttgatatggaaggggaaattagttgttctagctggaaatgttagtctgcattctagatattatttttgttatgtggatgcatctgtaaatatgactgctgctcttttgctccctccttattcaagcactgtgaaacagggattgtagcacgaaatagaatagaattcccctcttaaattaaccatgtagccctacatctgtgctggtctgtggatgccatggaagtttgaaagcgtataattgaggcatgccttcggtgcagccgtct

SEQ ID NO: 67863 - DNA, 1966 bp, Zea Mays
ctagagattcgtctacattatgagatcccaaatacatcggagttatttgttcacagcaagggagaactgcacgagcagggaagaaaggcagtgcaattctaatatacacgtatgaacagactagagctgtaagggtcatcgagcaagatataggatgcaggttcacagagcttccgaagatgccagtttcagacgaggctgcagacatgtttaatgtcatgagagatactcgctctagatcagttggaagcagaagaacaggtggaccttttagccgtgaaggttatggtgactttgaagaccatcgttccagaggcttcggtgattttgagagatttggtggttcctctgaccgcggcggtggattccgtgactcaggttcaaggtaccacggtggatctggaggtttcagacgatcttccagtgactttggcaggcctagcttcagtcgttctgatagatttggcgactttggagacagtgatttcagcagacgtggtaacgctgactttgggcgttcccggagctctgatgattcaggctcctcacgttatccaagaggctatggtggttctggcacgtcagattccggcaacttcggtggcttcaagggttccaagtgatgaatcggatagggttttcttgtacagttaaatcttaaatcctcccggggagcctgggaggccagatatttttaccaacgaccacaagcgcagatgggctagcccaaaatcgtccagggcccaagaaaacgaacaaaagtgcacgggcttcctctttcctgccaggagaggcacccacgacggcgacgcattggattggcttgggacagaacgagcgacggcgaggagacggcgataagatttgctacacctcggactgtagctgggagactgcacgaacggcggcgtccacgagtcacgaggagcccagaggcttcttcacagcagcagcggcaggtccgctgatgccagactccccccagctccaccaaccgcctccccctcccgcgccgccgccggccagcgcaacaccagccgcgccagcggcagcaaatgcgcaacccaagctgactgccgtgaagctgaggatgatcatcaagggcgtgctcgggcggtaccagcgctggaaccccgtgcacccgacggccggcaccttctggggtgtggggctcggcgtcggctgtggcgtcggctggggccccggcttcgggcctgaggtgattgggtacgtaggcgccgggtgcggcgtggggttcagcgttgggttcacgctcgccggcgtcggcatcggcctgccgcagcacagcctcatcaggaaccacgaccacggtggttttgcgagcagcgtccctgttgattcagcgagattctacgccctaaccatcatcagaggtctggtatgggacgccatcagctacgtgggcaatgcagcggctatgaggaaagaatctcgacagaagcttccgaggttccaggacagccctcaggttccaggaggagttgatctgccgaagctggggaagggcgtgtcgagtagcatccggtccacggtagaatgcatcagggccttcaaagatcagcgttggcctccttaaaagactcgttggaaatcaaagctggtttcaagttgaatggtaccgccatgggaacttaaacatggtgatatacaagtttttgttttttgttttgttttgttttgatatggaaggggaaattagttgttctagctggaaatgttagtctgcattctagatattatttttgttatgtggatgcatctgtaaatatgactgctgctcttttgctccctccttattcaagcactgtgaaacagggattgtagcacgaaatagaatagaattcccctcttaaattaaccatgtagccctacatctgtgctggtctgtggatgccatggaagtttgaaagcgtataattgaggcatgccttcggtgcagccgtct

SEQ ID NO: 67864 - DNA, 2584 bp, Zea Mays
ctagagattcgtctacattatgagatcccaaatacatcggagttatttgttcacagcaagggagaactgcacgagcagggaagaaaggcagtgcaattctaatatacacgtatgaacagactagagctgtaagggtcatcgagcaagatataggatgcaggttcacagagcttccgaagatgccagtttcagacgaggctgcagacatgtttaatgtcatgagagatactcgctctagatcagttggaagcagaagaacaggtggaccttttagccgtgaaggttatggtgactttgaagaccatcgttccagaggcttcggtgattttgagagatttggtggttcctctgaccgcggcggtggattccgtgactcaggttcaaggtaccacggtggatctggaggtttcagacgatcttccagtgactttggcaggcctagcttcagtcgttctgatagatttggcgactttggagacagtgatttcagcagacgtggtaacgctgactttgggcgttcccggagctctgatgattcaggctcctcacgttatccaagaggctatggtggttctggcacgtcagattccggcaacttcggtggcttcaagggttccaagtgatgaatcggatagggttttcttgtacagttctgaaccttttctaacacctgttgtatgttccttccctgaccaaaccagtagcacttgattcacccgttgtttcacgagtagtttggtgttgtaggcctgtagggttctttcagaacttctgcacttctgatacaaggttgtttcagaacctgcatcactgtatgctctgattctgttctctttaagggttgatttggtgacaaggagatcctgagaggattggaggggattgagggggaaataaactaatttcctcctcaattccctccgatcctcccagaatcccgggtcaccaaatcagccctaataatcctacgaaaggatggcttttggtttctgttcatgtacatggaaatatttgcaatttcgccactcccaactgttgacactttgctattttgctatctctgtctatgatttgtgggtccatgtctatgatttatggaccggtgtcaaattagcaaagaccactgccgatggtgtattgcttgtagatctgttccatgatctcaactgtcacagaacacagaacttctgcgatatatgattgattttcctaaaagaatgaatttgttctccatctattcatctaacatggaaatgttctgtttcaggttaaatcttaaatcctcccggggagcctgggaggccagatatttttaccaacgaccacaagcgcagatgggctagcccaaaatcgtccagggcccaagaaaacgaacaaaagtgcacgggcttcctctttcctgccaggagaggcacccacgacggcgacgcattggattggcttgggacagaacgagcgacggcgaggagacggcgataagatttgctacacctcggactgtagctgggagactgcacgaacggcggcgtccacgagtcacgaggagcccagaggcttcttcacagcagcagcggcaggtccgctgatgccagactccccccagctccaccaaccgcctccccctcccgcgccgccgccggccagcgcaacaccagccgcgccagcggcagcaaatgcgcaacccaagctgactgccgtgaagctgaggatgatcatcaagggcgtgctcgggcggtaccagcgctggaaccccgtgcacccgacggccggcaccttctggggtgtggggctcggcgtcggctgtggcgtcggctggggccccggcttcgggcctgaggtgattgggtacgtaggcgccgggtgcggcgtggggttcagcgttgggttcacgctcgccggcgtcggcatcggcctgccgcagcacagcctcatcaggaaccacgaccacggtggttttgcgagcagcgtccctgttgattcagcgagattctacgccctaaccatcatcagaggtctggtatgggacgccatcagctacgtgggcaatgcagcggctatgaggaaagaatctcgacagaagcttccgaggttccaggacagccctcaggttccaggaggagttgatctgccgaagctggggaagggcgtgtcgagtagcatccggtccacggtagaatgcatcagggccttcaaagatcagcgttggcctccttaaaagactcgttggaaatcaaagctggtttcaagttgaatggtaccgccatgggaacttaaacatggtgatatacaagtttttgttttttgttttgttttgttttgatatggaaggggaaattagttgttctagctggaaatgttagtctgcattctagatattatttttgttatgtggatgcatctgtaaatatgactgctgctcttttgctccctccttattcaagcactgtgaaacagggattgtagcacgaaatagaatagaattcccctcttaaattaaccatgtagccctacatctgtgctggtctgtggatgccatggaagtttgaaagcgtataattgaggcatgccttcggtgcagccgtct

SEQ ID NO: 67865 - DNA, 3023 bp, Zea Mays
ctagagattcgtctacattatgagatcccaaatacatcggagttatttgttcacagcaagggagaactgcacgagcagggaagaaaggcagtgcaattctaatatacacgtatgaacagactagagctgtaagggtcatcgagcaagatataggatgcaggttcacagagcttccgaagatgccagtttcagacgaggctgcagacatgtttaatgtcatgagagatactcgctctagatcagttggaagcagaagaacaggtggaccttttagccgtgaaggttatggtgactttgaagaccatcgttccagaggcttcggtgattttgagagatttggtggttcctctgaccgcggcggtggattccgtgactcaggttcaaggtaccacggtggatctggaggtttcagacgatcttccagtgactttggcaggcctagcttcagtcgttctgatagatttggcgactttggagacagtgatttcagcagacgtggtaacgctgactttgggcgttcccggagctctgatgattcaggctcctcacgttatccaagaggctatggtggttctggcacgtcagattccggcaacttcggtggcttcaagggttccaagtgatgaatcggatagggttttcttgtacagttctgaaccttttctaacacctgttgtatgttccttccctgaccaaaccagtagcacttgattcacccgttgtttcacgagtagtttggtgttgtaggcctgtagggttctttcagaacttctgcacttctgatacaaggttgtttcagaacctgcatcactgtatgctctgattctgttctctttaagggttgatttggtgacaaggagatcctgagaggattggaggggattgagggggaaataaactaatttcctcctcaattccctccgatcctcccagaatcccgggtcaccaaatcagccctaataatcctacgaaaggatggcttttggtttctgttcatgtacatggaaatatttgcaatttcgccactcccaactgttgacactttgctattttgctatctctgtctatgatttgtgggtccatgtctatgatttatggaccggtgtcaaattagcaaagaccactgccgatggtgtattgcttgtagatctgttccatgatctcaactgtcacagaacacagaacttctgcgatatatgattgattttcctaaaagaatgaatttgttctccatctattcatctaacatggaaatgttctgtttcaggttaaatcttaaatcctcccggggagcctgggaggccagatatttttaccaacgaccacaagcgcagatgggctagcccaaaatcgtccagggcccaagaaaacgaacaaaagtgcacgggcttcctctttcctgccaggagaggcacccacgacggcgacgcattggattggcttgggacagaacgagcgacggcgaggagacggcgataagatttgctacacctcggactgtagctgggagactgcacgaacggcggcgtccacgagtcacgaggagcccagaggcttcttcacagcagcagcggcaggtccgctgatgccagactccccccagctccaccaaccgcctccccctcccgcgccgccgccggccagcgcaacaccagccgcgccagcggcagcaaatgcgcaacccaagctgactgccgtgaagctgaggatgatcatcaagggcgtgctcgggcggtaccagcgctggaaccccgtgcacccgacggccggcaccttctggggtgtggggctcggcgtcggctgtggcgtcggctggggccccggcttcgggcctgaggtgattgggtacgtaggcgccgggtgcggcgtggggttcagcgttgggttcacgctcgccggcgtcggcatcggcctgccgcagcacagcctcatcaggaaccacgaccacggtggtaattagtcatgctctgttattgcgtccccttcaataaataatccatgtgcaccacggttggtattggtgtactaattcttggatccagtgtgagtttcagttagtgtagtgcagtagtgcttttattatctctacctgattgttgtgagaaatagaatggaaatatttgggcaagtagcaatcaattaattggtgatttggtggaaacaaatgtctgtagttggatattcagtcaaccatgcttcacctgtccttgccagtgttagttggtgcacatgatttagcaacctgacagtatgctatcattactgatgcacaattagcaggcctcaccgcctcagtgcaggcccgattatttgttgctattcccgacctttgtgtacaagcatctgacacatgaatgacggacagatctgccttctgaatttcacctacaggttttgcgagcagcgtccctgttgattcagcgagattctacgccctaaccatcatcagaggtctggtatgggacgccatcagctacgtgggcaatgcagcggctatgaggaaagaatctcgacagaagcttccgaggttccaggacagccctcaggttccaggaggagttgatctgccgaagctggggaagggcgtgtcgagtagcatccggtccacggtagaatgcatcagggccttcaaagatcagcgttggcctccttaaaagactcgttggaaatcaaagctggtttcaagttgaatggtaccgccatgggaacttaaacatggtgatatacaagtttttgttttttgttttgttttgttttgatatggaaggggaaattagttgttctagctggaaatgttagtctgcattctagatattatttttgttatgtggatgcatctgtaaatatgactgctgctcttttgctccctccttattcaagcactgtgaaacagggattgtagcacgaaatagaatagaattcccctcttaaattaaccatgtagccctacatctgtgctggtctgtggatgccatggaagtttgaaagcgtataattgaggcatgccttcggtgcagccgtct

SEQ ID NO: 67866 - DNA, 1702 bp, Zea Mays
ctagagattcgtctacattatgagatcccaaatacatcggagttatttgttcacagcaagggagaactgcacgagcagggaagaaaggcagtgcaattctaatatacacgtatgaacagactagagctgtaagggtcatcgagcaagatataggatgcaggttcacagagcttccgaagatgccagtttcagacgaggctgcagacatgtttaatgtcatgagagatactcgctctagatcagttggaagcagaagaacaggtggaccttttagccgtgaaggttatggtgactttgaagaccatcgttccagaggcttcggtgattttgagagatttggtggttcctctgaccgcggcggtggattccgtgactcaggttcaaggttaaatcttaaatcctcccggggagcctgggaggccagatatttttaccaacgaccacaagcgcagatgggctagcccaaaatcgtccagggcccaagaaaacgaacaaaagtgcacgggcttcctctttcctgccaggagaggcacccacgacggcgacgcattggattggcttgggacagaacgagcgacggcgaggagacggcgataagatttgctacacctcggactgtagctgggagactgcacgaacggcggcgtccacgagtcacgaggagcccagaggcttcttcacagcagcagcggcaggtccgctgatgccagactccccccagctccaccaaccgcctccccctcccgcgccgccgccggccagcgcaacaccagccgcgccagcggcagcaaatgcgcaacccaagctgactgccgtgaagctgaggatgatcatcaagggcgtgctcgggcggtaccagcgctggaaccccgtgcacccgacggccggcaccttctggggtgtggggctcggcgtcggctgtggcgtcggctggggccccggcttcgggcctgaggtgattgggtacgtaggcgccgggtgcggcgtggggttcagcgttgggttcacgctcgccggcgtcggcatcggcctgccgcagcacagcctcatcaggaaccacgaccacggtggttttgcgagcagcgtccctgttgattcagcgagattctacgccctaaccatcatcagaggtctggtatgggacgccatcagctacgtgggcaatgcagcggctatgaggaaagaatctcgacagaagcttccgaggttccaggacagccctcaggttccaggaggagttgatctgccgaagctggggaagggcgtgtcgagtagcatccggtccacggtagaatgcatcagggccttcaaagatcagcgttggcctccttaaaagactcgttggaaatcaaagctggtttcaagttgaatggtaccgccatgggaacttaaacatggtgatatacaagtttttgttttttgttttgttttgttttgatatggaaggggaaattagttgttctagctggaaatgttagtctgcattctagatattatttttgttatgtggatgcatctgtaaatatgactgctgctcttttgctccctccttattcaagcactgtgaaacagggattgtagcacgaaatagaatagaattcccctcttaaattaaccatgtagccctacatctgtgctggtctgtggatgccatggaagtttgaaagcgtataattgaggcatgccttcggtgcagccgtct

SEQ ID NO: 67867 - DNA, 662 bp, Zea Mays
tgctgcctccctcgtgagggctgttcttgagccagcaatgcaaggaaaagacatgattggccgtgctcgaacagggactgggaagaccctggcttttggtattcctatcatggacaagatcctaagctacaacgagaagactggaaatggcaggaatcctttagccataatcttggcaccaacaagagaacttgctcggcaggttgagaaggagtttagagaatctgctcccttggacaccctctgtgtatatggaggtgttcctatcaatcagcaaatgagagctcttaactatggtgttgacatagtggtcggaacaccaggtcgagttattgaccttctgagaaggggtgttttaaacctttcacagatccagtttgtggtcctagatgaagctgatcaaatgctggctgtgggtttcgatgaagatgttgaggtgatcatggagcaattgccacagaatcgtcaaagcatgctgttctctgcaacaatgcctagttggataagaaaaatttcgaacaagtacttaaaggatccagttataattgacctttcctgcattgaatagatcttcctgggtctagaaacattgctgaagcatctgatgaacaccaacactttcatttctaaaaagtataccaaatcagcacctggacattatc

SEQ ID NO: 67868 - DNA, 1097 bp, Zea Mays
tccaggtctcgccggggggcccgacgtcgagggctcgaggccttagttccaccacttgctgccaccgacgcgccatcgccgcgatgatctccctgctccgacgcgccctcgccgcatccgcctcgtctccggcggccacgtaccggagactcctcgtcgtcgcgccactctctcgcgcggcggcccctccaggcccatgccaggcgcccgcggcagggtcgcaggagccgccgaggcgggcgttccactgttctacgacccccctggggtttaggtccactccggcgtcgtgggccggtccctgtccgggggagggcgagggcgagggcgtggatacgggggctgagaaggggctggagatcgcgaggctggggacctcgcctcggatcgtggagaagctcgccgcgcggggcatcaccaggctcttccccatccagagggctgttcttgagccagcaatgcaaggaaaagacatgattggccgtgctcgaacagggactgggaagaccctggcttttggtattcctatcatggacaagatcctaagctacaacgagaagactggtacgatgcatgcagaaatggcaggaatcctttagccataatcttggcaccaacaagagaacttgctcggcaggttgagaaggagtttagagaatctgctcccttggacaccctctgtgtatatggaggtgttcctatcaatcagcaaatgagagctcttaactatggtgttgacatagtggtcggaacaccaggtcgagttattgaccttctgagaaggggtgttttaaacctttcacagatccagtttgtggtcctagatgaagctgatcaaatgctggctgtgggtttcgatgaagatgttgaggtgatcatggagcaattgccacagaatcgtcaaagcatgctgttctctgcaacaatgcctagttggataagaaaaatttcgaacaagtacttaaaggatccagttataattgacctttcctgcattgaatagatcttcctgggtctagaaacattgctgaagcatctgatgaacaccaacactttcatttctaaaaagtataccaaatcagcacctggacattatc

SEQ ID NO: 67869 - DNA, 1115 bp, Zea Mays
gaaaaaaaaaatcgcacaccctctcccttccttccaggtctcgccggggggcccgacgtcgagggctcgaggccttagttccaccacttgctgccaccgacgcgccatcgccgcgatgatctccctgctccgacgcgccctcgccgcatccgcctcgtctccggcggccacgtaccggagactcctcgtcgtcgcgccactctctcgcgcggcggcccctccaggcccatgccaggcgcccgcggcagggtcgcaggagccgccgaggcgggcgttccactgttctacgacccccctggggtttaggtccactccggcgtcgtgggccggtccctgtccgggggagggcgagggcgagggcgtggatacgggggctgagaaggggctggagatcgcgaggctggggacctcgcctcggatcgtggagaagctcgccgcgcggggcatcaccaggctcttccccatccagagggctgttcttgagccagcaatgcaaggaaaagacatgattggccgtgctcgaacagggactgggaagaccctggcttttggtattcctatcatggacaagatcctaagctacaacgagaagactggaaatggcaggaatcctttagccataatcttggcaccaacaagagaacttgctcggcaggttgagaaggagtttagagaatctgctcccttggacaccctctgtgtatatggaggtgttcctatcaatcagcaaatgagagctcttaactatggtgttgacatagtggtcggaacaccaggtcgagttattgaccttctgagaaggggtgttttaaacctttcacagatccagtttgtggtcctagatgaagctgatcaaatgctggctgtgggtttcgatgaagatgttgaggtgatcatggagcaattgccacagaatcgtcaaagcatgctgttctctgcaacaatgcctagttggataagaaaaatttcgaacaagtacttaaaggatccagttataattgacctttcctgcattgaatagatcttcctgggtctagaaacattgctgaagcatctgatgaacaccaacactttcatttctaaaaagtataccaaatcagcacctggacattatc

SEQ ID NO: 67870 - DNA, 3516 bp, Zea Mays
ggaatcccagttcccaccgtcccgtccatggttccgtcgtccatccagccagcaacacctcatgtgcgaacccggttcagcggaatcgccatctccaaattctcgatccgccgcgtgcgctgcctgcggatatctccctgtccgtgtcccgctcccgccttgcttgctgctccaccaccgcactgtaggtgctgcctgcctgcctcctcctgaattattcttattcgttcgctattaattattagccaccgctatatccttcccttcctcgtcttcctcctcggagtcggagaggtccgtccatctcgatccgcggcaagtctgaacggacgactccgaagcttacttgccagagagccgccgtttaggtggcggcgatccttccgtggttccttctcggttctgcctgcctgctgctgcttcttcttcttctggcggggccgaatcgagagcgtgtccgccggaatctctcagtcatcaggctgcagcctacggcggtcgattctactgggattctacactactcgctcaagagtcgagactgcatgcggctccaagggaaattaattaagatgaggtcttttccccacctgctgctgatcctggcgctcctcttggtcctggagaatgtccgggcgcaacccaagccacttctcatcaactgcggctcgggttcaagcgccgacgtcgacggcaggacgtgggtcggggacgcccatcccgacggcggcgccggcttcacggtcacattggcaggagccactgccacccgagctcgaaaacctgtcgacgaaggaggaggaggaggggacgccgcgtacggggagctctacaggaccgctcgcgtcttcaacgcgtcgtccgcctacaggttcagcgtcgccgccgggagctacttcctccggctccacttcagccggctcttcagcagcaacctcagcggcgacgccaccgccaaggaagcggtcttcgacgtcacggccaatggcctgaggctgctgtccaggttcagcgtcgccggggagatctactggaggaactccaggaccaactccaccagcgatgtcgccgtcaaggagtacctcctcaacgtcaccgccgcgaggccgctggaggtcgagttcgcgcctgacgccgggtcgttcgccttcgtcaacgccatggaggttgtccccgtccccggcaactcgatcttcggttcggtcaacaaggtgggcggggtggggctgaagggccccttcagcctcggagagagcggggtcgagaccatgtacagggtgtgcgtgggaggcggcaagatcgagaggaaggaggacgacccgcgcctgtggaggaggtgggattccgacgagcgctacatcttctccatgaacgccgctcacagcatccggaacacgtccagcatcagctacgtgtcgcgcgacggcgccgactcggtccccgcgccgctgcggctgtacgagacggccagggtgacggaggagaccttcgtggtggacaggaagttcaacgtgtcctggcggttcggcgtggaccccggcttcgagtacctggtcaggctgcacttctgcgagctggagtacgggagcgcggagcagcgcaggttcaagatctacatcaacggcaagaccgccgcggagaactacgacgtggtcgccaaggccgggggcaagaacaaggcgttccacgaggacttccttgacgacgacgacgccgcccccgcgtcggagaccgacacgctctgggttcagctgggctccgagtcctccgcgaccagctccgcggctagcgacgcgctcctgaacggcatggagatcttcaaggtcagccggaacggaaaccttgggcatccgacggttaggatcgggggcgtgagtggtggcctggaggacgacagacgaaagcggagccccaggtgggtgctggtcggcgctgctgcgggtgtggtgatcttcgtctcggtcgctgctgctgtttacctctgtttctatctgcaccggaagaaaaacacaaacacttcagctgctaataagaaaacgaagacgaagacgaaggacgacaaccttccggctacgacgacggcccccggtcttcgcgcagctggaacatttggcagctgcaggatgggccggcggttcagcatcgcggagatcaaagcggccaccatggacttcgacgagtccctggtgatcggagtcggaggcttcggcaaggtgtacaggggcgagacggacacgggcactccggtggcggtgaagcgggggcacgcagagtctcagcagggggcgaaggagttcgagacggagatcgagatgctgtcgaggctgcggcaccggcacctcgtctccctgatcgggtactgcgacgagcaggacgagatgatcctggtctacgagcacatggcgaacggcacgctgcgaagccacctctacgggagcgagagcgagagcgaccacctccccgctctgacgtggaggcagaggctggagatctgcatcggcgcggcgcgggggctgcactacctccacacggggctggaccggggcggcgtcatccacagggacgtgaagaccaccaacatcctgctggacggcagccttcgtggcgaaggtggcggacttcggcatctcgaagcacggcccgccgctggaccgcacccacgtcagcaccgccgtgaagggcagcttcgggtacctggacccggagtacttcatgaggcagcagctgacgcagagctccgacgtgtactcgttcggcgtcgtcctgctggaggtcctctgcgcccggcccgtcatcaacccggccctgccgagggaccaggtcaacctcccccgagtgggctctggagcggaagaggcggggcctgctcgagaccgtggtcgaccgtcggctggacggaggctacgacctggagtccgtcaggcagttggctgaggtcgccgagaagtgcgtcgcggatgagggacgggaccggccttccatcggtcaggtcctgtggcacctcgagaccgctctgcagctgcaccaagcgcatctgcagagctcatcagcctcagctgctgcgggtgatctggagccctctgatggcgcgtctgctagcaacagcatcaggcgcgccgaagaggcagcagaaaccgctggtgtgacctatggagatggacatggagatggggaagcggtggaactcagagttgaggtactgtaaacgctgtgtgtgtgtggttgccccagcaaatatactgaaatccttttggttcttcattccgtcgtactctgcaaagaaaatgcagtgttgagagttgctattctttcatcgatgtgcgagaattcacgcgtgtcgaaattttcctgagtttttagtgtttttatacggtcttggactcttggtgcatcatctacgtggcaccacggccttcgtagctgaagccactagccgtaggataggattctctcgctcgatcgctggatttcttcagtctgtcacactgtacagcacatagcacagcaacgttgctt

SEQ ID NO: 67871 - DNA, 3558 bp, Zea Mays
cgacgacgacgaccacgaggcattggctggaatcccagttcccaccgtcccgtccatggttccgtcgtccatccagccagcaacacctcatgtgcgaacccggttcagcggaatcgccatctccaaattctcgatccgccgcgtgcgctgcctgcggatatctccctgtccgtgtcccgctcccgccttgcttgctgctccaccaccgcactgtaggtgctgcctgcctgcctcctcctgaattattcttattcgttcgctattaattattagccaccgctatatccttcccttcctcgtcttcctcctcggagtcggagaggtccgtccatctcgatccgcggcaagtctgaacggacgactccgaagcttacttgccagagagccgccgtttaggtggcggcgatccttccgtggttccttctcggttctgcctgcctgctgctgcttcttcttcttctggcggggccgaatcgagagcgtgtccgccggaatctctcagtcatcaggtcagtgaaacgaggctccaaaaaaaaatcccctctttcttcttcactctccccctattccatccttcctgaggattttcttctctgcttcattttccgcctcttcgacgagtcctgttcttgcaggctgcagcctacggcggtcgattctactgggattctacactactcgctcaagagtcgagactgcatgcggctccaagggaaattaattaagatgaggtcttttccccacctgctgctgatcctggcgctcctcttggtcctggagaatgtccgggcgcaacccaagccacttctcatcaactgcggctcgggttcaagcgccgacgtcgacggcaggacgtgggtcggggacgcccatcccgacggcggcgccggcttcacggtcacattggcaggagccactgccacccgagctcgaaaacctgtcgacgaaggaggaggaggaggggacgccgcgtacggggagctctacaggaccgctcgcgtcttcaacgcgtcgtccgcctacaggttcagcgtcgccgccgggagctacttcctccggctccacttcagccggctcttcagcagcaacctcagcggcgacgccaccgccaaggaagcggtcttcgacgtcacggccaatggcctgaggctgctgtccaggttcagcgtcgccggggagatctactggaggaactccaggaccaactccaccagcgatgtcgccgtcaaggagtacctcctcaacgtcaccgccgcgaggccgctggaggtcgagttcgcgcctgacgccgggtcgttcgccttcgtcaacgccatggaggttgtccccgtccccggcaactcgatcttcggttcggtcaacaaggtgggcggggtggggctgaagggccccttcagcctcggagagagcggggtcgagaccatgtacagggtgtgcgtgggaggcggcaagatcgagaggaaggaggacgacccgcgcctgtggaggagcatcagctacgtgtcgcgcgacggcgccgactcggtccccgcgccgctgcggctgtacgagacggccagggtgacggaggagaccttcgtggtggacaggaagttcaacgtgtcctggcggttcggcgtggaccccggcttcgagtacctggtcaggctgcacttctgcgagctggagtacgggagcgcggagcagcgcaggttcaagatctacatcaacggcaagaccgccgcggagaactacgacgtggtcgccaaggccgggggcaagaacaaggcgttccacgaggacttccttgacgacgacgacgccgcccccgcgtcggagaccgacacgctctgggttcagctgggctccgagtcctccgcgaccagctccgcggctagcgacgcgctcctgaacggcatggagatcttcaaggtcagccggaacggaaaccttgggcatccgacggttaggatcgggggcgtgagtggtggcctggaggacgacagacgaaagcggagccccaggtgggtgctggtcggcgctgctgcgggtgtggtgatcttcgtctcggtcgctgctgctgtttacctctgtttctatctgcaccggaagaaaaacacaaacacttcagctgctaataagaaaacgaagacgaagacgaaggacgacaaccttccggctacgacgacggcccccggtcttcgcgcagctggaacatttggcagctgcaggatgggccggcggttcagcatcgcggagatcaaagcggccaccatggacttcgacgagtccctggtgatcggagtcggaggcttcggcaaggtgtacaggggcgagacggacacgggcactccggtggcggtgaagcgggggcacgcagagtctcagcagggggcgaaggagttcgagacggagatcgagatgctgtcgaggctgcggcaccggcacctcgtctccctgatcgggtactgcgacgagcaggacgagatgatcctggtctacgagcacatggcgaacggcacgctgcgaagccacctctacgggagcgagagcgagagcgaccacctccccgctctgacgtggaggcagaggctggagatctgcatcggcgcggcgcgggggctgcactacctccacacggggctggaccggggcggcgtcatccacagggacgtggcggacttcggcatctcgaagcacggcccgccgctggaccgcacccacgtcagcaccgccgtgaagggcagcttcgggtacctggacccggagtacttcatgaggcagcagctgacgcagagctccgacgtgtactcgttcggcgtcgtcctgctggaggtcctctgcgcccggcccgtcatcaacccggccctgccgagggaccaggtcaacctcccccgagtgggctctggagcggaagaggcggggcctgctcgagaccgtggtcgaccgtcggctggacggaggctacgacctggagtccgtcaggcagttggctgaggtcgccgagaagtgcgtcgcggatgagggacgggaccggccttccatcggtcaggtcctgtggcacctcgagaccgctctgcagctgcaccaagcgcatctgcagagctcatcagcctcagctgctgcgggtgatctggagccctctgatggcgcgtctgctagcaacagcatcaggcgcgccgaagaggcagcagaaaccgctggtgtgacctatggagatggacatggagatggggaagcggtggaactcagagttgaggtactgtaaacgctgtgtgtgtgtggttgccccagcaaatatactgaaatccttttggttcttcattccgtcgtactctgcaaagaaaatgcagtgttgagagttgctattctttcatcgatgtgcgagaattcacgcgtgtcgaaattttcctgagtttttagtgtttttatacggtcttggactcttggtgcatcatctacgtggcaccacggccttcgtagctgaagccactagccgtaggataggattctctcgctcgatcgctggatttcttcagtctgtcacactgtacagcacatagcacagcaacgttgctt

SEQ ID NO: 67872 - DNA, 3620 bp, Zea Mays
tttcatcaatcgaactaacagcctgcaaccaaacagtactgcctctcggcggctagctagaaatgacgacgacgacgacgacgaccacgaggcattggctggaatcccagttcccaccgtcccgtccatggttccgtcgtccatccagccagcaacacctcatgtgcgaacccggttcagcggaatcgccatctccaaattctcgatccgccgcgtgcgctgcctgcggatatctccctgtccgtgtcccgctcccgccttgcttgctgctccaccaccgcactgtaggtgctgcctgcctgcctcctcctgaattattcttattcgttcgctattaattattagccaccgctatatccttcccttcctcgtcttcctcctcggagtcggagaggtccgtccatctcgatccgcggcaagtctgaacggacgactccgaagcttacttgccagagagccgccgtttaggtggcggcgatccttccgtggttccttctcggttctgcctgcctgctgctgcttcttcttcttctggcggggccgaatcgagagcgtgtccgccggaatctctcagtcatcaggcaggctgcagcctacggcggtcgattctactgggattctacactactcgctcaagagtcgagactgcatgcggctccaagggaaattaattaagatgaggtcttttccccacctgctgctgatcctggcgctcctcttggtcctggagaatgtccgggcgcaacccaagccacttctcatcaactgcggctcgggttcaagcgccgacgtcgacggcaggacgtgggtcggggacgcccatcccgacggcggcgccggcttcacggtcacattggcaggagccactgccacccgagctcgaaaacctgtcgacgaaggaggaggaggaggggacgccgcgtacggggagctctacaggaccgctcgcgtcttcaacgcgtcgtccgcctacaggttcagcgtcgccgccgggagctacttcctccggctccacttcagccggctcttcagcagcaacctcagcggcgacgccaccgccaaggaagcggtcttcgacgtcacggccaatggcctgaggctgctgtccaggttcagcgtcgccggggagatctactggaggaactccaggaccaactccaccagcgatgtcgccgtcaaggagtacctcctcaacgtcaccgccgcgaggccgctggaggtcgagttcgcgcctgacgccgggtcgttcgccttcgtcaacgccatggaggttgtccccgtccccggcaactcgatcttcggttcggtcaacaaggtgggcggggtggggctgaagggccccttcagcctcggagagagcggggtcgagaccatgtacagggtgtgcgtgggaggcggcaagatcgagaggaaggaggacgacccgcgcctgtggaggaggtgggattccgacgagcgctacatcttctccatgaacgccgctcacagcatccggaacacgtccagcatcagctacgtgtcgcgcgacggcgccgactcggtccccgcgccgctgcggctgtacgagacggccagggtgacggaggagaccttcgtggtggacaggaagttcaacgtgtcctggcggttcggcgtggaccccggcttcgagtacctggtcaggctgcacttctgcgagctggagtacgggagcgcggagcagcgcaggttcaagatctacatcaacggcaagaccgccgcggagaactacgacgtggtcgccaaggccgggggcaagaacaaggcgttccacgaggacttccttgacgacgacgacgccgcccccgcgtcggagaccgacacgctctgggttcagctgggctccgagtcctccgcgaccagctccgcggctagcgacgcgctcctgaacggcatggagatcttcaaggtcagccggaacggaaaccttgggcatccgacggttaggatcgggggcgtgagtggtggcctggaggacgacagacgaaagcggagccccaggtgggtgctggtcggcgctgctgcgggtgtggtgatcttcgtctcggtcgctgctgctgtttacctctgtttctatctgcaccggaagaaaaacacaaacacttcagctgctaataagaaaacgaagacgaagacgaaggacgacaaccttccggctacgacgacggcccccggtcttcgcgcagctggaacatttggcagctgcaggatgggccggcggttcagcatcgcggagatcaaagcggccaccatggacttcgacgagtccctggtgatcggagtcggaggcttcggcaaggtgtacaggggcgagacggacacgggcactccggtggcggtgaagcgggggcacgcagagtctcagcagggggcgaaggagttcgagacggagatcgagatgctgtcgaggctgcggcaccggcacctcgtctccctgatcgggtactgcgacgagcaggacgagatgatcctggtctacgagcacatggcgaacggcacgctgcgaagccacctctacgggagcgagagcgagagcgaccacctccccgctctgacgtggaggcagaggctggagatctgcatcggcgcggcgcgggggctgcactacctccacacggggctggaccggggcggcgtcatccacagggacgtgaagaccaccaacatcctgctggacggcagccttcgtggcgaaggtggcggacttcggcatctcgaagcacggcccgccgctggaccgcacccacgtcagcaccgccgtgaagggcagcttcgggtacctggacccggagtacttcatgaggcagcagctgacgcagagctccgacgtgtactcgttcggcgtcgtcctgctggaggtcctctgcgcccggcccgtcatcaacccggccctgccgagggaccaggtcaacctcccccgagtgggctctggagcggaagaggcggggcctgctcgagaccgtggtcgaccgtcggctggacggaggctacgacctggagtccgtcaggcagttggctgaggtcgccgagaagtgcgtcgcggatgagggacgggaccggccttccatcggtcaggtcctgtggcacctcgagaccgctctgcagctgcaccaagcgcatctgcagagctcatcagcctcagctgctgcgggtgatctggagccctctgatggcgcgtctgctagcaacagcatcaggcgcgccgaagaggcagcagaaaccgctggtgtgacctatggagatggacatggagatggggaagcggtggaactcagagttgaggtactgtaaacgctgtgtgtgtgtggttgccccagcaaatatactgaaatccttttggttcttcattccgtcgtactctgcaaagaaaatgcagtgttgagagttgctattctttcatcgatgtgcgagaattcacgcgtgtcgaaattttcctgagtttttagtgtttttatacggtcttggactcttggtgcatcatctacgtggcaccacggccttcgtagctgaagccactagccgtaggataggattctctcgctcgatcgctggatttcttcagtctgtcacactgtacagcacatagcacagcaacgttgctt

SEQ ID NO: 67873 - DNA, 1384 bp, Zea Mays
gcaccgacacctaaaaaaaatggtcgtgcacaggagcgttgcacttgcagctgatctcatctgatccgatcaatcaacgtgacatgatctgcagacgctcgcctgcccaccaaatcggcaaatcctggcgtacaggaggacgacccaacccaagcggcacacaagatccaagaggatgccgccgccgccgccgctcgtgctgctggcgaagccgctgttcccgaacttcgcggcggcgctggagggccggtaccgcctcgtcctggccggggacgccgacgcggccacggcggcggaggcccgggtcctgctcgtgccggggctcgtggccgtgacagccgagctcgtcgaccggctcccggcgctggagctcgtggccgcgacctccgtcgggctggaccacgtggacctccgtgcctgccgccgccgcgggctcgccgtcaccaacgccggcgcggccttctccgtcgactccgccgactacgccgtcggcctcgtcgtcgccgtgctgcgcagggtcgccgccgccgaggcgcatctccggcgcggcgggtgggctaccgatggcgagtacccgctcaccaccaaggtgagcggcaagcgggtggggatcgtggggctcggcagcatcggctcgctggtggcgcggcgcctggccgccatggggtgccgcgtcgcctaccactcccgcgcgccgaagccgtcgtgctcgtgcccctacgccttcttccccacggcgcgcgccctggccttggccagcgacgtgctggtgctgtcgtgcgcgctcacggaggagacgcggcgcgtggtgggccgcgaggtgctggaggcgctgggacagggcggcgtgctggtcaacgtcggccgcggcggcctggtcgacgagccggagctggtgcggtgcctgcgggagggcgtcatcggcggcgcggggctggacgtgttcgaggacgagcccgacgtgcccgcggagctcctcgccatggacaacgtcgtgctgtcgccccacagggccgtgctcacgccggagtccatgcgcgggttgctggatgtcgtcgcgggaaacctcgacgccttcttcgccggcaggccgctgctcagccccgtgtcgctgtgaattctgaaccacatgtaggatagatacgtcaagtcgtcaagttccattccatccaagaagcatcaaccagacaaccagtgtgtgagactcaccacgaacaatacggaagaacactcagaattggtagggtggttcgggtttcttactttctgttccaagttcatcatccaaaagccaaatttcaaaatgacaacagttcgtcttttatacttgctactggaaaaccaaaacgaattggaatatattacagccagttggctccaccat

SEQ ID NO: 67874 - DNA, 2701 bp, Zea Mays
gacgagcccacggtacagtgaccgctccagtaggccgccgcgccgccaacgtggccgggatgccagctcctggcgtgctgagctaaggtggtggatgaaagaacggacccctttcttggtagattgactagaccagccaccattgaccaatcccacaatttcttctctgatgtcacaaacaacttcaaagatttttcaactgtagtttcagagttgcatcaacaccttctggatgcaaatgtagaagttacttacacagaatacttagatctgatgaaagtggaagttgatcaacatcttaataagctctcggaggacataagggacctcaaaagctgtaacttggcccacaaatatgacacagatggttcatgctgtacagcatgccatgttgggaagctagctgagatagatgacaggttcaacagcttgaagtttctgctggctgtggtgttccgacaaattagagagatcctcacagtggtcaattcttcaattcatgatcttcagtgggagcatgagttacagtcagaagttaccggcatcattattggagactgtattagaggtcttcaggatgaactcgagaggaaactgtatgagcaaagttccatggtgaacagtctaagaaaaaactgccaggaaactgtggcgcagtttgcttccatacgtgaagagctgattgctatttctaatattctgttaccttctgaagaggaaccacaaatttccctctgtaggcatgaaagtttgggtaactggagtgacagatggaagttcagctttttcagaaagcgagcacaccaggatcactctttatcttccacgcaaaaccagaattctgcaacacagaaatctataagtcctagtgaagttatatcagaaagatccgacttccgacatctgaagggtatgactagacatgaaatgcttaactatttcagatctgagatcagtaaattaagaaggctgcatgagttggatttgcaagagaaaacagaagagctgtttaaattcaaacgagagaaatggtcattggctcttaagtatgatgtagaatttgagcctttaagaaggaaattccctgaggtcatttcaagatttgaccaaatcatgtccaatggaatggcagcagcagtacctacaatctgcagtaatagtgatgcattcgatgaaacgagcagattgagcagtataattgattcactataccgtgaaaaccagcatcttcattgtttgcttgcagagaagatgaagaatattcaggaattatcaagccaaatatctgattccaccaggaaaatgtcacttcaatattcattagaaaaacaaattttgagacaactcaacagcactcaagtagaatatgaggatctttttgttgaaagtactatcagagatgaaatttaccaaactgttgtgagaacattggttgatagtcataggaatgttttggaggataccacccaaactttccgtgcaaaagtgtcttcacttgaagccgcactctctgaaaaggacaaggcgttgtgtttatctgatgaggaaaatcaaatgctaaaggaaaagttgtcaacactagaaaaagagcattttatccaaaataatcagcaagatctcgagctaatcaagcaagaaagtgaggaaatggttctccgtgatattgagatggagccacaaagatcatgtgagatttctgatcgagatatacagtacgaagggctcatcaagctgaatcaggttttagaaattgcctcaaccacggcaaaagaaatagaaacaaaaaggttgaatctcagtgatatccaaggtaaaagagagcaagaaaaacagctagattgcatcctggtatctatcatggatttgtcaaaagaatttatggagactgaacatagagtgccaaaagatataaaaggaaatgaaaaaaagactgataatctgcatgatcaatgcaattatatgatacaacaggccatcgtattgacaaagaagggtctatggtataagcaaatgcttgacacaaaacgttctgagcttcgaaaagctgaatctgaggttgacattatgggagacaaggttaatgcactcttgagtcttgttcaaaagatatatgtaactcttgagcactactctcctgtttttcagcatcatcctgtgctattggatgctttcttgaagacatgcaagcttgttgcaggtatcagaagcagacaaaaaaaggacttgcaagatacaatctaagttggagcagcaagtttagagtggcctaaaagacactagagagagattaatttcgtcggtggaggaacactacacagtcgcaactcacaaggctgtgaaattgatctatggccaaattgacaccgcaaatctgcagccagaaggaagttgaggtagtccattcgacagaattttgaaatctagggtatgcatttcaagggcattaagctgtaatatatttacaaattgtagcaatgcatttttctaaacatagtttgataatggatgcagttatactgtctctgctcactccgcagatgattggattcatgtcctgtatggtgatgttccattattgaacagttctaatgtcgccatctaattcgcttgctatagcattccatgctaataaagctgcaccaacagctggctccacctgcagctgattctaccacaactggaagaaggtcagcgatacgag

SEQ ID NO: 67875 - DNA, 2669 bp, Zea Mays
cagctcctggcgtgctgagctaaggtggtggatgaaagaacggacccctttcttggtagattgactagaccagccaccattgaccaatcccacaatttcttctctgatgtcacaaacaacttcaaagatttttcaactgtagtttcagagttgcatcaacaccttctggatgcaaatgtagaagttacttacacagaatacttagatctgatgaaagtggaagttgatcaacatcttaataagctctcggaggacataagggacctcaaaagctgtaacttggcccacaaatatgacacagatggttcatgctgtacagcatgccatgttgggaagctagctgagatagatgacaggttcaacagcttgaagtttctgctggctgtggtgttccgacaaattagagagatcctcacagtggtcaattcttcaattcatgatcttcagtgggagcatgagttacagtcagaagttaccggcatcattattggagactgtattagaggtcttcaggatgaactcgagaggaaactgtatgagcaaagttccatggtgaacagtctaagaaaaaactgccaggaaactgtggcgcagtttgcttccatacgtgaagagctgattgctatttctaatattctgttaccttctgaagaggaaccacaaatttccctctgtaggcatgaaagtttgggtaactggagtgacagatggaagttcagctttttcagaaagcgagcacaccaggatcactctttatcttccacgcaaaaccagaattctgcaacacagaaatctataagtcctagtgaagttatatcagaaagatccgacttccgacatctgaagggtatgactagacatgaaatgcttaactatttcagatctgagatcagtaaattaagaaggctgcatgagttggatttgcaagagaaaacagaagagctgtttaaattcaaacgagagaaatggtcattggctcttaagtatgatgtagaatttgagcctttaagaaggaaattccctgaggtcatttcaagatttgaccaaatcatgtccaatggaatggcagcagcagtacctacaatctgcagtaatagtgatgcattcgatgaaacgagcagattgagcagtataattgattcactataccgtgaaaaccagcatcttcattgtttgcttgcagagaagatgaagaatattcaggaattatcaagccaaatatctgattccaccaggaaaatgtcacttcaatattcattagaaaaacaaattttgagacaactcaacagcactcaagtagaatatgaggatctttttgttgaaagtactatcagagatgaaatttaccaaactgttgtgagaacattggttgatagtcataggaatgttttggaggataccacccaaactttccgtgcaaaagtgtcttcacttgaagccgcactctctgaaaaggacaaggcgttgtgtttatctgatgaggaaaatcaaatgctaaaggaaaagttgtcaacactagaaaaagagcattttatccaaaataatcagcaagatctcgagctaatcaagcaagaaagtgaggaaatggttctccgtgatattgagatggagccacaaagatcatgtgagatttctgatcgagatatacagtacgaagggctcatcaagctgaatcaggttttagaaattgcctcaaccacggcaaaagaaatagaaacaaaaaggttgaatctcagtgatatccaaggtaaaagagagcaagaaaaacagctagattgcatcctggtatctatcatggatttgtcaaaagaatttatggagactgaacatagagtgccaaaagatataaaaggaaatgaaaaaaagactgataatctgcatgatcaatgcaattatatgatacaacaggccatcgtattgacaaagaagggtctatggtataagcaaatgcttgacacaaaacgttctgagcttcgaaaagctgaatctgaggttgacattatgggagacaaggttaatgcactcttgagtcttgttcaaaagatatatgtaactcttgagcactactctcctgtttttcagcatcatcctgtgctattggatgctttcttgaagacatgcaagcttgttgcaggtatcagaagcagacaaaaaaaggacttgcaagatacaatctaagttggagcagcaagtttagagtggcctaaaagacactagagagagattaatttcgtcggtggaggaacactacacagtcgcaactcacaaggctgtgaaattgatctatggccaaattgacaccgcaaatctgcagccagaaggaagttgaggtagtccattcgacagaattttgaaatctaggttatactgtctctgctcactccgcagatgattggattcatgtcctgtatggtgtatgtataagtctatgcactttataatgtacaaattatgatagttcaaattctgtgagggtgatctcatttttgtcagcagcatatatagaaataacttagctgttatacaagccatagtcatattgtaagcatagtaactccaaggctgtcttttacttgattttagtattttcatcgttcttacaaattttggagtcctgtttgtactaatggttttataacctgcatagacgtccttttacttgattttag

SEQ ID NO: 67876 - DNA, 2835 bp, Zea Mays
gccagctcctggcgtgctgagctaagggctccgattcaccaccacccgtcctcttcaactgccgccgttatcccctacccggcacgcgctgggcggggagcagctgaaccccaccccagccgcccgcaacggcgccaacaaggcgctgaagcggactctccggctcctgccaatggcgcggatccagcttgtggtggatgaaagaacggacccctttcttggtagattgactagaccagccaccattgaccaatcccacaatttcttctctgatgtcacaaacaacttcaaagatttttcaactgtagtttcagagttgcatcaacaccttctggatgcaaatgtagaagttacttacacagaatacttagatctgatgaaagtggaagttgatcaacatcttaataagctctcggaggacataagggacctcaaaagctgtaacttggcccacaaatatgacacagatggttcatgctgtacagcatgccatgttgggaagctagctgagatagatgacaggttcaacagcttgaagtttctgctggctgtggtgttccgacaaattagagagatcctcacagtggtcaattcttcaattcatgatcttcagtgggagcatgagttacagtcagaagttaccggcatcattattggagactgtattagaggtcttcaggatgaactcgagaggaaactgtatgagcaaagttccatggtgaacagtctaagaaaaaactgccaggaaactgtggcgcagtttgcttccatacgtgaagagctgattgctatttctaatattctgttaccttctgaagaggaaccacaaatttccctctgtaggcatgaaagtttgggtaactggagtgacagatggaagttcagctttttcagaaagcgagcacaccaggatcactctttatcttccacgcaaaaccagaattctgcaacacagaaatctataagtcctagtgaagttatatcagaaagatccgacttccgacatctgaagggtatgactagacatgaaatgcttaactatttcagatctgagatcagtaaattaagaaggctgcatgagttggatttgcaagagaaaacagaagagctgtttaaattcaaacgagagaaatggtcattggctcttaagtatgatgtagaatttgagcctttaagaaggaaattccctgaggtcatttcaagatttgaccaaatcatgtccaatggaatggcagcagcagtacctacaatctgcagtaatagtgatgcattcgatgaaacgagcagattgagcagtataattgattcactataccgtgaaaaccagcatcttcattgtttgcttgcagagaagatgaagaatattcaggaattatcaagccaaatatctgattccaccaggaaaatgtcacttcaatattcattagaaaaacaaattttgagacaactcaacagcactcaagtagaatatgaggatctttttgttgaaagtactatcagagatgaaatttaccaaactgttgtgagaacattggttgatagtcataggaatgttttggaggataccacccaaactttccgtgcaaaagtgtcttcacttgaagccgcactctctgaaaaggacaaggcgttgtgtttatctgatgaggaaaatcaaatgctaaaggaaaagttgtcaacactagaaaaagagcattttatccaaaataatcagcaagatctcgagctaatcaagcaagaaagtgaggaaatggttctccgtgatattgagatggagccacaaagatcatgtgagatttctgatcgagatatacagtacgaagggctcatcaagctgaatcaggttttagaaattgcctcaaccacggcaaaagaaatagaaacaaaaaggttgaatctcagtgatatccaaggtaaaagagagcaagaaaaacagctagattgcatcctggtatctatcatggatttgtcaaaagaatttatggagactgaacatagagtgccaaaagatataaaaggaaatgaaaaaaagactgataatctgcatgatcaatgcaattatatgatacaacaggccatcgtattgacaaagaagggtctatggtataagcaaatgcttgacacaaaacgttctgagcttcgaaaagctgaatctgaggttgacattatgggagacaaggttaatgcactcttgagtcttgttcaaaagatatatgtaactcttgagcactactctcctgtttttcagcatcatcctgtgctattggatgctttcttgaagacatgcaagcttgttgcaggtatcagaagcagacaaaaaaaggacttgcaagatacaatctaagttggagcagcaagtttagagtggcctaaaagacactagagagagattaatttcgtcggtggaggaacactacacagtcgcaactcacaaggctgtgaaattgatctatggccaaattgacaccgcaaatctgcagccagaaggaagttgaggtagtccattcgacagaattttgaaatctaggttatactgtctctgctcactccgcagatgattggattcatgtcctgtatggtgtatgtataagtctatgcactttataatgtacaaattatgatagttcaaattctgtgagggtgatctcatttttgtcagcagcatatatagaaataacttagctgttatacaagccatagtcatattgtaagcatagtaactccaaggctgtcttttacttgattttagtattttcatcgttcttacaaattttggagtcctgtttgtactaatggttttataacctgcatagacgtccttttacttgattttag

SEQ ID NO: 67877 - DNA, 2849 bp, Zea Mays
gccagctcctggcgtgctgagctaagtttgttcctgccagggctccgattcaccaccacccgtcctcttcaactgccgccgttatcccctacccggcacgcgctgggcggggagcagctgaaccccaccccagccgcccgcaacggcgccaacaaggcgctgaagcggactctccggctcctgccaatggcgcggatccagcttgtggtggatgaaagaacggacccctttcttggtagattgactagaccagccaccattgaccaatcccacaatttcttctctgatgtcacaaacaacttcaaagatttttcaactgtagtttcagagttgcatcaacaccttctggatgcaaatgtagaagttacttacacagaatacttagatctgatgaaagtggaagttgatcaacatcttaataagctctcggaggacataagggacctcaaaagctgtaacttggcccacaaatatgacacagatggttcatgctgtacagcatgccatgttgggaagctagctgagatagatgacaggttcaacagcttgaagtttctgctggctgtggtgttccgacaaattagagagatcctcacagtggtcaattcttcaattcatgatcttcagtgggagcatgagttacagtcagaagttaccggcatcattattggagactgtattagaggtcttcaggatgaactcgagaggaaactgtatgagcaaagttccatggtgaacagtctaagaaaaaactgccaggaaactgtggcgcagtttgcttccatacgtgaagagctgattgctatttctaatattctgttaccttctgaagaggaaccacaaatttccctctgtaggcatgaaagtttgggtaactggagtgacagatggaagttcagctttttcagaaagcgagcacaccaggatcactctttatcttccacgcaaaaccagaattctgcaacacagaaatctataagtcctagtgaagttatatcagaaagatccgacttccgacatctgaagggtatgactagacatgaaatgcttaactatttcagatctgagatcagtaaattaagaaggctgcatgagttggatttgcaagagaaaacagaagagctgtttaaattcaaacgagagaaatggtcattggctcttaagtatgatgtagaatttgagcctttaagaaggaaattccctgaggtcatttcaagatttgaccaaatcatgtccaatggaatggcagcagcagtacctacaatctgcagtaatagtgatgcattcgatgaaacgagcagattgagcagtataattgattcactataccgtgaaaaccagcatcttcattgtttgcttgcagagaagatgaagaatattcaggaattatcaagccaaatatctgattccaccaggaaaatgtcacttcaatattcattagaaaaacaaattttgagacaactcaacagcactcaagtagaatatgaggatctttttgttgaaagtactatcagagatgaaatttaccaaactgttgtgagaacattggttgatagtcataggaatgttttggaggataccacccaaactttccgtgcaaaagtgtcttcacttgaagccgcactctctgaaaaggacaaggcgttgtgtttatctgatgaggaaaatcaaatgctaaaggaaaagttgtcaacactagaaaaagagcattttatccaaaataatcagcaagatctcgagctaatcaagcaagaaagtgaggaaatggttctccgtgatattgagatggagccacaaagatcatgtgagatttctgatcgagatatacagtacgaagggctcatcaagctgaatcaggttttagaaattgcctcaaccacggcaaaagaaatagaaacaaaaaggttgaatctcagtgatatccaaggtaaaagagagcaagaaaaacagctagattgcatcctggtatctatcatggatttgtcaaaagaatttatggagactgaacatagagtgccaaaagatataaaaggaaatgaaaaaaagactgataatctgcatgatcaatgcaattatatgatacaacaggccatcgtattgacaaagaagggtctatggtataagcaaatgcttgacacaaaacgttctgagcttcgaaaagctgaatctgaggttgacattatgggagacaaggttaatgcactcttgagtcttgttcaaaagatatatgtaactcttgagcactactctcctgtttttcagcatcatcctgtgctattggatgctttcttgaagacatgcaagcttgttgcaggtatcagaagcagacaaaaaaaggacttgcaagatacaatctaagttggagcagcaagtttagagtggcctaaaagacactagagagagattaatttcgtcggtggaggaacactacacagtcgcaactcacaaggctgtgaaattgatctatggccaaattgacaccgcaaatctgcagccagaaggaagttgaggtagtccattcgacagaattttgaaatctaggttatactgtctctgctcactccgcagatgattggattcatgtcctgtatggtgtatgtataagtctatgcactttataatgtacaaattatgatagttcaaattctgtgagggtgatctcatttttgtcagcagcatatatagaaataacttagctgttatacaagccatagtcatattgtaagcatagtaactccaaggctgtcttttacttgattttagtattttcatcgttcttacaaattttggagtcctgtttgtactaatggttttataacctgcatagacgtccttttacttgattttag

SEQ ID NO: 67878 - DNA, 1939 bp, Zea Mays
cgagcccacggtacagtgaccgctccagtaggccgccgcgccgccaacgtggccgggatgccagctcctggcgtgctgagctaaggtggtggatgaaagaacggacccctttcttggtagattgactagaccagccaccattgaccaatcccacaatttcttctctgatgtcacaaacaacttcaaagatttttcaactgtagtttcagagttgcatcaacaccttctggatgcaaatgtagaagttacttacacagaatacttagatctgatgaaagtggaagttgatcaacatcttaataagctctcggaggacataagggacctcaaaagctgtaacttggcccacaaatatgacacagatggttcatgctgtacagcatgccatgttgggaagctagctgagatagatgacaggttcaacagcttgaagtttctgctggctgtggtgttccgacaaattagagagatcctcacagtggtcaattcttcaattcatgatcttcagtgggagcatgagttacagtcagaagttaccggcatcattattggagactgtattagaggtcttcaggatgaactcgagaggaaactgtatgagcaaagttccatggtgaacagtctaagaaaaaactgccaggaaactgtggcgcagtttgcttccatacgtgaagagctgattgctatttctaatattctgttaccttctgaagaggaaccacaaatttccctctgtaggcatgaaagtttgggtaactggagtgacagatggaagttcagctttttcagaaagcgagcacaccaggatcactctttatcttccacgcaaaaccagaattctgcaacacagaaatctataagtcctagtgaagttatatcagaaagatccgacttccgacatctgaagggtatgactagacatgaaatgcttaactatttcagatctgagatcagtaaattaagaaggctgcatgagttggatttgcaagagaaaacagaagagctgtttaaattcaaacgagagaaatggtcattggctcttaagtatgatgtagaatttgagcctttaagaaggaaattccctgaggtcatttcaagatttgaccaaatcatgtccaatggaatggcagcagcagtacctacaatctgcagtaatagtgatgcattcgatgaaacgagcagattgagcagtataattgattcactataccgtgaaaaccagcatcttcattgtttgcttgcagagaagatgaagaatattcaggaattatcaagccaaatatctgattccaccaggaaaatgtcacttcaatattcattagaaaaacaaattttgagacaactcaacagcactcaagtagaatatgaggatctttttgttgaaagtactatcagagatgaaatttaccaaactgttgtgagaacattggttgatagtcataggaatgttttggaggataccacccaaactttccgtgcaaaagtgtcttcacttgaagccgcactctctgaaaaggacaaggcgttgtgtttatctgatgaggaaaatcaaatgctaaaggaaaagttgtcaacactagaaaaagagcattttatccaaaataatcagcaagatctcgagctaatcaagcaagaaagtgaggaaatggttctccgtgatattgagatggagccacaaagatcatgtgagatttctgatcgagatatacagtacgaagggctcatcaagctgaatcaggttttagaaattgcctcaaccacggcaaaagaaatagaaacaaaaaggttgaatctcagtgatatccaaggtaaaagagagcaagaaaaacagctagattgcatcctggtatctatcatggatttgtcaaaagaatttatggagactgaacatagagtgccaaaagatataaaaggaaatgaaaaaaaaatgcaaaactaa

SEQ ID NO: 67879 - DNA, 947 bp, Zea Mays
attatctccaactctccatcatatatgatgaaactgaatgtttactagctttgagaaggcactaacatcggttgaactaacaaaaagccttgttctacttctatcatccaaagcggacattcaaaacgtggtccatcttacatggtgtccttaccagggcccctcgggcaaaataatgcttcttcctgaggatgatccaaatgccactcatatcatgattgccacggggaccggtgttgctccctaccgtggctacctacgtcgcatgttcatggaagatgtcccaactttcaaatttggtggtctggcttggctcttccttggtgttgcgaactctgacagccttctctatgacgaagagttcacaaactaccttcagcagtatccagacaatttcaggtacgacaaagcgctaagcagggagcagaagaacaagagcggcgggaagatgtacgtgcaggacaagatcgaggagtacagcgacgaaatcttcagactgctagatggcggtgcgcacatctacttctgtggtttgaaggggatgatgccggggatccaggacacgctcaagaaggtggctgagcaaagaggcgagagctgggaccagaagctgtcacagctgaaaaagaacaagcagtggcacgtcgaggtttactaggctataagatggcaaggattgtgattgtttagctactgagctgagaaactggacgtatgattgaacgactgtggctgctgcgatgtaatgtaacattgtagacttggattcataagcttctgctccaaatggtgaataaaatgaagcacgcggtttgtagctgctactaccagtatcaggacagtttctttttgctcgtttcgtataggttgattaagctatttttaagggtacatctccttgctttatgttattctgaattttcttatctgagatgcattattgaatt

SEQ ID NO: 67880 - DNA, 1372 bp, Zea Mays
cagatttgccaacgatactgtcagctgggtaacagcactctaaactttcggaccaaaccatgcatcgggatggcattagcgtggaaaaacaggacccagcaaccacggcgtctgaacaaggtactctgcatgtctgttcaacaagcaagcagaagcaaggttgctgtcgtgcccatcgagttggagaaggcaaaggagccaccgctccacctgtacaaaccaaaggagccttacacggccacgatcgtctctgtcgagaggcttgtaggacccagagctcctggcgaaacatgccacgttgtcattgatcatggcggcaatgttccgtactgggaaggacagagttacggcgtcattcctcctggagagaatccaaaaaaacctggatctcccaatactgttaggctctattcaattgcttctactaggtatggtgattcttttgatggaaagacagcaagcttatgtgttcgccgtgctgtttattatgatcctgaaactggagaggaagacccctcaaagagaggtgtctgcagtaacttcctgtgtggctcaaaaccaggggacaaagttcagatcacaggcccctcgggcaaaataatgcttcttcctgaggatgatccaaatgccactcatatcatgattgccacggggaccggtgttgctccctaccgtggctacctacgtcgcatgttcatggaagatgtcccaactttcaaatttggtggtctggcttggctcttccttggtgttgcgaactctgacagccttctctatgacgaagagttcacaaactaccttcagcagtatccagacaatttcaggtacgacaaagcgctaagcagggagcagaagaacaagagcggcgggaagatgtacgtgcaggacaagatcgaggagtacagcgacgaaatcttcagactgctagatggcggtgcgcacatctacttctgtggtttgaaggggatgatgccggggatccaggacacgctcaagaaggtggctgagcaaagaggcgagagctgggaccagaagctgtcacagctgaaaaagaacaagcagtggcacgtcgaggtttactaggctataagatggcaaggattgtgattgtttagctactgagctgagaaactggacgtatgattgaacgactgtggctgctgcgatgtaatgtaacattgtagacttggattcataagcttctgctccaaatggtgaataaaatgaagcacgcggtttgtagctgctactaccagtatcaggacagtttctttttgctcgtttcgtataggttgattaagctatttttaagggtacatctccttgctttatgttattctgaattttcttatctgagatgcattattgaatt

SEQ ID NO: 67881 - DNA, 1677 bp, Zea Mays
caggactcggctcaggacaaaggaagcagccagcccctgccttctccagtgttctcttctctccaagcggacaaagcagcccgtccctctcctactcctcccccaaagttccgttccgttccgttcagttccctcccgcaggtcaaaaccctcaacctcccacgcggctcgctcgctgggtgggtcggccatggctccccccgcgctcggatctcaggtggccgccgcagcctcggtgcccgtcggctcggactctctcgccaagggcgcggcgctcaagggtaacagcactctaaactttcggaccaaaccatgcatcgggatggcattagcgtggaaaaacaggacccagcaaccacggcgtctgaacaaggtactctgcatgtctgttcaacaagcaagcagaagcaaggttgctgtcgtgcccatcgagttggagaaggcaaaggagccaccgctccacctgtacaaaccaaaggagccttacacggccacgatcgtctctgtcgagaggcttgtaggacccagagctcctggcgaaacatgccacgttgtcattgatcatggcggcaatgttccgtactgggaaggacagagttacggcgtcattcctcctggagagaatccaaaaaaacctggatctcccaatactgttaggctctattcaattgcttctactaggtatggtgattcttttgatggaaagacagcaagcttatgtgttcgccgtgctgtttattatgatcctgaaactggagaggaagacccctcaaagagaggtgtctgcagtaacttcctgtgtggctcaaaaccaggggacaaagttcagatcacaggcctttcaacattttattctacatcacaattatttcttcagcattaatcaaggcccctcgggcaaaataatgcttcttcctgaggatgatccaaatgccactcatatcatgattgccacggggaccggtgttgctccctaccgtggctacctacgtcgcatgttcatggaagatgtcccaactttcaaatttggtggtctggcttggctcttccttggtgttgcgaactctgacagccttctctatgacgaagagttcacaaactaccttcagcagtatccagacaatttcaggtacgacaaagcgctaagcagggagcagaagaacaagagcggcgggaagatgtacgtgcaggacaagatcgaggagtacagcgacgaaatcttcagactgctagatggcggtgcgcacatctacttctgtggtttgaaggggatgatgccggggatccaggacacgctcaagaaggtggctgagcaaagaggcgagagctgggaccagaagctgtcacagctgaaaaagaacaagcagtggcacgtcgaggtttactaggctataagatggcaaggattgtgattgtttagctactgagctgagaaactggacgtatgattgaacgactgtggctgctgcgatgtaatgtaacattgtagacttggattcataagcttctgctccaaatggtgaataaaatgaagcacgcggtttgtagctgctactaccagtatcaggacagtttctttttgctcgtttcgtataggttgattaagctatttttaagggtacatctccttgctttatgttattctgaattttcttatctgagatgcattattgaatt

SEQ ID NO: 67882 - DNA, 1670 bp, Zea Mays
caggactcggctcaggacaaaggaagcagccagcccctgccttctccagtgttctcttctctccaagcggacaaagcagcccgtccctctcctactcctcccccaaagttccgttccgttccgttcagttccctcccgcaggtcaaaaccctcaacctcccacgcggctcgctcgctgggtgggtcggccatggctccccccgcgctcggatctcaggtggccgccgcagcctcggtgcccgtcggctcggactctctcgccaagggcgcggcgctcaagggtaacagcactctaaactttcggaccaaaccatgcatcgggatggcattagcgtggaaaaacaggacccagcaaccacggcgtctgaacaaggtactctgcatgtctgttcaacaagcaagcagaagcaaggttgctgtcgtgcccatcgagttggagaaggcaaaggagccaccgctccacctgtacaaaccaaaggagccttacacggccacgatcgtctctgtcgagaggcttgtaggacccagagctcctggcgaaacatgccacgttgtcattgatcatggcggcaatgttccgtactgggaaggacagagttacggcgtcattcctcctggagagaatccaaaaaaacctggatctcccaatactgttaggctctattcaattgcttctactaggtatggtgattcttttgatggaaagacagcaagcttatgtgttcgccgtgctgtttattatgatcctgaaactggagaggaagacccctcaaagagaggtgtctgcagtaacttcctgtgtggctcaaaaccaggggacaaagttcagatcacagcggacattcaaaacgtggtccatcttacatggtgtccttaccagggcccctcgggcaaaataatgcttcttcctgaggatgatccaaatgccactcatatcatgattgccacggggaccggtgttgctccctaccgtggctacctacgtcgcatgttcatggaagatgtcccaactttcaaatttggtggtctggcttggctcttccttggtgttgcgaactctgacagccttctctatgacgaagagttcacaaactaccttcagcagtatccagacaatttcaggtacgacaaagcgctaagcagggagcagaagaacaagagcggcgggaagatgtacgtgcaggacaagatcgaggagtacagcgacgaaatcttcagactgctagatggcggtgcgcacatctacttctgtggtttgaaggggatgatgccggggatccaggacacgctcaagaaggtggctgagcaaagaggcgagagctgggaccagaagctgtcacagctgaaaaagaacaagcagtggcacgtcgaggtttactaggctataagatggcaaggattgtgattgtttagctactgagctgagaaactggacgtatgattgaacgactgtggctgctgcgatgtaatgtaacattgtagacttggattcataagcttctgctccaaatggtgaataaaatgaagcacgcggtttgtagctgctactaccagtatcaggacagtttctttttgctcgtttcgtataggttgattaagctatttttaagggtacatctccttgctttatgttattctgaattttcttatctgagatgcattattgaatt

SEQ ID NO: 67883 - DNA, 1804 bp, Zea Mays
cggctgtcactggcaggactcggctcaggacaaaggaagcagccagcccctgccttctccagtgttctcttctctccaagcggacaaagcagcccgtccctctcctactcctcccccaaagttccgttccgttccgttcagttccctcccgcaggtcaaaaccctcaacctcccacgcggctcgctcgctgggtgggtcggccatggctccccccgcgctcggatctcaggtggccgccgcagcctcggtgcccgtcggctcggactctctcgccaagggcgcggcgctcaagggtaacagcactctaaactttcggaccaaaccatgcatcgggatggcattagcgtggaaaaacaggacccagcaaccacggcgtctgaacaaggtactctgcatgtctgttcaacaagcaagcagaagcaaggttgctgtcgtgcccatcgagttggagaaggcaaaggagccaccgctccacctgtacaaaccaaaggagccttacacggccacgatcgtctctgtcgagaggcttgtaggacccagagctcctggcgaaacatgccacgttgtcattgatcatggcggcaatgttccgtactgggaaggacagagttacggcgtcattcctcctggagagaatccaaaaaaacctggatctcccaatactgttaggctctattcaattgcttctactaggtatggtgattcttttgatggaaagacagcaagcttatgtgttcgccgtgctgtttattatgatcctgaaactggagaggaagacccctcaaagagaggtgtctgcagtaacttcctgtgtggctcaaaaccaggggacaaagttcagatcacagattttgggaccatgaagatatgcaaatctgatcggtgattgacaaaaatgttggcctggtgtcctgccatggtagctgactctggttgttcattgctcatctgggttgtccattatctccaactctccatcatatatgatgaaactgaatgtttactagctttgaggcccctcgggcaaaataatgcttcttcctgaggatgatccaaatgccactcatatcatgattgccacggggaccggtgttgctccctaccgtggctacctacgtcgcatgttcatggaagatgtcccaactttcaaatttggtggtctggcttggctcttccttggtgttgcgaactctgacagccttctctatgacgaagagttcacaaactaccttcagcagtatccagacaatttcaggtacgacaaagcgctaagcagggagcagaagaacaagagcggcgggaagatgtacgtgcaggacaagatcgaggagtacagcgacgaaatcttcagactgctagatggcggtgcgcacatctacttctgtggtttgaaggggatgatgccggggatccaggacacgctcaagaaggtggctgagcaaagaggcgagagctgggaccagaagctgtcacagctgaaaaagaacaagcagtggcacgtcgaggtttactaggctataagatggcaaggattgtgattgtttagctactgagctgagaaactggacgtatgattgaacgactgtggctgctgcgatgtaatgtaacattgtagacttggattcataagcttctgctccaaatggtgaataaaatgaagcacgcggtttgtagctgctactaccagtatcaggacagtttctttttgctcgtttcgtataggttgattaagctatttttaagggtacatctccttgctttatgttattctgaattttcttatctgagatgcattattgaatt

SEQ ID NO: 67884 - DNA, 1364 bp, Zea Mays
aagtttgacgcactgccatctaccaagcactctaaactttcggaccaaaccatgcatcgggatggcattagcgtggaaaaacaggacccagcaaccacggcgtctgaacaaggtactctgcatgtctgttcaacaagcaagcagaagcaaggttgctgtcgtgcccatcgagttggagaaggcaaaggagccaccgctccacctgtacaaaccaaaggagccttacacggccacgatcgtctctgtcgagaggcttgtaggacccagagctcctggcgaaacatgccacgttgtcattgatcatggcggcaatgttccgtactgggaaggacagagttacggcgtcattcctcctggagagaatccaaaaaaacctggatctcccaatactgttaggctctattcaattgcttctactaggtatggtgattcttttgatggaaagacagcaagcttatgtgttcgccgtgctgtttattatgatcctgaaactggagaggaagacccctcaaagagaggtgtctgcagtaacttcctgtgtggctcaaaaccaggggacaaagttcagatcacaggcccctcgggcaaaataatgcttcttcctgaggatgatccaaatgccactcatatcatgattgccacggggaccggtgttgctccctaccgtggctacctacgtcgcatgttcatggaagatgtcccaactttcaaatttggtggtctggcttggctcttccttggtgttgcgaactctgacagccttctctatgacgaagagttcacaaactaccttcagcagtatccagacaatttcaggtacgacaaagcgctaagcagggagcagaagaacaagagcggcgggaagatgtacgtgcaggacaagatcgaggagtacagcgacgaaatcttcagactgctagatggcggtgcgcacatctacttctgtggtttgaaggggatgatgccggggatccaggacacgctcaagaaggtggctgagcaaagaggcgagagctgggaccagaagctgtcacagctgaaaaagaacaagcagtggcacgtcgaggtttactaggctataagatggcaaggattgtgattgtttagctactgagctgagaaactggacgtatgattgaacgactgtggctgctgcgatgtaatgtaacattgtagacttggattcataagcttctgctccaaatggtgaataaaatgaagcacgcggtttgtagctgctactaccagtatcaggacagtttctttttgctcgtttcgtataggttgattaagctatttttaagggtacatctccttgctttatgttattctgaattttcttatctgagatgcattattgaatt

SEQ ID NO: 67885 - DNA, 380 bp, Zea Mays
ctttcctgcccgcttcccagcaatggcagcaaggtgtagcctttcctcgtcatccctgtcggtccatggacccctccgccacaataaacccagcaagagactcgctccatgcctgccatcggcgccaagaccaggagccgctgctctgagagcgcgtgctgcgaaacttcctccaggggttgaagcgcccagggtgcagccgaagctgagcgagcccttcttggggttcacccagaccgcggagatttggaactccagggcctgcatgatcggcctcatcggcaccttcattgtggagctggtgctgaacaaggggattcttcagatgattggggtggaggtctatcatgactcgatcctgagaagtgtgttgagggagg

SEQ ID NO: 67886 - DNA, 682 bp, Zea Mays
tgcattctctctttcctgcccgcttcccagcaatggcagcaaggtgtagcctttcctcgtcatccctgtcggtccatggacccctccgccacaataaacccagcaagagactcgctccatgcctgccatcggcgccaagaccaggagccgctgctctgagagcgcgtgctgcgaaacttcctccaggggttgaagcgcccagggtgcagccgaagctgagcgagcccttcttggggttcacccagaccgcggagatttggaactccagggcctgcatgatcggcctcatcggcaccttcattgtggagctggtgctgaacaaggggattcttcagatgattggggtggaggtgggcaagggtctggaccttcctctttgaagggtgaccaaatagtaacattatcgtttgatggcgtattatgctggccgaaaaacatgagggtttcacttgcttttgacttggtggctacatatgcatgttcatcaagcatgtccttggatatccggatgttacaacatcaactatgttaatgacttggtggctggccgtttgacagggttaattggtgaacaaaaacgtgtgccttgtgaaacagaggaagataattgatgccaccgtgagattagtactggtttataaggtctatcatgactcgatcctgagaagtgtgttgagggagg

SEQ ID NO: 67887 - DNA, 1435 bp, Zea Mays
ttttttttttttttttaaaattcaatggagagtgtcgaataccatccatgtgatgttgatgatgttaataagccttctagtgcactcaggagtggtttaatgagtgacacgttggatccgaattatagcaaccaagcacagcaaagcagttttgtacagcctgctgctgaaactgaaagcaatgcaagagagataggagggagtagtatgaatggaggggaagaagtcctcaatgctgaaacaacccctgcatttgctagagatcaacttagcctgggagttagcggggggagtgtcgggatgggtgctagtcatgaagctgaaattcatgggattgatgtttctgggcataaaactggtagcgttgtcggagatgctgatccaattcctgagctcatcgagactatgggccacactggtgagtcagctcctggacctgcattgatggatgagtttgtccctgaagaagttggtcgagaaggtcctaatggtgatagccaagatatggcatctcggttagcggttcgagctgacagtggttctaaaatttgtggttcaactaaagctgattcagttgagagtggagagaagacgagccgtgagaatagcgcacatccttctctttcttgcaatgcaagagttttttctggcattgatgcatcaaaagacgaagtgactggtataatgctaactaacgatgactatgatccaggaagtggtctaggagcaacaaatggaggaaacgattatgaaacaggtcttccagacttcgatccaataaggcaccacaacgattactgtccttgggtgaatggaaatgttgctgctgcatgttgtattagtaccggttcgagcacagctctttcaggctggcagctcacggtagatgccatcgagactctgcagtctcttggccaggctcaaaatcagacgatgcagtcagactctgcggcttcattatataaggacgatcacgtcccgcctagccggaagctgctgaaaagtgcgaaccacagcaagagctgagctctggagcaagattcttcaatgctcatagaaaagttgtcttgtcgaggccctaacctgagcaggggcaatggcttgcatttctgtgaaatttggtcttagtgtggtcgtgctgcatttaccggaagagcttagaaaccatggacacgcgtgataagagataattcttaggccgtgatgtgtgcaggtgacatggcttgtcccccgccatcttgcaaaattgtttatgtcaggttgattgtatctatctacatacatgttatgttatttcagtctcctggagtctgtaacatgtaacgtgccatttcgttgatggtttgtcctactgaataatattgacacagacgaccacatttatgtattttgtgcgaaaacttgcaaggccctcgatcgagatgttaagcttcca

SEQ ID NO: 67888 - DNA, 1586 bp, Zea Mays
ctgaaaattaagtgggaacgcgccacatcgctggaccaccgatcaagcgagagatctcgaccatgaagctcatcaggcaccccaacgtcatccggatgtatgaggtgatggccagcaagacaaagatatacatcgtcatggagctcgtcaccggtggcgaactcttcgacaaaatcgcctcgcgtggaaggctgaaagaggatgacgcaaggaagtacttccagcagctgatcaacgctgtcgattactgccatagccgaggcgtctaccaccgcgatctcaagcctgaaaatctcctgcttgatgctagcggcacgctcaaggtttcggattttggactgagcgcactatctcaacaagtccgagaggatggtctgctgcacacaacctgtggaactcccaactatgttgctcccgaggttataaacaataagggctatgatggagctaaggctgatctgtggtcatgtggagtgattctctttgtcctcatggcggggtacctcccatttgaagattcgaacctgatgtcgctctacaagaagatcttcaaagcggatttcagttgcccgtcctggttctccacaagcgcaaagaagctcatcaagaagatacttgatcctaatgctaacaatagaataactattgcagagctcattaacaacgagtggttcaagaaggggtatcagcctcccagatttgaaacagcagatgttaatctggatgacgtgaactccatcttcgatgaatccggggagccagcacagcttgttgttgagaggagagaagaaagaccatcagtgatgaacgctttcgagttaatctctacgtctcagggcctcaatctcgggacgctcttcgagaagcaaacgggttctgttaagcgagaaacaaggtttgcgtcaaggcttcctgcaaatgagatactgtcgaagatcgaagcagcagcgggacccatgggcttcaacgttcagaagcgcaactataagctgaagctgcaaggggagaaccctggaaggaaaggtcagctggccattgcaacagaggttttcgaggtcacgccttccctgtacatggttgagctgcgcaagtccaacggcgacacccttgaattccacaagttctaccacaacatctcaaatggactgaaggacgtgatgtggaagccggagagcggcatcgtggaaggcgacgaggcgcggcaaaggaggtccccgtgatggggtctgcaaccaagttttagaagtagcgctgcagataactagtcatcagggagcctggcgggaactgagcctgtgactgcttcctgtttgtttggatgttttgtttttgtctaaggtgctttctgactaaagtatgctggataatgtgaatgaagaatgtgcagagttttcagcaaagtaaggttgtcggattttctttcgtttgtgcagtgttgcacgtggtggagagttgcccgttgctgacgaacttgctatcttgctagctagagcctagaggataaatatgaattcaaaatacgagtagaaatatcttaaagtctgataaattttgtagagaaaaatataaagatccaacacatcaaa

SEQ ID NO: 67889 - DNA, 1591 bp, Zea Mays
ctccattcatggaccatcactcgttcaatgagttgtaacaggcgacatcaagcgagagatctcgaccatgaagctcatcaggcaccccaacgtcatccggatgtatgaggtgatggccagcaagacaaagatatacatcgtcatggagctcgtcaccggtggcgaactcttcgacaaaatcgcctcgcgtggaaggctgaaagaggatgacgcaaggaagtacttccagcagctgatcaacgctgtcgattactgccatagccgaggcgtctaccaccgcgatctcaagcctgaaaatctcctgcttgatgctagcggcacgctcaaggtttcggattttggactgagcgcactatctcaacaagtccgagaggatggtctgctgcacacaacctgtggaactcccaactatgttgctcccgaggttataaacaataagggctatgatggagctaaggctgatctgtggtcatgtggagtgattctctttgtcctcatggcggggtacctcccatttgaagattcgaacctgatgtcgctctacaagaagatcttcaaagcggatttcagttgcccgtcctggttctccacaagcgcaaagaagctcatcaagaagatacttgatcctaatgctaacaatagaataactattgcagagctcattaacaacgagtggttcaagaaggggtatcagcctcccagatttgaaacagcagatgttaatctggatgacgtgaactccatcttcgatgaatccggggagccagcacagcttgttgttgagaggagagaagaaagaccatcagtgatgaacgctttcgagttaatctctacgtctcagggcctcaatctcgggacgctcttcgagaagcaaacgggttctgttaagcgagaaacaaggtttgcgtcaaggcttcctgcaaatgagatactgtcgaagatcgaagcagcagcgggacccatgggcttcaacgttcagaagcgcaactataagctgaagctgcaaggggagaaccctggaaggaaaggtcagctggccattgcaacagaggttttcgaggtcacgccttccctgtacatggttgagctgcgcaagtccaacggcgacacccttgaattccacaagttctaccacaacatctcaaatggactgaaggacgtgatgtggaagccggagagcggcatcgtggaaggcgacgaggcgcggcaaaggaggtccccgtgatggggtctgcaaccaagttttagaagtagcgctgcagataactagtcatcagggagcctggcgggaactgagcctgtgactgcttcctgtttgtttggatgttttgtttttgtctaaggtgctttctgactaaagtatgctggataatgtgaatgaagaatgtgcagagttttcagcaaagtaaggttgtcggattttctttcgtttgtgcagtgttgcacgtggtggagagttgcccgttgctgacgaacttgctatcttgctagctagagcctagaggataaatatgaattcaaaatacgagtagaaatatcttaaagtctgataaattttgtagagaaaaatataaagatccaacacatcaaa

SEQ ID NO: 67890 - DNA, 672 bp, Zea Mays
tcttaggtagtgtttggttgaggagccaagtagaacggaaccgttccgtcccagttttggtgttgtttggttacaaaggaactagaacggaacggctccaattagggaatattctcttcagatccggaaccatctcgctccaaaaaatcgagaggacagagccgctccattccagtccgctctcctcaccgctctctctgctggaaactcagattgattgcacaaagaaggagagccaagaacaactgcacctaagctggatataatggaaggagaggttaaaggtggaactgtttggacagtaagtcagaaagcttttgtgcaagagtttcttgctaaccttgttgctgatggttccaaaacatcaactggtttcaaaagagttcatctcagtgcttgtgctaaagctttgaacaatcattttaagatcaatagaactcctgaacaaattggcaaccacttgaaaacattgaaaaaaagtacattaggatcaaccaacttaggagcaagagtggtgctaactgggatgaagagaactttatcatccaatatgaccatgagatgtacacaagtaattttaaggatgagaatggaaaggagatcaacaagggtgatgatgagtacataaacaagcctcttccatactatggaaatctagctaccatcttcggt

SEQ ID NO: 67891 - DNA, 1124 bp, Zea Mays
tcttaggtagtgtttggttgaggagccaagtagaacggaaccgttccgtcccagttttggtgttgtttggttacaaaggaactagaacggaacggctccaattagggaatattctcttcagatccggaaccatctcgctccaaaaaatcgagaggacagagccgctccattccagtccgctctcctcaccgctctctctgctggaaactcagattgattgcacaaagaaggagagccaagaacaactgcacctaaggattgtattggggccatcgacggaacacatattcgggcgtctgttcctaaggaattggaacctgcatttcgtggtaggaagagttacactacacaaaatgtaatggcagtcgtagacttcgatctacggttcacatgtgttatagctggttgggagggaacagcccatgacgcttcaatattacgagatgctttagaacggccaaatggtcttcgtgttcctcaaggtacaataaaatttgagtagatcatttgagtagctcatttgagtatataatgactactgtccccttatatgatttaggcaagttctacctagttgatgccggatatggagccaagccgggtttcctgcctccatatcgtggtgtgaggtaccacttgaatgagtggggcagcaacccggtgcaaaatgagaaggaattgttcaaccttaggcactcatctctcaggctggatataatggaaggagaggttaaaggtggaactgtttggacagtaagtcagaaagcttttgtgcaagagtttcttgctaaccttgttgctgatggttccaaaacatcaactggtttcaaaagagttcatctcagtgcttgtgctaaagctttgaacaatcattttaagatcaatagaactcctgaacaaattggcaaccacttgaaaacattgaaaaaaagtacattaggatcaaccaacttaggagcaagagtggtgctaactgggatgaagagaactttatcatccaatatgaccatgagatgtacacaagtaattttaaggatgagaatggaaaggagatcaacaagggtgatgatgagtacataaacaagcctcttccatactatggaaatctagctaccatcttcggt

SEQ ID NO: 67892 - DNA, 1963 bp, Zea Mays
tcttaggtagtgtttggttgaggagccaagtagaacggaaccgttccgtcccagttttggtgttgtttggttacaaaggaactagaacggaacggctccaattagggaatattctcttcagatccggaaccatctcgctccaaaaaatcgagaggacagagccgctccattccagtccgctctcctcaccgctctctctgctggaaactcagattgattgcacaaagaaggagagccaagaacaactgcacctaagatggatgagggcgatgattttctagtctatgtagctgctgctcatgtggttctttcgatgatggcaattgttattagagcttgaaagagaaaacgacatggtcatgcacccgtaggacaaattacttatgctccaattgatgagagggataggaagcgaactgagtatctcaatgataaaatttggaagaatgatgttacttgtgtcaatatgattaggcttagtagagcatcgttctttcgcttttgtaaacttattagggatcgaggtttattacaagacactacacacatgtgtgttgagcaacaagttgctatgtttttacacacaattggccataatgttaggaatagagtagttgccactaattttggtaggtccggggaaaccgttagtcggtacttcaataaagtgcttcatgcaattggagagctacgcactgacttcattaagccaccatcatcgacgacaccatctaaaattcaagggaacccacgctgggatccttattttaaggattgtattggggccatcgacggaacacatattcgggcgtctgttcctaaggaattggaacctgcatttcgtggtaggaagagttacactacacaaaatgtaatggcagtcgtagacttcgatctacggttcacatgtgttatagctggttgggagggaacagcccatgacgcttcaatattacgagatgctttagaacggccaaatggtcttcgtgttcctcaaggcaagttctacctagttgatgccggatatggagccaagccgggtttcctgcctccatatcgtggtgtgaggtaccacttgaatgagtggggcagcaacccggtgcaaaatgagaaggaattgttcaaccttaggcactcatctctcagggtaacagtagaacgtgcatttggttctttgaagaggcgattcaaaattcttgatgatgcaataccattttttccattccctacccaagtagaagttgttattgctgcttgcattatccataattgggtcatagaagatggcggtgatgatttcattatagccgaaaatgatgacctccctggcattatccatcaaacatcaacacatggacaagcaacagaacatgccttcatggttaattttaggcaagaacttgcaaatgccatgtggcaagaccgtcaacaatattattctaatgcaccatgagtctgtaaaccatatatgtaccattttgtttgtatgactctatgtaccattttgtttgttgctgaaatttagtattatttggtttcatttaaagctggatataatggaaggagaggttaaaggtggaactgtttggacagtaagtcagaaagcttttgtgcaagagtttcttgctaaccttgttgctgatggttccaaaacatcaactggtttcaaaagagttcatctcagtgcttgtgctaaagctttgaacaatcattttaagatcaatagaactcctgaacaaattggcaaccacttgaaaacattgaaaaaaagtacattaggatcaaccaacttaggagcaagagtggtgctaactgggatgaagagaactttatcatccaatatgaccatgagatgtacacaagtaattttaaggatgagaatggaaaggagatcaacaagggtgatgatgagtacataaacaagcctcttccatactatggaaatctagctaccatcttcggt

SEQ ID NO: 67893 - DNA, 916 bp, Zea Mays
tcttaggtagtgtttggttgaggagccaagtagaacggaaccgttccgtcccagttttggtgttgtttggttacaaaggaactagaacggaacggctccaattagggaatattctcttcagatccggaaccatctcgctccaaaaaatcgagaggacagagccgctccattccagtccgctctcctcaccgctctctctgctggaaactcagattgattgcacaaagaaggagagccaagaacaactgcacctaaggattgtattggggccatcgacggaacacatattcgggcgtctgttcctaaggaattggaacctgcatttcgtggtaggaagagttacactacacaaaatgtaatggcagtcgtagacttcgatctacggttcacatgtgttatagctggttgggagggaacagcccatgacgcttcaatattacgagatgctttagaacggccaaatggtcttcgtgttcctcaaggcaagttctacctagttgatgccggatatggagccaagccgggtttcctgcctccatatcgtggtgtgaggtaccacttgaatgagtggggcagcaacccggtgcaaaatgagaaggaattgttcaaccttaggcactcatctctcagggtaacagtagaacgtgcatttggttctttgaagaggcgattcaaaattcttgatgatgcaataccattttttccattccctacccaagtagaagttgttattgctgcttgcattatccataattgggtcatagaagatggcggtgatgatttcattatagccgaaaatgatgacctccctggcattatccatcaaacatcaacacatggacaagcaacagaacatgccttcatggttaattttagctggatataatggaaggagaggttaaaggtggaactgttt

SEQ ID NO: 67894 - DNA, 1525 bp, Zea Mays
tcttaggtagtgtttggttgaggagccaagtagaacggaaccgttccgtcccagttttggtgttgtttggttacaaaggaactagaacggaacggctccaattagggaatattctcttcagatccggaaccatctcgctccaaaaaatcgagaggacagagccgctccattccagtccgctctcctcaccgctctctctgctggaaactcagattgattgcacaaagaaggagagccaagaacaactgcacctaaggtatacttgtaagacgaatttgccgctctattgacttgaatatactatcttcatgtgttgtgaattggttatgtattttttgttgtcatatagatggatgagggcgatgattttctagtctatgtagctgctgctcatgtggttctttcgatgatggcaattgttattagagcttgaaagagaaaacgacatggtcatgcacccgtaggacaaattacttatgctccaattgatgagagggataggaagcgaactgagtatctcaatgataaaatttggaagaatgatgttacttgtgtcaatatgattaggcttagtagagcatcgttctttcgcttttgtaaacttattagggatcgaggtttattacaagacactacacacatgtgtgttgagcaacaagttgctatgtttttacacacaattggccataatgttaggaatagagtagttgccactaattttggtaggtccggggaaaccgttagtcggtacttcaataaagtgcttcatgcaattggagagctacgcactgacttcattaagccaccatcatcgacgacaccatctaaaattcaagggaacccacgctgggatccttattttaaggattgtattggggccatcgacggaacacatattcgggcgtctgttcctaaggaattggaacctgcatttcgtggtaggaagagttacactacacaaaatgtaatggcagtcgtagacttcgatctacggttcacatgtgttatagctggttgggagggaacagcccatgacgcttcaatattacgagatgctttagaacggccaaatggtcttcgtgttcctcaaggcaagttctacctagttgatgccggatatggagccaagccgggtttcctgcctccatatcgtggtgtgaggtaccacttgaatgagtggggcagcaacccggtgcaaaatgagaaggaattgttcaaccttaggcactcatctctcagggtaacagtagaacgtgcatttggttctttgaagaggcgattcaaaattcttgatgatgcaataccattttttccattccctacccaagtagaagttgttattgctgcttgcattatccataattgggtcatagaagatggcggtgatgatttcattatagccgaaaatgatgacctccctggcattatccatcaaacatcaacacatggacaagcaacagaacatgccttcatggttaattttagctggatataatggaaggagaggttaaaggtggaactgttt

SEQ ID NO: 67895 - DNA, 754 bp, Zea Mays
cttcaatctcctaaaaactagtgttcaggccaacccacatattgttaggctgtatttagatgcaccctggtttttttagaagttggtttctagatctggtttctaaaaacaggattttagtagaaaaaaatagaagaaggtggttagatacatatagtttcttagaaactggttttacctagagaagactcagaaactagtttaattaaggacggatgcatatatttaaatggttggtgataaatttagacatatataaaacatatacatcaaatatcgtataaaatctaactaattttacttaaggacggatgcagtacatagctttgagcatgcatttgtatataaaatatatgtctaccttcgtaaaaatgcgagcaaccgcgctacgtaggtgaagagaattttagccccggcgcacagacagagccgtctgtcgcctaagctggtgacttttgagtctttgactccgatcgaggtctcaatcgttgcaggctcggtcacagttgaaaatcctcacaaaacaatttcgcacgtgctgcgccaaatgtgttttggggtttaggcagggacttggcctcctccacaaattgtcttcgtctcgtctccatctgtacgtctactacctccacggtccacacgcgcaaacacaaagaaagacgagtgaccaactcgcatgtagagatagatggaagttttcgagtctgatcctcctcggttcttgggtccaatgggtttggactttggattcgag

SEQ ID NO: 67896 - DNA, 1451 bp, Zea Mays
ccccgaattttctgcatatatctaaaaaaaatatcgaattacatcaaatccgaggagcagccacagccatccatggaggcgctctacttgctggcctccctggccgcgaccctcgtcacatccgccttccactcgctcctgctgctcctccgcctcctcctccgctacccgcgccgcgctgcccctaccgatgatgggcccgccgcggcggcgcggctctacgagggccgggtccggcacgcgcgacggcgcccggcggcgcacaccttcgagtaccccgcgcgctacgccctcgtcgacctcgaccgactgccgctccccggccacctctccgccgacgatgcccgccgcgtcgcctccacctccggccccgtgcacctcttgacggtacccgagagcgtggggtacgagcagaacccgctgagcatttactactgctacgattctgcaggacaggggcaagatggagagctcagaacgtgcattgccgaggtcacaaacaccccctgggcagagagagtgatgtttaccttccaaccgggctctgatctcatcgcgaagcccttgcatgtcagcccctttatggacatgctcagcaactggagtattcgcgctgatgctcctggtgatagactttatgttgttatatcagttcagcatccgacacttggggactacttcactgcagttttggatgccaaattggatggacagacaagtaattctctgaggctggcaaccttcttctggctgatgccgcacaaagttgctgcatgatatactgggaggccctcaaactttggctgaagaacgtcaagttcctggaccatcccaggtatctgaacccgaggtacagggacgaagcgctggagcgcgaccttgagctccgcacctcttgctgccaccttcagcggcaggagcggaacgaccggagaagcagaactgcagaaaagacagctgaaatcacggaccacgtagatggcaagggcgacgcggacatcgcgaagaggtggtgcgtttggagggacgctgggtggccgtggtcatgaaaaaaaactcagacatgccgttttgtgttcgttcagacttcagattcagccgctggtgctcccgtttcgaccaaatatcgtagttttatttggttggtgccttcgcagccgccactacgagttgacagtatcgataatgggtaacgttgttcgctgttaaagaagaagagattactagggacatgcttttctctctttctcaaaagatgcattttcttcttcgtagtatccagtttttgaccaattattcggcttcaatgtataacatttggaatgtgcaagaggtgcgcgtcagcgcgtgtatgctgccatcttcaatgcacatgcgtgcctgattgctgcaagatatattacattaatataacattacatcatatgtcgttatattatattgtttatgtt

SEQ ID NO: 67897 - DNA, 5018 bp, Zea Mays
ctcatagtattttcttgtcactgctgcataagttgagaggtaaaccaacaacataaatcacaaagtgtattgtgtaatctaggtacctagattgtaataatccataagcaggtcaataagtgcttatataatccataagctagattatataatcccggaaggagacgagacaaacagggtcaacacatttttgagacattgcaagagcatcaagatcaccaacttcaaaattttctcaggcttattcaggagaacaacgtcaaccacatcattctcagaccaactccagcaacactccccatcccactccgcatccgcattatacacgctcagagtcactatttcgctctccagcagcctccgcatccgtctccgcaaaacagacgccgtgtacctgcactctccttttccacggtttctctctcctctccgcacaagactgcatgcgccacctcctgctcgcgggccccagctgtcatagactgcatgcggagtgcaaatacggagtctgatagaaacggggacgaatacggagaggagagagaaactgttggccgtgctaaatacggatacggagagggagtctgctggagttggtcttagagtcttagacattgcaattactagtagaatttctttccaatgcactacccagcaacacattttttttttgcacacacaaaaaaaggaaagctgtgtaatttcaatgcaagacgcgatgcagtaacagcctttatagtttgagcgaaaggagcagcacacatcaacaggtcgcatcaccaaaatcacataacagtatcaaaattttctagtataaattgagcgtgacacccaacaattacgagcagaacagcattatttcgcccccacaaagggggccaaaattaacctcacgaactaatatgaacctaataaccaaccgagcaattgttagttacactcaaacggtcaaaccttctcagaaaccgcttcttctttcttctccttctgagcaattgtttcttctttcttctcctcgccggcggccggctggggcacggcctcttccttaatctctccttcggtcgctggctcccatcccttggccttcgcagtctcagcagcagctgcagctgcagctgcagcggcctcggcctcggcgcgctcgttgacggcctcctcggccatgagcacgggcgcgtagtagtcggcgtgcgcgtccatgcacttcttgaggttggcggtggcctcgtggcaacgctcgaccatgtcggcgccctccttctgcgccgcctccacgcactcctcccacgccacgaaggtgtctctgcagccgccggccttcatgaagaggcagaacccgcactctccttcctcctcaacttcctcactctccccctccgctgctggggcaggctcttgcggctgcggcggcccttcttgctccgccgcggacgagtgcgccgtggtgggtgtgggagtggtgggggtctcttgcgcgaggctgggatccacggcgggctcgggggacgccattgccgtctgtgcgaggtgaggtcgctcggaaggtagtatggggggcgatgggatgcggcgcttggtggcggcggtacaggtacttcttggggaggaagaagaaatcccgccgccggccgaggagcacgtcaacctggtgttggtctggtctccaaaaggggttgacccctcgtgggccgtgggttcgtgtacgagtagtatggcttgaggctcataaaatcatagaccggttactcggcccatacccaatgccacacgattaatgaagcaacgcatataagcccatcgattcggcccagcggccccatccggtagcggataagaagaggacaacttatttatcgacggcgagaggctgcactgccaccgccactggacgtgcgctccctccacgctccggcccttctcgcctctccggccatggccaccgccgccgccgccgtcacggccaccttccgcaccctgatccagcacgcagcggcttgtggcgcccccgtcccgctccccagcgtccggttccagagcctgcagcgccaccgcgtcggcctccgccgcttcgcgccaccgcgtgggcgccccgtcctacccccgcccttcgccgccgaggacttctcttcctacgtagatgatttctccggggacgacggcgaggagcacttcgatgaggaagagggctctgagccggaggaggaagccgaggccccgcgcgcgtactcgtcgccacgaagccgcccgccgcgcggcgacgaccccggccgtctcttcgtcggcaaccttccctacacctatacctccgaggagctcgcccaggtgttctctgaggccggcagggtcgacgacgcgcagataatctacgacaaggtcaccaacaggagccggggcttcgccttcgtcaccatggccaccgccgaggaggccgccaaggccatccagatgttcgatggcgccctgctgggagggaggacggctagggtgaactacccggaggtgccgcgtggcggggagaggagaacagtcaccatgagtggccgcaggcgtgacgatggcacttacaagatttatgccggcaacctggggtggggggtgcgtgccgacacgttgaggaacgtgttcgagggtagggccggcttgctcgacgccagggtcatctttgagcgtgagactggtcgctccagagggtttgggttcgtctccttcagcaccgcagaggatgcacaggctgcattggagtctttggatggagtggagctggaagggaggtcgcttcgtcttagtctggcagaacagaacccgccacctggttccccgcctagcactgcgcaggcacagcaggaagaaacggattcaggcgcacctgctggtgggggtacggaggcagccagttcttcagaaccatctgaagcagaggtgggcgagagcaacttgcaaacagctgcaaattattgataagcaggagccacagggttataaatgtgttgcaacgacctctaaatcctgccattcgagtccaaggtgtgctgatagggaagtaaattttgacacgagtgatgctgtagcgaggattcagcatttgagctatacatatacactagaatggattaagtgttgttaggaatgtatttgtgtaatgaattctgcaaagtatgatctcaactgcagttgtgtagcctttctcttactgtaaactgatcctttttcaatgttctgttttcgttcagagtgtgtgctcaactcatagattttgtttgtcaggcaaattttcaaatgaactggagcgatatgggaggtataaactatttttcaattgacatttcaaagatgtaatcagttgtaagtcgtgcctctattttgtgtaaactcagtaaaaggaacagcagttcaaatggttttaggtcatagcctcagcagggcagtgcacagtcagaacgcgcctgagatgtcatcaggctcatgggacatggcgaaattggcagcgaggacaaaagtataccagaccaaaaatatttcgtaggcatattgaaagatgtaacatgaaagcatgcatgaccttatgccgaagcagaacttgctgaaggatggcatcttcttgctcgagtccgttaacactcaggctgagctactgtgtctggaagctggtagatgtcaccgagcagaagctgggaaaggaaggctgctgaacaggattcaggaagcagaaagcatggaggctgcatacttcctacgcacaagtgaagaaaaatacatagaccatacgcccacttaccactctaccacttcaattccatgacggacttctatgatacctagcttgagagagatcacaggcatgtggtgaaccatacggagagaaagagcactgaaatgaaccatatcgagcacaggtctcactctacaagtaaagttcgataagctcttagcggagttgtgcctgctatctactaagtttgtgctagggaaagaaaggaagcagagagttctcactttgtacttggactcaaacatccaggccaggaggactcaccatgacttaatgaaaactaccgtaactctagctagactgtgttgtcagaaacagtgcgacatttttttttgggtggaagcaaattaccttgcagacttgtacgggatcacaatcccatctactgaatttaacgaaggttgattgatccagcgtctgcactgcttgcagatctaatatttgtgcacactgtttcacttctcatgcttgattatgcctcacgaataagattattgttagcgttcttgggaaaggttttacataatgttttcaaccgtctgaatcatcctgattagaccttgttcggttatggatgggattgaaaaaaattatgaaagattttgacttatttgggattaaaacctactcaattccatcctaacccacatggattgagagcaaaacgaacaaggacttagactttgttcggttattccaattacatgtcgattagaatggattgagatggattttcactttatggatttaaattggctcaataccacccaatccacatgggttaaggatgatttgaacaagctttgaacaataatccatatggtatcctaatacattccaattcacatgtaattaaaatagtcaaacaaggccttacgtggaatagggatgttggtttcctttatacagagctatgttgttgggtgtacacaaattggatattcattaaattgctttgctatcagttggtagtgcaaaattgattgaagctttcacatctgcagtatagtgtcaccttttttgcccactttattctaaattacaagatattatagcatttctagatttatagtttttagttttttactacgcacgatgcacctaaatatatgttgtatcgagatacacaacaaaagcgacgaatctagaaatatcttacaatttaaagttaagaaagtaaatacttttgtaagaaatgataaaacgtcttgtactttagatttagaacagtgaaaatacctttttt

SEQ ID NO: 67898 - DNA, 1877 bp, Zea Mays
gcaaaggcgagtggcgtgttcgatcatcatcgccgccacccttccttgttgaattgtcgatgctagcaggcagtagtaatagcagtcccgtcgcgtccatccatccatccaccaaccaccaccattgtcatcaccctgctctgcaactgcaagtcacaggcgcggcctctgacaccgcccctccgactccgatcctctgtcgttcggtgacactgacatgggctgctgcctccaccgccgcctctgcctcggcggcacgggtaccctgccgttcgtcaggcggttcacggccaaggaggtggaggccgccacgcgcggcttcaccgcggtgctcgacgccgccggcacggcctacagggcgcgcttcgccggcggcctcgtcgccaccgtcgtcaggcgccgccgcgacgccgacgacaacgacgaccaccatcgccagggagagggaggaggaggagggaccacggacgccttctacctggagctgcagctgctggcccgcctcaaccaccgccacgtcgtcaggctgcgcggcttcgcgctagcccaccacgcaaggttcctcgtcttcgatcacatggagaacaggagcctcaaggaatgcctccacgatccgctccggacgccgctggactggcggaccaggctgcaggtcgccattgacgtcgcggcagcactggaatacctctactaccactgcgaccccccggtgttccacgtgtccgtcaactccggcaccgtgctcatggacgccaacttcgtcgccaagctatcggatgtcggcgtggtcagccacgacgtgaggctcgccaccactgactccttccaagaccgggtcgagcggaggcgggcgggcctggcgttccagtacggcgtgctggtgctggagctggtgacggggcagtccccgggcgccgacggcgagctcgtgcgctgggcgcaggaccccggctccgccgcctccgtgcaccggatggtggacgccgacctcggcggcgtctacgacgcccgcgagctccgcgacctcgtcgccgtcgccaggctctgcaccagggacagggacgacagggacgagggcgctggcgtcgtcaccattccgcagatcgtcaggtacctccaggggaagctggagcggatcggatgccaggccagcctgtctgtaccatcaaatgtacaaaagcgcgtggcttttcttctgtggatgcccagaatctgttggtgtcgatcagtcgatagaggaaccaaaggcatccatggcgcgcggagggccaagatccacgagggttgggccatcccccaggtggtggaccacggcgtggacgccgtgacggtggtcaacatggcgcacctcgctcgtgacttcttcacgctcccactcgaggacgagttcaagatgctcgaccaaatgtctggcccagctaggaagttacatgtgcatgccgacgagaacagtgatgacggggctaacccaccgaaggcgtacctgccactaaattgtgtttccatcgtcgttggtagatgccgggagaagcagcgcaaggagtcctctcgtctacaaatcgtgaaccgaaagctgagtgcgatgaacaagctgttgatggaggagaatgaccggctgcagaagcaggtttcccgtctcgtcttggacaacgggtatatgaagaatcgactccacagtccttctgtagccaccaccgacacaacctgtgagtgcgtggtgacaagtggtcagcacaaccaacaacccagcagttctgcatcctccacaaagggatgcgaacaacccagcaggtctactcgctattgctgaggagacattggcagagttcatgtccaaggcgactggaactgctgtcaactgggtgcaaatggttggg

SEQ ID NO: 67899 - DNA, 912 bp, Zea Mays
ggctggttcaggaatagaggtagaaatgcagagctgagaaaattagtttgaaaaaaaagtatagccaaaacaattcagtttaaaatccatcctagacgccaaaaaacaacgtagtgctgacagtgacacctgttcttttgaatatcagcatcaaagatgaatttcaaactgaattgttgcgtctacacttaactttagttgtattacatatatatgatttttgaaactttgcaacatgatattttagaacaagggcaccagcccccctgggcgccatatggttttccatttggattaattgggtgatgcaaacaatcaaaggaggcaaagtatgcatctctgaatgggcaaagggatcatattttggaacatttaggagggcttgatccattatcacctcttcaacttggcagcagattctctcggtgtatttctgacaacggggtccagaaagaacacattaggggagtacttggtgacttacaaccaggatgggtctcacattgtaatacccaaattgtaattgttatgagataatgaaaaaggggacacaatttcacttcatcgatatgtgagtttgacttttatgcatcatcacatgtgaacaccatctttaaaaacaagtaataaaaatatatactactaaattatgcatcatgctggatattgtttttgtgtgtgcattttgtgataaggaatatagtaaaaaaagggtccaaagtggaattcaaaacttaaaagagattctaaaatttagaaaagagaagcaaataaatattatgtgatatagaaatataaataatatataaatatatctccaaatgggaattttcatggcacaatataatctaaggataaaattgtcacaagtttgaattgaaactagaatttaaatttgaatttggaaaagag

SEQ ID NO: 67900 - DNA, 2270 bp, Zea Mays
gagagagagagagagaaaaaggaaaaaaaaaacgcggcgcagaagccagaagaaccagcgagccaactcccaacctctcgcccgatctcgatctcgatctcacgggcgccgccgccgccagcgacgatggatccagagatgctgcggctggcgcaggagcagatgcgccgcatgtccccggacgacatcgcccggatgcagcagcagctgatgtctaaccctaacctaatgaggatggcgtctgagagtatgaagaacatgaagcctgaggacttaaggcgagctgcagagcaactgaatcaaacaagaccggaggatatgcgtgatatgaccgagaaaatcgccaacactactccggaggagtttgctgctatgaaggcgcaagcagatgctcaaatgtcctatgcgatgtctggtgctaagatgttaaagaagcagggaaacggacttcataaccagggaaagtattcagatgctgctagtaaatataagcttatgacctaaaactaacagttaaactatatgcaatgttcttgatcaggctaaggataacttaaaaagcataccatcgtctacggcgcatactctgcagttgcaatgtacacttaatttaatggcttgttacttgaagacaggccagtttgatgaatgcataagtgaaggtacagaggttctaagttatgattcaaacaatgtcaaagcatattatcggaggggtcaggcatataaaggactcgggaagttggaggcggctgttgctgatttgagtaaagcccatgaaatttgcccagaggacgaaactattgctgaggttctaagagatgctgaagaaaaacttgcacgggaagggggaggagtgagcacgcggaaaggtgttgttattgaagaagttgttgaagatggcgcttcacagccatcaagcagtgaaagaaattcttctgggtatactgtttcacaaccacctgaaggagcaggaaatattgggctgtcagggtctttagaaaggccaagggatgatcctacttctatcaggtcatcccaaaattatgtgtccaagagcgatcctgaaggcttatcaaacttcggaattgaaggaatgtcgcctgaacttgtcaaaactgccactgatatgattggctcaatgaaaccagaggagcttcagaaaatgttcgaagttgcttcttcattgaatagcactagctccgctggtccaaatctgggacccaatatgccagaaatgtctcctgatatgcttaagatggcatctgacatgattgctagtatgcctcctgatgacgtacagaaaatgatgagttttgcttctcagatgggtgggcctggtggtgcccccaggagttcagagaatattaactttggaccttcagtgagagctacaacgagtaattctgcccgtggatcatcatctcaacctgttttggagaaccctgatgaactatcagatgaccaaaggatgagccagtcatcctctagtcttccaccttctacagctgatatgcaagaaaccatgaggaattctatgaaagaccctgcaatgcggcagatgcttacatccatgatgaagaacatgagccccgagatgatggcaaatatgagcgagcagtttggaatgaaactgtcaaaggaggatgccgcaaaagctcaacaagccatgtcgtcattatctccagaggatttggatagaatgatgagatggatggagcgagcacagaaagcggtagaagtcgcgaagaagacaaagaactggctcttgggccggcaaggcttgatccttgctattgtcatgctgatcctagctttcatccttcatcagtttgggtttatcggcagatgatggggggtgacttgggtggctgcatcagcatggaaatagattgttagatggcgatgcagagttccctcttgctaacaactgcttaaaagcgctttgggggaaggccggattacgagaattctttgtatccgtatcttttgaaagtgtaactctgtccataaagctacatcctatttttaccagcaaaggtagtagaaaggaatcgagccgaaactgttgtgataacaagccgacatgtaatatgataatatccttgtggtgctttcagttttaagtagcagttttgtttaataaagcatatgcaaaaggtgaagtggaacaaagtacatgcgcatacaaagactaactggaagataggcatcttcaattctttaacatgtgtttagtttgggaactatatgctttgctgagataatat

SEQ ID NO: 67901 - DNA, 2272 bp, Zea Mays
gagagagagagagagaaaaaggaaaaaaaaaacgcggcgcagaagccagaagaaccagcgagccaactcccaacctctcgcccgatctcgatctcgatctcacgggcgccgccgccgccagcgacgatggatccagagatgctgcggctggcgcaggagcagatgcgccgcatgtccccggacgacatcgcccggatgcagcagcagctgatgtctaaccctaacctaatgaggatggcgtctgagagtatgaagaacatgaagcctgaggacttaaggcgagctgcagagcaactgaatcaaacaagaccggaggatatgcgtgatatgaccgagaaaatcgccaacactactccggaggagtttgctgctatgaaggcgcaagcagatgctcaaatgtcctatgcgatgtctggtgctaagatgttaaagaagcagggaaacggacttcataaccagggaaagtattcagatgctgctagtaaatataagcttatgacctaaaactaacagttaaactatatgcaatgttcttgatcaggctaaggataacttaaaaagcataccatcgtctacggcgcatactctgcagttgcaatgtacacttaatttaatggcttgttacttgaagacaggccagtttgatgaatgcataagtgaaggtacagagaggttctaagttatgattcaaacaatgtcaaagcatattatcggaggggtcaggcatataaaggactcgggaagttggaggcggctgttgctgatttgagtaaagcccatgaaatttgcccagaggacgaaactattgctgaggttctaagagatgctgaagaaaaacttgcacgggaagggggaggagtgagcacgcggaaaggtgttgttattgaagaagttgttgaagatggcgcttcacagccatcaagcagtgaaagaaattcttctgggtatactgtttcacaaccacctgaaggagcaggaaatattgggctgtcagggtctttagaaaggccaagggatgatcctacttctatcaggtcatcccaaaattatgtgtccaagagcgatcctgaaggcttatcaaacttcggaattgaaggaatgtcgcctgaacttgtcaaaactgccactgatatgattggctcaatgaaaccagaggagcttcagaaaatgttcgaagttgcttcttcattgaatagcactagctccgctggtccaaatctgggacccaatatgccagaaatgtctcctgatatgcttaagatggcatctgacatgattgctagtatgcctcctgatgacgtacagaaaatgatgagttttgcttctcagatgggtgggcctggtggtgcccccaggagttcagagaatattaactttggaccttcagtgagagctacaacgagtaattctgcccgtggatcatcatctcaacctgttttggagaaccctgatgaactatcagatgaccaaaggatgagccagtcatcctctagtcttccaccttctacagctgatatgcaagaaaccatgaggaattctatgaaagaccctgcaatgcggcagatgcttacatccatgatgaagaacatgagccccgagatgatggcaaatatgagcgagcagtttggaatgaaactgtcaaaggaggatgccgcaaaagctcaacaagccatgtcgtcattatctccagaggatttggatagaatgatgagatggatggagcgagcacagaaagcggtagaagtcgcgaagaagacaaagaactggctcttgggccggcaaggcttgatccttgctattgtcatgctgatcctagctttcatccttcatcagtttgggtttatcggcagatgatggggggtgacttgggtggctgcatcagcatggaaatagattgttagatggcgatgcagagttccctcttgctaacaactgcttaaaagcgctttgggggaaggccggattacgagaattctttgtatccgtatcttttgaaagtgtaactctgtccataaagctacatcctatttttaccagcaaaggtagtagaaaggaatcgagccgaaactgttgtgataacaagccgacatgtaatatgataatatccttgtggtgctttcagttttaagtagcagttttgtttaataaagcatatgcaaaaggtgaagtggaacaaagtacatgcgcatacaaagactaactggaagataggcatcttcaattctttaacatgtgtttagtttgggaactatatgctttgctgagataatat

SEQ ID NO: 67902 - DNA, 2262 bp, Zea Mays
gagagagagagagagaaaaaggaaaaaaaaaacgcggcgcagaagccagaagaaccagcgagccaactcccaacctctcgcccgatctcgatctcgatctcacgggcgccgccgccgccagcgacgatggatccagagatgctgcggctggcgcaggagcagatgcgccgcatgtccccggacgacatcgcccggatgcagcagcagctgatgtctaaccctaacctaatgaggatggcgtctgagagtatgaagaacatgaagcctgaggacttaaggcgagctgcagagcaactgaatcaaacaagaccggaggatatgcgtgatatgaccgagaaaatcgccaacactactccggaggagtttgctgctatgaaggcgcaagcagatgctcaaatgtcctatgcgatgtctggtgctaagatgttaaagaagcagggaaacggacttcataaccagggaaagtattcagatgctgctagtaaatataagcttatgacctaaaactaacagttaaactatatgcaatgttcttgatcaggctaaggataacttaaaaagcataccatcgtctacggcgcatactctgcagttgcaatgtacacttaatttaatggcttgttacttgaagacaggccagtttgatgaatgcataagtgaaggttctaagttatgattcaaacaatgtcaaagcatattatcggaggggtcaggcatataaaggactcgggaagttggaggcggctgttgctgatttgagtaaagcccatgaaatttgcccagaggacgaaactattgctgaggttctaagagatgctgaagaaaaacttgcacgggaagggggaggagtgagcacgcggaaaggtgttgttattgaagaagttgttgaagatggcgcttcacagccatcaagcagtgaaagaaattcttctgggtatactgtttcacaaccacctgaaggagcaggaaatattgggctgtcagggtctttagaaaggccaagggatgatcctacttctatcaggtcatcccaaaattatgtgtccaagagcgatcctgaaggcttatcaaacttcggaattgaaggaatgtcgcctgaacttgtcaaaactgccactgatatgattggctcaatgaaaccagaggagcttcagaaaatgttcgaagttgcttcttcattgaatagcactagctccgctggtccaaatctgggacccaatatgccagaaatgtctcctgatatgcttaagatggcatctgacatgattgctagtatgcctcctgatgacgtacagaaaatgatgagttttgcttctcagatgggtgggcctggtggtgcccccaggagttcagagaatattaactttggaccttcagtgagagctacaacgagtaattctgcccgtggatcatcatctcaacctgttttggagaaccctgatgaactatcagatgaccaaaggatgagccagtcatcctctagtcttccaccttctacagctgatatgcaagaaaccatgaggaattctatgaaagaccctgcaatgcggcagatgcttacatccatgatgaagaacatgagccccgagatgatggcaaatatgagcgagcagtttggaatgaaactgtcaaaggaggatgccgcaaaagctcaacaagccatgtcgtcattatctccagaggatttggatagaatgatgagatggatggagcgagcacagaaagcggtagaagtcgcgaagaagacaaagaactggctcttgggccggcaaggcttgatccttgctattgtcatgctgatcctagctttcatccttcatcagtttgggtttatcggcagatgatggggggtgacttgggtggctgcatcagcatggaaatagattgttagatggcgatgcagagttccctcttgctaacaactgcttaaaagcgctttgggggaaggccggattacgagaattctttgtatccgtatcttttgaaagtgtaactctgtccataaagctacatcctatttttaccagcaaaggtagtagaaaggaatcgagccgaaactgttgtgataacaagccgacatgtaatatgataatatccttgtggtgctttcagttttaagtagcagttttgtttaataaagcatatgcaaaaggtgaagtggaacaaagtacatgcgcatacaaagactaactggaagataggcatcttcaattctttaacatgtgtttagtttgggaactatatgctttgctgagataatat

SEQ ID NO: 67903 - DNA, 2316 bp, Zea Mays
cgattccgttttcttcgcgatgacgccctctttttcgcctataaaaacaaacaaacaaataaagattttaaactcgatcagcgttaaatagggagagagagagagagaaaaaggaaaaaaaaaacgcggcgcagaagccagaagaaccagcgagccaactcccaacctctcgcccgatctcgatctcgatctcacgggcgccgccgccgccagcgacgatggatccagagatgctgcggctggcgcaggagcagatgcgccgcatgtccccggacgacatcgcccggatgcagcagcagctgatgtctaaccctaacctaatgaggatggcgtctgagagtatgaagaacatgaagcctgaggacttaaggcgagctgcagagcaactgaatcaaacaagaccggaggatatgcgtgatatgaccgagaaaatcgccaacactactccggaggagtttgctgctatgaaggcgcaagcagatgctcaaatgtcctatgcgatgtctggtgctaagatgttaaagaagcagggaaacggacttcataaccagggaaagtattcagatgctgctagtaaatataagcttgctaaggataacttaaaaagcataccatcgtctacggcgcatactctgcagttgcaatgtacacttaatttaatggcttgttacttgaagacaggccagtttgatgaatgcataagtgaaggtacagaggttctaagttatgattcaaacaatgtcaaagcatattatcggaggggtcaggcatataaaggactcgggaagttggaggcggctgttgctgatttgagtaaagcccatgaaatttgcccagaggacgaaactattgctgaggttctaagagatgctgaagaaaaacttgcacgggaagggggaggagtgagcacgcggaaaggtgttgttattgaagaagttgttgaagatggcgcttcacagccatcaagcagtgaaagaaattcttctgggtatactgtttcacaaccacctgaaggagcaggaaatattgggctgtcagggtctttagaaaggccaagggatgatcctacttctatcaggtcatcccaaaattatgtgtccaagagcgatcctgaaggcttatcaaacttcggaattgaaggaatgtcgcctgaacttgtcaaaactgccactgatatgattggctcaatgaaaccagaggagcttcagaaaatgttcgaagttgcttcttcattgaatagcactagctccgctggtccaaatctgggacccaatatgccagaaatgtctcctgatatgcttaagatggcatctgacatgattgctagtatgcctcctgatgacgtacagaaaatgatgagttttgcttctcagatgggtgggcctggtggtgcccccaggagttcagagaatattaactttggaccttcagtgagagctacaacgagtaattctgcccgtggatcatcatctcaacctgttttggagaaccctgatgaactatcagatgaccaaaggatgagccagtcatcctctagtcttccaccttctacagctgatatgcaagaaaccatgaggaattctatgaaagaccctgcaatgcggcagatgcttacatccatgatgaagaacatgagccccgagatgatggcaaatatgagcgagcagtttggaatgaaactgtcaaaggaggatgccgcaaaagctcaacaagccatgtcgtcattatctccagaggatttggatagaatgatgagatggatggagcgagcacagaaagcggtagaagtcgcgaagaagacaaagaactggctcttgggccggcaaggcttgatccttgctattgtcatgctgatcctagctttcatccttcatcagtttgggtttatcggcagatgatggggggtgacttgggtggctgcatcagcatggaaatagattgttagatggcgatgcagagttccctcttgctaacaactgcttaaaagcgctttgggggaaggccggattacgagaattctttgtatccgtatcttttgaaagtgtaactctgtccataaagctacatcctatttttaccagcaaaggtagtagaaaggaatcgagccgaaactgttgtgataacaagccgacatgtaatatgataatatccttgtggtgctttcagttttaagtagcagttttgtttaataaagcatatgcaaaaggtgaagtggaacaaagtacatgcgcatacaaagactaactggaagataggcatcttcaattctttaacatgtgtttagtttgggaactatatgctttgctgagataatat

SEQ ID NO: 67904 - DNA, 3672 bp, Zea Mays
gaattcttatctatgtatttggatgtggctgattctggggtattgccctatgggtggactagatatgcacaattcagcctctctgtggttaatcaaattcacaacaaattcacaataagaaaagaaacacaacatcagttctctgctcgagaaagtgattggggtttcacttcatttatgccgttgggtgaactctacaaccacagtagaggttatcttgtaaatgatacttgtatagtggaagctgaagttgctgtatgtaaagttgttgactattggagttatgactctaaaaaggaaactggctatgttggtcttaaaaatcaaggtgctacctgctatatgaattctcttcttcagacgctgtaccacatcccatatttcagaaaggctgtttatcacatgcccaccactgagaatgatatgccctcaggaagcatccctttagctctacagtcactcttctataagttgcagtataatgacagcagtgtctctacaaaggagctcacaaaatcattcgggtgggacatgcatgattcatttatgcaacatgatgttcaagaattgaacagagttctttctgagaagttggaagataagatgaagggaactgttgtagagggcacaatacaacaattgtttgaagggcaccacatgaactacattgagtgcatcaatgtagatttcaaatcaacaagaaaggaatccttctatgatctccagcttgatgtcaaaggttgtcaggatgtctacgcttcatttgacaagtacgtagaagtggagcaattggaaggtgacaacaagtatcatgccgataagcatggtctgcaggatgcaaagaaaggagttctttttatcgacttccctcctgttctgcagcttcagctaaaacgttttgaatatgatttcatgcgtgacacgatggtgaagataaatgatcgctatgaattcccacttcaattggaccttgatagagatgatggaaaatatttatctcctgatgctgacaggaatgtgcgtaacctttatacccttcacagcgttcttgtccatagcggtggtgttcatggtggacattattatgctttcatacgacctaccctttctgatcaatggttcaagtttgatgatgagcgtgtgacaaaagaagatgcaaagagggcactggaagaacaatatggtggtgaggaggagctacctcagacaaatcctggcttgaacaacactcccttcaagtttactaaatattcaaatgcatacatgcttgtgtacattcgtgaaagcgacaaggacaaaattatttgtaatgtggatgagaaagatatagcagagcatcttcggattagattggaaaaggaccgtgaagagaaggaacgtcggaagaaggaaaaagctgaggcacacctctataccataatcaaggttgcaagggatgatgacttaaaaactcagatagggaaagacatatattttgatcttgttgaccatgataaagtcccaagcttccgtatccaaaagcagatggcctttgctcaattcaaggaggaggtagcaaaagagtttggtattcccacacagttccaacgattttggctgtgggccaagcgacaaaaccatacttaccgacctaacaggccattgtgtcctcaagacgaagcgcatactagggtgttcagctgcaagccaaaatttgccactcctctgttaggcaactttgatcatagtagtaaggaccttaaacctcttcctcttccagacaagactagagaagatatatttcttctcttcaaactctatgaacctgaaaaggaacagctacggtatgttggtaggctctttgtaaaggcttcaggaagaccacaggacattctgccgaagctaaagatgttggcaggtttttcacaagatgatgatattgaactttatgaggaaattaagttcgaacccaatgtgatgtgtgaatacattgataacaggcttctgttccgatcttgccagcttgaagatggggacataatctgttttcaaaaatcttcaaaggcagatagtgctgaccgatatcgatttcctgacgtaccatcctttttgacgtatatacgtaaccgacaggtggtccactttcgttcactggagaagcccaaggaggacgattttttcctcgagatgtcaaagattttcacatatgatcaagtcgtggaaaaagtagctgaaaaacttggcgtggatgacccatcgaaaattcggcttacatcacataattgttattcgcagcagcctaagcctcagccaataaagtacagaggcgttgaacgtctactggacatgctgattcattataaccagacttctgatattctgtactatgaagtattggacataccacttccagaattacaagcgctgaagacattaaaagttacataccatcatgccacaaaagatgaggtgtcagttcacagtataagattgccaaaaaacagcactgttggcgatgtgctaaacgatatcaaaacaaaggttgagttatctcatcccaatgctgaactgagattacttgaggtcttttatcacaagatatacaaggtgtttgcaccaaatgaaaagattgaaaacattaatgatcagtactggacactgcgtgcggaggaggttccagatgaggaaaaaaaccttggtccctttgatcgattgattcatgtatatcattttacaaaagatactcaaaaccaaacgcaagttcagaactttggagaacctttttttatggttattcgtgaggatgagaccctatcttctatcaaagagcgtatacagagaaagcttaaggttccagatgaggatttctcaaagtggaagtttgcatacatttcacttggtcgtccagactattttgaagattcagatactgtagctttaaaatttcagagaaacatgtatggagcttgggagcagtatcttggactggaacatccagacacagctcctaggaaggcacacacaattaatcagaaccggcattcatttgagagacctgtaaaaatttataactaggcatgatagaaatttgagcaatgagctgccaagcaagggctaaaattgctgtcctgaaataaagcgtgccggggcatgttgctcaggtttttcgtggagctggtgagctagttcatgagactccaagtatgatcggggcggcttctcatctttccctgcttttccccggatacatataaagttgtgcagagatgaccccaccgaacaattgtctttagtagataagccagtacttcccgttagatgactttatacagtcgaatagccggcattttagtcgatctttccgttctccagttgctgttggtgctaggaggccttgagctgttgagggtacttgccctgctgtatattatgacgtagagtgtacaagtctttgttgttgacaattacacggtgttttgtaatttcagtgatacacttccaggtccttcagtacgtacttgcctggatggtgtcaatttggcattctatgttagatattgatccatctgttctaaattaaaattataaggcagtttgacttttttaagatatactgcctccgattttctattagttgtcgtttagaatagtgacacggtctccatattataacgtgtctccatattataactt

SEQ ID NO: 67905 - DNA, 3678 bp, Zea Mays
gaattcttatctatgtatttggatgtggctgattctggggtattgccctatgggtggactagatatgcacaattcagcctctctgtggttaatcaaattcacaacaaattcacaataagaaaagaaacacaacatcagttctctgctcgagaaagtgattggggtttcacttcatttatgccgttgggtgaactctacaaccacagtagaggttatcttgtaaatgatacttgtatagtggaagctgaagttgctgtatgtaaagttgttgactattggagttatgactctaaaaaggaaactggctatgttggtcttaaaaatcaaggtgctacctgctatatgaattctcttcttcagacgctgtaccacatcccatatttcagaaaggctgtttatcacatgcccaccactgagaatgatatgccctcaggaagcatccctttagctctacagtcactcttctataagttgcagtataatgacagcagtgtctctacaaaggagctcacaaaatcattcgggtgggacatgcatgattcatttatgcaacatgatgttcaagaattgaacagagttctttctgagaagttggaagataagatgaagggaactgttgtagagggcacaatacaacaattgtttgaagggcaccacatgaactacattgagtgcatcaatgtagatttcaaatcaacaagaaaggaatccttctatgatctccagcttgatgtcaaaggttgtcaggatgtctacgcttcatttgacaagtacgtagaagtggagcaattggaaggtgacaacaagtatcatgccgataagcatggtctgcaggatgcaaagaaaggagttctttttatcgacttccctcctgttctgcagcttcagctaaaacgttttgaatatgatttcatgcgtgacacgatggtgaagataaatgatcgctatgaattcccacttcaattggaccttgatagagatgatggaaaatatttatctcctgatgctgacaggaatgtgcgtaacctttatacccttcacagcgttcttgtccatagcggtggtgttcatggtggacattattatgctttcatacgacctaccctttctgatcaatggttcaagtttgatgatgagcgtgtgacaaaagaagatgcaaagagggcactggaagaacaatatggtggtgaggaggagctacctcagacaaatcctggcttgaacaacactcccttcaagtttactaaatattcaaatgcatacatgcttgtgtacattcgtgaaagcgacaaggacaaaattatttgtaatgtggatgagaaagatatagcagagcatcttcggattagattggaaaaggaccgtgaagagaaggaacgtcggaagaaggaaaaagctgaggcacacctctataccataatcaaggttgcaagggatgatgacttaaaaactcagatagggaaagacatatattttgatcttgttgaccatgataaagtcccaagcttccgtatccaaaagcagatggcctttgctcaattcaaggaggaggtagcaaaagagtttggtattcccacacagttccaacgattttggctgtgggccaagcgacaaaaccatacttaccgacctaacaggccattgtgtcctcaagacgaagcgcatactgttggacagctaaaggaattggtgaacaaggcccacaacgctgaattgaaattgttcttggaagttgaacttggactggaccttaaacctcttcctcttccagacaagactagagaagatatatttcttctcttcaaactctatgaacctgaaaaggaacagctacggtatgttggtaggctctttgtaaaggcttcaggaagaccacaggacattctgccgaagctaaagatgttggcaggtttttcacaagatgatgatattgaactttatgaggaaattaagttcgaacccaatgtgatgtgtgaatacattgataacaggcttctgttccgatcttgccagcttgaagatggggacataatctgttttcaaaaatcttcaaaggcagatagtgctgaccgatatcgatttcctgacgtaccatcctttttgacgtatatacgtaaccgacaggtggtccactttcgttcactggagaagcccaaggaggacgattttttcctcgagatgtcaaagattttcacatatgatcaagtcgtggaaaaagtagctgaaaaacttggcgtggatgacccatcgaaaattcggcttacatcacataattgttattcgcagcagcctaagcctcagccaataaagtacagaggcgttgaacgtctactggacatgctgattcattataaccagacttctgatattctgtactatgaagtattggacataccacttccagaattacaagcgctgaagacattaaaagttacataccatcatgccacaaaagatgaggtgtcagttcacagtataagattgccaaaaaacagcactgttggcgatgtgctaaacgatatcaaaacaaaggttgagttatctcatcccaatgctgaactgagattacttgaggtcttttatcacaagatatacaaggtgtttgcaccaaatgaaaagattgaaaacattaatgatcagtactggacactgcgtgcggaggaggttccagatgaggaaaaaaaccttggtccctttgatcgattgattcatgtatatcattttacaaaagatactcaaaaccaaacgcaagttcagaactttggagaacctttttttatggttattcgtgaggatgagaccctatcttctatcaaagagcgtatacagagaaagcttaaggttccagatgaggatttctcaaagtttgcatacatttcacttggtcgtccagactattttgaagattcagatactgtagctttaaaatttcagagaaacatgtatggagcttgggagcagtatcttggactggaacatccagacacagctcctaggaaggcacacacaattaatcagaaccggcattcatttgagagacctgtaaaaatttataactaggcatgatagaaatttgagcaatgagctgccaagcaagggctaaaattgctgtcctgaaataaagcgtgccggggcatgttgctcaggtttttcgtggagctggtgagctagttcatgagactccaagtatgatcggggcggcttctcatctttccctgcttttccccggatacatataaagttgtgcagagatgaccccaccgaacaattgtctttagtagataagccagtacttcccgttagatgactttatacagtcgaatagccggcattttagtcgatctttccgttctccagttgctgttggtgctaggaggccttgagctgttgagggtacttgccctgctgtatattatgacgtagagtgtacaagtctttgttgttgacaattacacggtgttttgtaatttcagtgatacacttccaggtccttcagtacgtacttgcctggatggtgtcaatttggcattctatgttagatattgatccatctgttctaaattaaaattataaggcagtttgacttttttaagatatactgcctccgattttctattagttgtcgtttagaatagtgacacggtctccatattataacgtgtctccatattataactt

SEQ ID NO: 67906 - DNA, 3721 bp, Zea Mays
gaattcttatctatgtatttggatgtggctgattctggggtattgccctatgggtggactagatatgcacaattcagcctctctgtggttaatcaaattcacaacaaattcacaataagaaaagaaacacaacatcagttctctgctcgagaaagtgattggggtttcacttcatttatgccgttgggtgaactctacaaccacagtagaggttatcttgtaaatgatacttgtatagtggaagctgaagttgctgtatgtaaagttgttgactattggagttatgactctaaaaaggaaactggctatgttggtcttaaaaatcaaggtgctacctgctatatgaattctcttcttcagacgctgtaccacatcccatatttcagaaaggctgtttatcacatgcccaccactgagaatgatatgccctcaggaagcatccctttagctctacagtcactcttctataagttgcagtataatgacagcagtgtctctacaaaggagctcacaaaatcattcgggtgggacatgcatgattcatttatgcaacatgatgttcaagaattgaacagagttctttctgagaagttggaagataagatgaagggaactgttgtagagggcacaatacaacaattgtttgaagggcaccacatgaactacattgagtgcatcaatgtagatttcaaatcaacaagaaaggaatccttctatgatctccagcttgatgtcaaaggttgtcaggatgtctacgcttcatttgacaagtacgtagaagtggagcaattggaaggtgacaacaagtatcatgccgataagcatggtctgcaggatgcaaagaaaggagttctttttatcgacttccctcctgttctgcagcttcagctaaaacgttttgaatatgatttcatgcgtgacacgatggtgaagataaatgatcgctatgaattcccacttcaattggaccttgatagagatgatggaaaatatttatctcctgatgctgacaggaatgtgcgtaacctttatacccttcacagcgttcttgtccatagcggtggtgttcatggtggacattattatgctttcatacgacctaccctttctgatcaatggttcaagtttgatgatgagcgtgtgacaaaagaagatgcaaagagggcactggaagaacaatatggtggtgaggaggagctacctcagacaaatcctggcttgaacaacactcccttcaagtttactaaatattcaaatgcatacatgcttgtgtacattcgtgaaagcgacaaggacaaaattatttgtaatgtggatgagaaagatatagcagagcatcttcggattagattggaaaaggaccgtgaagagaaggaacgtcggaagaaggaaaaagctgaggcacacctctataccataatcaaggttgcaagggatgatgacttaaaaactcagatagggaaagacatatattttgatcttgttgaccatgataaagtcccaagcttccgtatccaaaagcagatggcctttgctcaattcaaggaggaggtagcaaaagagtttggtattcccacacagttccaacgattttggctgtgggccaagcgacaaaaccatacttaccgacctaacaggccattgtgtcctcaagacgaagcgcatactgttggacagctaaaggaattggtgaacaaggcccacaacgctgaattgaaattgttcttggaagttgaacttggactggaccttaaacctcttcctcttccagacaagactagagaagatatatttcttctcttcaaactctatgaacctgaaaaggaacagctacggtatgttggtaggctctttgtaaaggcttcaggaagaccacaggacattctgccgaagctaaagatgttggcaggtttttcacaagatgatgatattgaactttatgaggaaattaagttcgaacccaatgtgatgtgtgaatacattgataacaggcttctgttccgatcttgccagcttgaagatggggacataatctgttttcaaaaatcttcaaaggcagatagtgctgaccgatatcgatttcctgacgtaccatcctttttgacgtatatacgtaaccgacaggtggtccactttcgttcactggagaagcccaaggaggacgattttttcctcgagatgtcaaagattttcacatatgatcaagtcgtggaaaaagtagctgaaaaacttggcgtggatgacccatcgaaaattcggcttacatcacataattgttattcgcagcagcctaagcctcagccaataaagtacagaggcgttgaacgtctactggacatgctgattcattataaccagacttctgatattctgtactatgaagtattggacataccacttccagaattacaagcgctgaagacattaaaagttacataccatcatgccacaaaagatgaggtgtcagttcacagtataagattgccaaaaaacagcactgttggcgatgtgctaaacgatatcaaaacaaaggttgagttatctcatcccaatgctgaactgagattacttgaggtcttttatcacaagatatacaaggtgtttgcaccaaatgaaaagattgaaaacattaatgatcagtactggacactgcgtgcggaggaggttccagatgaggaaaaaaaccttggtccctttgatcgattgattcatgtatatcattttacaaaagatactcaaaaccaaacgctaaaactataccgaatatttgtgttgttgtcaacagcaagttcagaactttggagaacctttttttatggttattcgtgaggatgagaccctatcttctatcaaagagcgtatacagagaaagcttaaggttccagatgaggatttctcaaagtggaagtttgcatacatttcacttggtcgtccagactattttgaagattcagatactgtagctttaaaatttcagagaaacatgtatggagcttgggagcagtatcttggactggaacatccagacacagctcctaggaaggcacacacaattaatcagaaccggcattcatttgagagacctgtaaaaatttataactaggcatgatagaaatttgagcaatgagctgccaagcaagggctaaaattgctgtcctgaaataaagcgtgccggggcatgttgctcaggtttttcgtggagctggtgagctagttcatgagactccaagtatgatcggggcggcttctcatctttccctgcttttccccggatacatataaagttgtgcagagatgaccccaccgaacaattgtctttagtagataagccagtacttcccgttagatgactttatacagtcgaatagccggcattttagtcgatctttccgttctccagttgctgttggtgctaggaggccttgagctgttgagggtacttgccctgctgtatattatgacgtagagtgtacaagtctttgttgttgacaattacacggtgttttgtaatttcagtgatacacttccaggtccttcagtacgtacttgcctggatggtgtcaatttggcattctatgttagatattgatccatctgttctaaattaaaattataaggcagtttgacttttttaagatatactgcctccgattttctattagttgtcgtttagaatagtgacacggtctccatattataacgtgtctccatattataactt

SEQ ID NO: 67907 - DNA, 3609 bp, Zea Mays
gaattcttatctatgtatttggatgtggctgattctggggtattgccctatgggtggactagatatgcacaattcagcctctctgtggttaatcaaattcacaacaaattcacaataagaaaagaaacacaacatcagttctctgctcgagaaagtgattggggtttcacttcatttatgccgttgggtgaactctacaaccacagtagaggttatcttgtaaatgatacttgtatagtggaagctgaagttgctgtatgtaaagttgttgactattggagttatgactctaaaaaggaaactggctatgttggtcttaaaaatcaaggtgctacctgctatatgaattctcttcttcagacgctgtaccacatcccatatttcagaaaggctgtttatcacatgcccaccactgagaatgatatgccctcaggaagcatccctttagctctacagtcactcttctataagttgcagtataatgacagcagtgtctctacaaaggagctcacaaaatcattcgggtgggacatgcatgattcatttatgcaacatgatgttcaagaattgaacagagttctttctgagaagttggaagataagatgaagggaactgttgtagagggcacaatacaacaattgtttgaagggcaccacatgaactacattgagtgcatcaatgtagatttcaaatcaacaagaaaggaatccttctatgatctccagcttgatgtcaaaggttgtcaggatgtctacgcttcatttgacaagtacgtagaagtggagcaattggaaggtgacaacaagtatcatgccgataagcatggtctgcaggatgcaaagaaaggagttctttttatcgacttccctcctgttctgcagcttcagctaaaacgttttgaatatgatttcatgcgtgacacgatggtgaagataaatgatcgctatgaattcccacttcaattggaccttgatagagatgatggaaaatatttatctcctgatgctgacaggaatgtgcgtaacctttatacccttcacagcgttcttgtccatagcggtggtgttcatggtggacattattatgctttcatacgacctaccctttctgatcaatggttcaagtttgatgatgagcgtgtgacaaaagaagatgcaaagagggcactggaagaacaatatggtggtgaggaggagctacctcagacaaatcctggcttgaacaacactcccttcaagtttactaaatattcaaatgcatacatgcttgtgtacattcgtgaaagcgacaaggacaaaattatttgtaatgtggatgagaaagatatagcagagcatcttcggattagattggaaaaggaccgtgaagagaaggaacgtcggaagaaggaaaaagctgaggcacacctctataccataatcaaggttgcaagggatgatgacttaaaaactcagatagggaaagacatatattttgatcttgttgaccatgataaagtcccaagcttccgtatccaaaagcagatggcctttgctcaattcaaggaggaggtagcaaaagagtttggtattcccacacagttccaacgattttggctgtgggccaagcgacaaaaccatacttaccgacctaacaggccattgtgtcctcaagacgaagcgcatactgttggacagctaaaggaattggtgaacaaggcccacaacgctgaattgaaattgttcttggaagttgaacttggactggaccttaaacctcttcctcttccagacaagactagagaagatatatttcttctcttcaaactctatgaacctgaaaaggaacagctacggtatgttggtaggctctttgtaaaggcttcaggaagaccacaggacattctgccgaagctaaagatgttggcaggtttttcacaagatgatgatattgaactttatgaggaaattaagttcgaacccaatgtgatgtgtgaatacattgataacaggcttctgttccgatcttgccagcttgaagatggggacataatctgttttcaaaaatcttcaaaggcagatagtgctgaccgatatcgatttcctgacgtaccatcctttttgacgtatatacgtaaccgacaggtggtccactttcgttcactggagaagcccaaggaggacgattttttcctcgagatgtcaaagattttcacatatgatcaagtcgtggaaaaagtagctgaaaaacttggcgtggatgacccatcgaaaattcggcttacatcacataattgttattcgcagcagcctaagcctcagccaataaagtacagaggcgttgaacgtctactggacatgctgattcattataaccagacttctgatattctgtactatgaagtattggacataccacttccagaattacaagcgctgaagacattaaaagttacataccatcatgccacaaaagatgaggtgtcagttcacagtataagattgccaaaaaacagcactgttggcgatgtgctaaacgatatcaaaacaaaggttgagttatctcatcccaatgctgaactgagattacttgaggtcttttatcacaagatatacaaggtgtttgcaccaaatgaaaagattgaaaacattaatgatcagtactggacactgcgtgcggaggaggttccagatgaggaaaaaaaccttggtccctttgatcgattgattcatgtatatcattttacaaaagatactcaaaaccaaacgcaagttcagaactttggagaacctttttttatggttattcgtgaggatgagaccctatcttctatcaaagagcgtatacagagaaagcttaaggttccagatgaggatttctcaaagagaaacatgtatggagcttgggagcagtatcttggactggaacatccagacacagctcctaggaaggcacacacaattaatcagaaccggcattcatttgagagacctgtaaaaatttataactaggcatgatagaaatttgagcaatgagctgccaagcaagggctaaaattgctgtcctgaaataaagcgtgccggggcatgttgctcaggtttttcgtggagctggtgagctagttcatgagactccaagtatgatcggggcggcttctcatctttccctgcttttccccggatacatataaagttgtgcagagatgaccccaccgaacaattgtctttagtagataagccagtacttcccgttagatgactttatacagtcgaatagccggcattttagtcgatctttccgttctccagttgctgttggtgctaggaggccttgagctgttgagggtacttgccctgctgtatattatgacgtagagtgtacaagtctttgttgttgacaattacacggtgttttgtaatttcagtgatacacttccaggtccttcagtacgtacttgcctggatggtgtcaatttggcattctatgttagatattgatccatctgttctaaattaaaattataaggcagtttgacttttttaagatatactgcctccgattttctattagttgtcgtttagaatagtgacacggtctccatattataacgtgtctccatattataactt

SEQ ID NO: 67908 - DNA, 3663 bp, Zea Mays
gaattcttatctatgtatttggatgtggctgattctggggtattgccctatgggtggactagatatgcacaattcagcctctctgtggttaatcaaattcacaacaaattcacaataagaaaagaaacacaacatcagttctctgctcgagaaagtgattggggtttcacttcatttatgccgttgggtgaactctacaaccacagtagaggttatcttgtaaatgatacttgtatagtggaagctgaagttgctgtatgtaaagttgttgactattggagttatgactctaaaaaggaaactggctatgttggtcttaaaaatcaaggtgctacctgctatatgaattctcttcttcagacgctgtaccacatcccatatttcagaaaggctgtttatcacatgcccaccactgagaatgatatgccctcaggaagcatccctttagctctacagtcactcttctataagttgcagtataatgacagcagtgtctctacaaaggagctcacaaaatcattcgggtgggacatgcatgattcatttatgcaacatgatgttcaagaattgaacagagttctttctgagaagttggaagataagatgaagggaactgttgtagagggcacaatacaacaattgtttgaagggcaccacatgaactacattgagtgcatcaatgtagatttcaaatcaacaagaaaggaatccttctatgatctccagcttgatgtcaaaggttgtcaggatgtctacgcttcatttgacaagtacgtagaagtggagcaattggaaggtgacaacaagtatcatgccgataagcatggtctgcaggatgcaaagaaaggagttctttttatcgacttccctcctgttctgcagcttcagctaaaacgttttgaatatgatttcatgcgtgacacgatggtgaagataaatgatcgctatgaattcccacttcaattggaccttgatagagatgatggaaaatatttatctcctgatgctgacaggaatgtgcgtaacctttatacccttcacagcgttcttgtccatagcggtggtgttcatggtggacattattatgctttcatacgacctaccctttctgatcaatggttcaagtttgatgatgagcgtgtgacaaaagaagatgcaaagagggcactggaagaacaatatggtggtgaggaggagacaaatcctggcttgaacaacactcccttcaagtttactaaatattcaaatgcatacatgcttgtgtacattcgtgaaagcgacaaggacaaaattatttgtaatgtggatgagaaagatatagcagagcatcttcggattagattggaaaaggaccgtgaagagaaggaacgtcggaagaaggaaaaagctgaggcacacctctataccataatcaaggttgcaagggatgatgacttaaaaactcagatagggaaagacatatattttgatcttgttgaccatgataaagtcccaagcttccgtatccaaaagcagatggcctttgctcaattcaaggaggaggtagcaaaagagtttggtattcccacacagttccaacgattttggctgtgggccaagcgacaaaaccatacttaccgacctaacaggccattgtgtcctcaagacgaagcgcatactagggtgttcagctgcaagccaaaatttgccactcctctgttaggcaactttgatcatagtagtaaggaccttaaacctcttcctcttccagacaagactagagaagatatatttcttctcttcaaactctatgaacctgaaaaggaacagctacggtatgttggtaggctctttgtaaaggcttcaggaagaccacaggacattctgccgaagctaaagatgttggcaggtttttcacaagatgatgatattgaactttatgaggaaattaagttcgaacccaatgtgatgtgtgaatacattgataacaggcttctgttccgatcttgccagcttgaagatggggacataatctgttttcaaaaatcttcaaaggcagatagtgctgaccgatatcgatttcctgacgtaccatcctttttgacgtatatacgtaaccgacaggtggtccactttcgttcactggagaagcccaaggaggacgattttttcctcgagatgtcaaagattttcacatatgatcaagtcgtggaaaaagtagctgaaaaacttggcgtggatgacccatcgaaaattcggcttacatcacataattgttattcgcagcagcctaagcctcagccaataaagtacagaggcgttgaacgtctactggacatgctgattcattataaccagacttctgatattctgtactatgaagtattggacataccacttccagaattacaagcgctgaagacattaaaagttacataccatcatgccacaaaagatgaggtgtcagttcacagtataagattgccaaaaaacagcactgttggcgatgtgctaaacgatatcaaaacaaaggttgagttatctcatcccaatgctgaactgagattacttgaggtcttttatcacaagatatacaaggtgtttgcaccaaatgaaaagattgaaaacattaatgatcagtactggacactgcgtgcggaggaggttccagatgaggaaaaaaaccttggtccctttgatcgattgattcatgtatatcattttacaaaagatactcaaaaccaaacgcaagttcagaactttggagaacctttttttatggttattcgtgaggatgagaccctatcttctatcaaagagcgtatacagagaaagcttaaggttccagatgaggatttctcaaagtggaagtttgcatacatttcacttggtcgtccagactattttgaagattcagatactgtagctttaaaatttcagagaaacatgtatggagcttgggagcagtatcttggactggaacatccagacacagctcctaggaaggcacacacaattaatcagaaccggcattcatttgagagacctgtaaaaatttataactaggcatgatagaaatttgagcaatgagctgccaagcaagggctaaaattgctgtcctgaaataaagcgtgccggggcatgttgctcaggtttttcgtggagctggtgagctagttcatgagactccaagtatgatcggggcggcttctcatctttccctgcttttccccggatacatataaagttgtgcagagatgaccccaccgaacaattgtctttagtagataagccagtacttcccgttagatgactttatacagtcgaatagccggcattttagtcgatctttccgttctccagttgctgttggtgctaggaggccttgagctgttgagggtacttgccctgctgtatattatgacgtagagtgtacaagtctttgttgttgacaattacacggtgttttgtaatttcagtgatacacttccaggtccttcagtacgtacttgcctggatggtgtcaatttggcattctatgttagatattgatccatctgttctaaattaaaattataaggcagtttgacttttttaagatatactgcctccgattttctattagttgtcgtttagaatagtgacacggtctccatattataacgtgtctccatattataactt

SEQ ID NO: 67909 - DNA, 3556 bp, Zea Mays
gaattcttatctatgtatttggatgtggctgattctggggtattgccctatgggtggactagatatgcacaattcagcctctctgtggttaatcaaattcacaacaaattcacaataagaaaagaaacacaacatcagttctctgctcgagaaagtgattggggtttcacttcatttatgccgttgggtgaactctacaaccacagtagaggttatcttgtaaatgatacttgtatagtggaagctgaagttgctgtatgtaaagttgttgactattggagttatgactctaaaaaggaaactggctatgttggtcttaaaaatcaaggtgctacctgctatatgaattctcttcttcagacgctgtaccacatcccatatttcagaaaggctgtttatcacatgcccaccactgagaatgatatgccctcaggaagcatccctttagctctacagtcactcttctataagttgcagtataatgacagcagtgtctctacaaaggagctcacaaaatcattcgggtgggacatgcatgattcatttatgcaacatgatgttcaagaattgaacagagttctttctgagaagttggaagataagatgaagggaactgttgtagagggcacaatacaacaattgtttgaagggcaccacatgaactacattgagtgcatcaatgtagatttcaaatcaacaagaaaggaatccttctatgatctccagcttgatgtcaaaggttgtcaggatgtctacgcttcatttgacaagtacgtagaagtggagcaattggaaggtgacaacaagtatcatgccgataagcatggtctgcaggatgcaaagaaaggagttctttttatcgacttccctcctgttctgcagcttcagctaaaacgttttgaatatgatttcatgcgtgacacgatggtgaagataaatgatcgctatgaattcccacttcaattggaccttgatagagatgatggaaaatatttatctcctgatgctgacaggaatgtgcgtaacctttatacccttcacagcgttcttgtccatagcggtggtgttcatggtggacattattatgctttcatacgacctaccctttctgatcaatggttcaagtttgatgatgagcgtgtgacaaaagaagatgcaaagagggcactggaagaacaatatggtggtgaggaggagctacctcagacaaatcctggcttgaacaacactcccttcaagtttactaaatattcaaatgcatacatgcttgtgtacattcgtgaaagcgacaaggacaaaattatttgtaatgtggatgagaaagatatagcagagcatcttcggattagattggaaaaggaccgtgaagagaaggaacgtcggaagaaggaaaaagctgaggcacacctctataccataatcaaggttgcaagggatgatgacttaaaaactcagatagggaaagacatatattttgatcttgttgaccatgataaagtcccaagcttccgtatccaaaagcagatggcctttgctcaattcaaggaggaggtagcaaaagagtttggtattcccacacagttccaacgattttggctgtgggccaagcgacaaaaccatacttaccgacctaacaggccattgtgtcctcaagacgaagcgcatactgttggacagctaaaggaattggtgaacaaggcccacaacgctgaattgaaattgttcttggaagttgaacttggactggaccttaaacctcttcctcttccagacaagactagagaagatatatttcttctcttcaaactctatgaacctgaaaaggaacagctacggtatgttggtaggctctttgtaaaggcttcaggaagaccacaggacattctgccgaagctaaagatgttggcaggtttttcacaagatgatgatattgaactttatgaggaaattaagttcgaacccaatgtgatgtgtgaatacattgataacaggcttctgttccgatcttgccagcttgaagatggggacataatctgttttcaaaaatcttcaaaggcagatagtgctgaccgatatcgatttcctgacgtaccatcctttttgacgtatatacgtaaccgacaggtggtccactttcgttcactggagaagcccaaggaggacgattttttcctcgagatgtcaaagattttcacatatgatcaagtcgtggaaaaagtagctgaaaaacttggcgtggatgacccatcgaaaattcggcttacatcacataattgttattcgcagcagcctaagcctcagccaataaagtacagaggcgttgaacgtctactggacatgctgattcattataaccagacttctgatattctgtactatgaagtattggacataccacttccagaattacaagcgctgaagacattaaaagttacataccatcatgccacaaaagatgaggtgtcagttcacagtataagattgccaaaaaacagcactgttggcgatgtgctaaacgatatcaaaacaaaggttgagttatctcatcccaatgctgaactgagattacttgaggtcttttatcacaagatatacaaggtgtttgcaccaaatgaaaagattgaaaacattaatgatcagtactggacactgcgtgcggaggaggttccagatgaggaaaaaaaccttggtccctttgatcgattgattcatgtatatcattttacaaaagatactcaaaaccaaacgcaagttcagaactttggagaacctttttttatggttattcgtgaggatgagaccctatcttctatcaaagagcgtatacagagaaagcttaaggttccagatgaggatttctcaaagtggaagtttgcatacatttcacttggtcgtccagactattttgaagattcagatactgtagctttaaaatttcagagaaacatgtatggagcttgggagcagtatcttggactggaacatccagacacagctcctaggaaggcacacacaattaatcaggtttttcgtggagctggtgagctagttcatgagactccaagtatgatcggggcggcttctcatctttccctgcttttccccggatacatataaagttgtgcagagatgaccccaccgaacaattgtctttagtagataagccagtacttcccgttagatgactttatacagtcgaatagccggcattttagtcgatctttccgttctccagttgctgttggtgctaggaggccttgagctgttgagggtacttgccctgctgtatattatgacgtagagtgtacaagtctttgttgttgacaattacacggtgttttgtaatttcagtgatacacttccaggtccttcagtacgtacttgcctggatggtgtcaatttggcattctatgttagatattgatccatctgttctaaattaaaattataaggcagtttgacttttttaagatatactgcctccgattttctattagttgtcgtttagaatagtgacacggtctccatattataacgtgtctccatattataactt

SEQ ID NO: 67910 - DNA, 3814 bp, Zea Mays
accaatatcgagatttacttggaccattgagaacctatcaagagttagcacgaagaagctgtactccgaaatctttgttgtcggaggctacaagtggcgaatcttgattttcccaaggggaaataatgttgaattcttatctatgtatttggatgtggctgattctggggtattgccctatgggtggactagatatgcacaattcagcctctctgtggttaatcaaattcacaacaaattcacaataagaaaagaaacacaacatcagttctctgctcgagaaagtgattggggtttcacttcatttatgccgttgggtgaactctacaaccacagtagaggttatcttgtaaatgatacttgtatagtggaagctgaagttgctgtatgtaaagttgttgactattggagttatgactctaaaaaggaaactggctatgttggtcttaaaaatcaaggtgctacctgctatatgaattctcttcttcagacgctgtaccacatcccatatttcagaaaggctgtttatcacatgcccaccactgagaatgatatgccctcaggaagcatccctttagctctacagtcactcttctataagttgcagtataatgacagcagtgtctctacaaaggagctcacaaaatcattcgggtgggacatgcatgattcatttatgcaacatgatgttcaagaattgaacagagttctttctgagaagttggaagataagatgaagggaactgttgtagagggcacaatacaacaattgtttgaagggcaccacatgaactacattgagtgcatcaatgtagatttcaaatcaacaagaaaggaatccttctatgatctccagcttgatgtcaaaggttgtcaggatgtctacgcttcatttgacaagtacgtagaagtggagcaattggaaggtgacaacaagtatcatgccgataagcatggtctgcaggatgcaaagaaaggagttctttttatcgacttccctcctgttctgcagcttcagctaaaacgttttgaatatgatttcatgcgtgacacgatggtgaagataaatgatcgctatgaattcccacttcaattggaccttgatagagatgatggaaaatatttatctcctgatgctgacaggaatgtgcgtaacctttatacccttcacagcgttcttgtccatagcggtggtgttcatggtggacattattatgctttcatacgacctaccctttctgatcaatggttcaagtttgatgatgagcgtgtgacaaaagaagatgcaaagagggcactggaagaacaatatggtggtgaggaggagctacctcagacaaatcctggcttgaacaacactcccttcaagtttactaaatattcaaatgcatacatgcttgtgtacattcgtgaaagcgacaaggacaaaattatttgtaatgtggatgagaaagatatagcagagcatcttcggattagattggaaaaggaccgtgaagagaaggaacgtcggaagaaggaaaaagctgaggcacacctctataccataatcaaggttgcaagggatgatgacttaaaaactcagatagggaaagacatatattttgatcttgttgaccatgataaagtcccaagcttccgtatccaaaagcagatggcctttgctcaattcaaggaggaggtagcaaaagagtttggtattcccacacagttccaacgattttggctgtgggccaagcgacaaaaccatacttaccgacctaacaggccattgtgtcctcaagacgaagcgcatactgttggacagctaaaggaattggtgaacaaggcccacaacgctgaattgaaattgttcttggaagttgaacttggactggaccttaaacctcttcctcttccagacaagactagagaagatatatttcttctcttcaaactctatgaacctgaaaaggaacagctacggtatgttggtaggctctttgtaaaggcttcaggaagaccacaggacattctgccgaagctaaagatgttggcaggtttttcacaagatgatgatattgaactttatgaggaaattaagttcgaacccaatgtgatgtgtgaatacattgataacaggcttctgttccgatcttgccagcttgaagatggggacataatctgttttcaaaaatcttcaaaggcagatagtgctgaccgatatcgatttcctgacgtaccatcctttttgacgtatatacgtaaccgacaggtggtccactttcgttcactggagaagcccaaggaggacgattttttcctcgagatgtcaaagattttcacatatgatcaagtcgtggaaaaagtagctgaaaaacttggcgtggatgacccatcgaaaattcggcttacatcacataattgttattcgcagcagcctaagcctcagccaataaagtacagaggcgttgaacgtctactggacatgctgattcattataaccagacttctgatattctgtactatgaagtattggacataccacttccagaattacaagcgctgaagacattaaaagttacataccatcatgccacaaaagatgaggtgtcagttcacagtataagattgccaaaaaacagcactgttggcgatgtgctaaacgatatcaaaacaaaggttgagttatctcatcccaatgctgaactgagattacttgaggtcttttatcacaagatatacaaggtgtttgcaccaaatgaaaagattgaaaacattaatgatcagtactggacactgcgtgcggaggaggttccagatgaggaaaaaaaccttggtccctttgatcgattgattcatgtatatcattttacaaaagatactcaaaaccaaacgcaagttcagaactttggagaacctttttttatggttattcgtgaggatgagaccctatcttctatcaaagagcgtatacagagaaagcttaaggttccagatgaggatttctcaaagtggaagtttgcatacatttcacttggtcgtccagactattttgaagattcagatactgtagctttaaaatttcagagaaacatgtatggagcttgggagcagtatcttggactggaacatccagacacagctcctaggaaggcacacacaattaatcagaaccggcattcatttgagagacctgtaaaaatttataactaggcatgatagaaatttgagcaatgagctgccaagcaagggctaaaattgctgtcctgaaataaagcgtgccggggcatgttgctcaggtttttcgtggagctggtgagctagttcatgagactccaagtatgatcggggcggcttctcatctttccctgcttttccccggatacatataaagttgtgcagagatgaccccaccgaacaattgtctttagtagataagccagtacttcccgttagatgactttatacagtcgaatagccggcattttagtcgatctttccgttctccagttgctgttggtgctaggaggccttgagctgttgagggtacttgccctgctgtatattatgacgtagagtgtacaagtctttgttgttgacaattacacggtgttttgtaatttcagtgatacacttccaggtccttcagtacgtacttgcctggatggtgtcaatttggcattctatgttagatattgatccatctgttctaaattaaaattataaggcagtttgacttttttaagatatactgcctccgattttctattagttgtcgtttagaatagtgacacggtctccatattataacgtgtctccatattataactt

SEQ ID NO: 67911 - DNA, 3806 bp, Zea Mays
caccaatatcgagatttacttggaccattgagaacctatcaagagttagcacgaagaagctgtactccgaaatctttgttgtcggaggctacaagtggcgaatcttgattttcccaaggggaaataatgttgaattcttatctatgtatttggatgtggctgattctggggtattgccctatgggtggactagatatgcacaattcagcctctctgtggttaatcaaattcacaacaaattcacaataagaaaagaaacacaacatcagttctctgctcgagaaagtgattggggtttcacttcatttatgccgttgggtgaactctacaaccacagtagaggttatcttgtaaatgatacttgtatagtggaagctgaagttgctgtatgtaaagttgttgactattggagttatgactctaaaaaggaaactggctatgttggtcttaaaaatcaaggtgctacctgctatatgaattctcttcttcagacgctgtaccacatcccatatttcagaaaggctgtttatcacatgcccaccactgagaatgatatgccctcaggaagcatccctttagctctacagtcactcttctataagttgcagtataatgacagcagtgtctctacaaaggagctcacaaaatcattcgggtgggacatgcatgattcatttatgcaacatgatgttcaagaattgaacagagttctttctgagaagttggaagataagatgaagggaactgttgtagagggcacaatacaacaattgtttgaagggcaccacatgaactacattgagtgcatcaatgtagatttcaaatcaacaagaaaggaatccttctatgatctccagcttgatgtcaaaggttgtcaggatgtctacgcttcatttgacaagtacgtagaagtggagcaattggaaggtgacaacaagtatcatgccgataagcatggtctgcaggatgcaaagaaaggagttctttttatcgacttccctcctgttctgcagcttcagctaaaacgttttgaatatgatttcatgcgtgacacgatggtgaagataaatgatcgctatgaattcccacttcaattggaccttgatagagatgatggaaaatatttatctcctgatgctgacaggaatgtgcgtaacctttatacccttcacagcgttcttgtccatagcggtggtgttcatggtggacattattatgctttcatacgacctaccctttctgatcaatggttcaagtttgatgatgagcgtgtgacaaaagaagatgcaaagagggcactggaagaacaatatggtggtgaggaggagacaaatcctggcttgaacaacactcccttcaagtttactaaatattcaaatgcatacatgcttgtgtacattcgtgaaagcgacaaggacaaaattatttgtaatgtggatgagaaagatatagcagagcatcttcggattagattggaaaaggaccgtgaagagaaggaacgtcggaagaaggaaaaagctgaggcacacctctataccataatcaaggttgcaagggatgatgacttaaaaactcagatagggaaagacatatattttgatcttgttgaccatgataaagtcccaagcttccgtatccaaaagcagatggcctttgctcaattcaaggaggaggtagcaaaagagtttggtattcccacacagttccaacgattttggctgtgggccaagcgacaaaaccatacttaccgacctaacaggccattgtgtcctcaagacgaagcgcatactgttggacagctaaaggaattggtgaacaaggcccacaacgctgaattgaaattgttcttggaagttgaacttggactggaccttaaacctcttcctcttccagacaagactagagaagatatatttcttctcttcaaactctatgaacctgaaaaggaacagctacggtatgttggtaggctctttgtaaaggcttcaggaagaccacaggacattctgccgaagctaaagatgttggcaggtttttcacaagatgatgatattgaactttatgaggaaattaagttcgaacccaatgtgatgtgtgaatacattgataacaggcttctgttccgatcttgccagcttgaagatggggacataatctgttttcaaaaatcttcaaaggcagatagtgctgaccgatatcgatttcctgacgtaccatcctttttgacgtatatacgtaaccgacaggtggtccactttcgttcactggagaagcccaaggaggacgattttttcctcgagatgtcaaagattttcacatatgatcaagtcgtggaaaaagtagctgaaaaacttggcgtggatgacccatcgaaaattcggcttacatcacataattgttattcgcagcagcctaagcctcagccaataaagtacagaggcgttgaacgtctactggacatgctgattcattataaccagacttctgatattctgtactatgaagtattggacataccacttccagaattacaagcgctgaagacattaaaagttacataccatcatgccacaaaagatgaggtgtcagttcacagtataagattgccaaaaaacagcactgttggcgatgtgctaaacgatatcaaaacaaaggttgagttatctcatcccaatgctgaactgagattacttgaggtcttttatcacaagatatacaaggtgtttgcaccaaatgaaaagattgaaaacattaatgatcagtactggacactgcgtgcggaggaggttccagatgaggaaaaaaaccttggtccctttgatcgattgattcatgtatatcattttacaaaagatactcaaaaccaaacgcaagttcagaactttggagaacctttttttatggttattcgtgaggatgagaccctatcttctatcaaagagcgtatacagagaaagcttaaggttccagatgaggatttctcaaagtggaagtttgcatacatttcacttggtcgtccagactattttgaagattcagatactgtagctttaaaatttcagagaaacatgtatggagcttgggagcagtatcttggactggaacatccagacacagctcctaggaaggcacacacaattaatcagaaccggcattcatttgagagacctgtaaaaatttataactaggcatgatagaaatttgagcaatgagctgccaagcaagggctaaaattgctgtcctgaaataaagcgtgccggggcatgttgctcaggtttttcgtggagctggtgagctagttcatgagactccaagtatgatcggggcggcttctcatctttccctgcttttccccggatacatataaagttgtgcagagatgaccccaccgaacaattgtctttagtagataagccagtacttcccgttagatgactttatacagtcgaatagccggcattttagtcgatctttccgttctccagttgctgttggtgctaggaggccttgagctgttgagggtacttgccctgctgtatattatgacgtagagtgtacaagtctttgttgttgacaattacacggtgttttgtaatttcagtgatacacttccaggtccttcagtacgtacttgcctggatggtgtcaatttggcattctatgttagatattgatccatctgttctaaattaaaattataaggcagtttgacttttttaagatatactgcctccgattttctattagttgtcgtttagaatagtgacacggtctccatattataacgtgtctccatattataactt

SEQ ID NO: 67912 - DNA, 2895 bp, Zea Mays
gaattcttatctatgtatttggatgtggctgattctggggtattgccctatgggtggactagatatgcacaattcagcctctctgtggttaatcaaattcacaacaaattcacaataagaaaagaaacacaacatcagttctctgctcgagaaagtgattggggtttcacttcatttatgccgttgggtgaactctacaaccacagtagaggttatcttgtaaatgatacttgtatagtggaagctgaagttgctgtatgtaaagttgttgactattggagttatgactctaaaaaggaaactggctatgttggtcttaaaaatcaaggtgctacctgctatatgaattctcttcttcagacgctgtaccacatcccatatttcagaaaggctgtttatcacatgcccaccactgagaatgatatgccctcaggaagcatccctttagctctacagtcactcttctataagttgcagtataatgacagcagtgtctctacaaaggagctcacaaaatcattcgggtgggacatgcatgattcatttatgcaacatgatgttcaagaattgaacagagttctttctgagaagttggaagataagatgaagggaactgttgtagagggcacaatacaacaattgtttgaagggcaccacatgaactacattgagtgcatcaatgtagatttcaaatcaacaagaaaggaatccttctatgatctccagcttgatgtcaaaggttgtcaggatgtctacgcttcatttgacaagtacgtagaagtggagcaattggaaggtgacaacaagtatcatgccgataagcatggtctgcaggatgcaaagaaaggagttctttttatcgacttccctcctgttctgcagcttcagctaaaacgttttgaatatgatttcatgcgtgacacgatggtgaagataaatgatcgctatgaattcccacttcaattggaccttgatagagatgatggaaaatatttatctcctgatgctgacaggaatgtgcgtaacctttatacccttcacagcgttcttgtccatagcggtggtgttcatggtggacattattatgctttcatacgacctaccctttctgatcaatggttcaagtttgatgatgagcgtgtgacaaaagaagatgcaaagagggcactggaagaacaatatggtggtgaggaggagctacctcagacaaatcctggcttgaacaacactcccttcaagtttactaaatattcaaatgcatacatgcttgtgtacattcgtgaaagcgacaaggacaaaattatttgtaatgtggatgagaaagatatagcagagcatcttcggattagattggaaaaggaccgtgaagagaaggaacgtcggaagaaggaaaaagctgaggcacacctctataccataatcaaggttgcaagggatgatgacttaaaaactcagatagggaaagacatatattttgatcttgttgaccatgataaagtcccaagcttccgtatccaaaagcagatggcctttgctcaattcaaggaggaggtagcaaaagagtttggtattcccacacagttccaacgattttggctgtgggccaagcgacaaaaccatacttaccgacctaacaggccattgtgtcctcaagacgaagcgcatactgttggacagctaaaggaattggtgaacaaggcccacaacgctgaattgaaattgttcttggaagttgaacttggactggaccttaaacctcttcctcttccagacaagactagagaagatatatttcttctcttcaaactctatgaacctgaaaaggaacagctacggtatgttggtaggctctttgtaaaggcttcaggaagaccacaggacattctgccgaagctaaagatgttggcaggtttttcacaagatgatgatattgaactttatgaggaaattaagttcgaacccaatgtgatgtgtgaatacattgataacaggcttctgttccgatcttgccagcttgaagatggggacataatctgttttcaaaaatcttcaaaggcagatagtgctgaccgatatcgatttcctgacgtaccatcctttttgacgtatatacgtaaccgacaggtggtccactttcgttcactggagaagcccaaggaggacgattttttcctcgagatgtcaaagattttcacatatgatcaagtcgtggaaaaagtagctgaaaaacttggcgtggatgacccatcgaaaattcggcttacatcacataattgttattcgcagcagcctaagcctcagccaataaagtacagaggcgttgaacgtctactggacatgctgattcattataaccagacttctgatattctgtactatgaagtattggacataccacttccagaattacaagcgctgaagacattaaaagttacataccatcatgccacaaaagatgaggtgtcagttcacagtataagattgccaaaaaacagcactgttggcgatgtgctaaacgatatcaaaacaaaggttgagttatctcatcccaatgctgaactgagattacttgaggtcttttatcacaagatatacaaggtgtttgcaccaaatgaaaagattgaaaacattaatgatcagtactggacactgcgtgcggaggaggttccagatgaggaaaaaaaccttggtccctttgatcgattgattcatgtatatcattttacaaaagatactcaaaaccaaacgcaagttcagaactttggagaacctttttttatggttattcgtgaggatgagaccctatcttctatcaaagagcgtatacagagaaagcttaaggttccagatgaggatttctcaaaggttcctgacttccaaatgttttgttcttaa

SEQ ID NO: 67913 - DNA, 413 bp, Zea Mays
cgagcccataatatcgcggccgtccatcccacacttgcccttcatcctagccgtccaccagcgcaccgttcttgccccgcaagcctccgcacgaggcctggaactttccacgggtccaaaaccttctctctctctcctctcctcttccctttctctctcctccgcctcccccgactcgcgagtcgcgatctccacctccctcgaccaccactcccgtaacccacttccgggtgggccccacgtcgccgccggcgaccagcacctcccctccttgactccctcgctacccgccgcccgcgtcccgccggccatgacgacctcgccgccgcccgccgagcagcatgaggaagaggaggtgctggtgccgtatggcccgcacctggagttgcccaatggagcgcagccaatggaag

SEQ ID NO: 67914 - DNA, 3598 bp, Zea Mays
ctggcgcggacgcgcggtggcgccgtcgccgcctcaatgcagttcggaacgccgcttcctccggccgctcggcgcgcacccaccttccacgcagaccccgccgccgacgcgaggcagctcctcggcgcgctcctgccgccacgccctgcgctctaccacgttttgcaggcccacgcccgcctcgccgttctcggcctcgctaccgcgcgtgccctcccgcaactcctcgccgcccttccgcgcctgacgctcgccgccgccgacgtttcccactcctacccgctcctcctgttccgttgctccaactgtacctcggccttcgcgtcgaaccacctcctccgcgtgctcccgcacccgctcccgctccgcctcttcccgcgcctcccacgccgcaacccccactccttcactttcctcctcgcttccctctccaatcacctagacactgagcctgccgctgcaggctccatcgcctcccgcttcatgggcacccacgtgcacgcgctggccgtgaaggctggcgccgcgggcgacctgtacgtgcgtaacgcgcagatccacttttacggcgtctgcggagacgtggcggcgatgcggaaggtgttcgacgagctgccgatcgtgcgggacgtggtgacgtggaatgccgtcctcgctggctacgtgcgagcgggcatggtgggggttgcgcgggaggtgttcgacggaatgccagtgagggatgaggtttcttggagtacggtgataggaggctatgtgaaagaaggagagccggaggtcgcgctgggagtgtttaagaatatggtggcgcagggggtgaaggcaaatgaagcggcaatagtgacggcactgtcggccgctgcacagctgggtttgcttgagcaggggaaatttgtgcatgaagtggtcaagagagtaggaatgacgatgagtgtgaacttaggtgctgcactgattgatatgtattccaagtgtggaagtgtggcagcggccaaggaagtttttgatgccatgcctaggagggatgtttttgcttggaactccatgatctgcgggcttgccacccatggattggggcatgacgcagtccagctctttgagaagtttgtcagtgaggggttttgcccgacaagcatcacatttgtgggggtgctgaatgcctgcagccgtactggccttgttgatgaaggacggcggtatttcaagctgatggcagagaaatatgacattgagtcagagatggagcattacggatgcatggttgatcttctgagtcgtgctggtcttgttcaggaggctgttgaattgattgaagggatgcgcatcccacctgacccagttctctggggcacaatactgtcagcttgcaagagacatggccttgtggacttgggcattactgttggtaataagctaattgaactggatccagctcatgatggatactatgttctccttgcaagtatatatgcaaaagcaaagaaatgggacgaagtcaggaaagttaggaaattaatgtctaaccgtggcaccagcaagtcagctggttggagcttgatggaggcacatggaattgtgcacaagtttctagtaggggacatgaatcacaaagattctgcgcggatatataacatgctttgcacgattaacagaaggttggctgaggcgggctatgtaccagacgtgtcatcagtcttgcatgacatcggggatgaagagaaggttcatgcgattaaggtgcatagcgaacggcttgcaattgcttacgggttcattgttgttgaagctggcagcccaatccgtattgtcaagaaccttagtgtgtgtggtgattgtcatgagttcagtaagatggtgacaaaggtttttggcagggaaattgttgtgagggatgccaatgatccctacatcttgttgcctcctaagaaatttctggggcatcggtgcagcggtagagcctaccgtctgtaaccggaaggtctcgggttcgagccccagcctctgcatattacgtgggtaagacttgtcgcttaaagatacccttccccaaaccccgcacagtgcggaaagcctacaacactgggtgcgccctttttatcctcatgaagcaagagtgtgctttatcttttctgggatactgaaggcaatggttaaaaagtgcatgatggagttggatcatttctatggatacatcaaagaacagattgaaagcagtgcaacctttacaaatactgaagatgctcatatgctcagtccattaccacctcaattgctactgcgctcattggttgatcatatggctccgactgtttcaagtgaattattcagttggattacccaggagtatacagaagcacacaaccttgagaaatcattcagttgcactttatgattatgcaaggtgtgagcatttgattccttcagtttcatgctatcaggtacttcttcattttctgatcagaaacaaaaaaggacgaattgatttgaagagtatatgtggacatacttaaagttggatttggttcttgcaccaaaggaggtattatttattctgttgccatatctttaatcaagaaagatagttttctgcaagctcttggtattcttcggcaactaaagagtttggatcttaaattaagcaagggagccttgtcaactatagaagaagaatttaacaaggaaagcaaattggggatatgatgaatttgttggaaagagtggagatgttcccctgagttgcgtcttcgcaacaaaatctttgtgtctgtgtgtacaaatcttggcactgatcaggcatggttgttattccaaatattggaggccttagggtttgctccagatgcttcgactcttgaaattttcatatttcatagctgtagagaaacgaaactgaaatctgcacatgtatatttatcagagtgcttttctaggcatattaaacctggagtttattcttataatgctattttaggtggcgttcagggagggactgtacagaaatgcaaagtatgtcttcgaagacatagttgaaagagaagtaacacccaatctttcaacatattaaataattcttgcaagatattgcaggatattgcaggttacctaggggtggaaaccaagagagataatgccactggtttctcaaaagctgagtttttttattcagttggcaatggactgtgtttggacactgagtccaaaatgtttgagagttcactggcgcaggctttggatagtgcagttcacacagatattaactcagcgctagtcagggcatctcagcaaggtaatgtttcaagtgctcttcttgtgaaagacgaagctcatcaaattagctacctgttctgagctattcaaggccttattcgtgatccctgcttatgtaatagatgccattgaccttatggaggagatgccagatatgttggaccttttgacttatcatactgtaactaattcgtgtgttcgtgtaggaacttgcaatttgactctagaggaaagcactatcaagaatcaagatggcttccaagtgagccacagattttttttttatgttttggtatgaactatttatgtagccttatgttgtagtaatgca

SEQ ID NO: 67915 - DNA, 4342 bp, Zea Mays
ctggcgcggacgcgcggtggcgccgtcgccgcctcaatgcagttcggaacgccgcttcctccggccgctcggcgcgcacccaccttccacgcagaccccgccgccgacgcgaggcagctcctcggcgcgctcctgccgccacgccctgcgctctaccacgttttgcaggcccacgcccgcctcgccgttctcggcctcgctaccgcgcgtgccctcccgcaactcctcgccgcccttccgcgcctgacgctcgccgccgccgacgtttcccactcctacccgctcctcctgttccgttgctccaactgtacctcggccttcgcgtcgaaccacctcctccgcgtgctcccgcacccgctcccgctccgcctcttcccgcgcctcccacgccgcaacccccactccttcactttcctcctcgcttccctctccaatcacctagacactgagcctgccgctgcaggctccatcgcctcccgcttcatgggcacccacgtgcacgcgctggccgtgaaggctggcgccgcgggcgacctgtacgtgcgtaacgcgcagatccacttttacggcgtctgcggagacgtggcggcgatgcggaaggtgttcgacgagctgccgatcgtgcgggacgtggtgacgtggaatgccgtcctcgctggctacgtgcgagcgggcatggtgggggttgcgcgggaggtgttcgacggaatgccagtgagggatgaggtttcttggagtacggtgataggaggctatgtgaaagaaggagagccggaggtcgcgctgggagtgtttaagaatatggtggcgcagggggtgaaggcaaatgaagcggcaatagtgacggcactgtcggccgctgcacagctgggtttgcttgagcaggggaaatttgtgcatgaagtggtcaagagagtaggaatgacgatgagtgtgaacttaggtgctgcactgattgatatgtattccaagtgtggaagtgtggcagcggccaaggaagtttttgatgccatgcctaggagggatgtttttgcttggaactccatgatctgcgggcttgccacccatggattggggcatgacgcagtccagctctttgagaagtttgtcagtgaggggttttgcccgacaagcatcacatttgtgggggtgctgaatgcctgcagccgtactggccttgttgatgaaggacggcggtatttcaagctgatggcagagaaatatgacattgagtcagagatggagcattacggatgcatggttgatcttctgagtcgtgctggtcttgttcaggaggctgttgaattgattgaagggatgcgcatcccacctgacccagttctctggggcacaatactgtcagcttgcaagagacatggccttgtggacttgggcattactgttggtaataagctaattgaactggatccagctcatgatggatactatgttctccttgcaagtatatatgcaaaagcaaagaaatgggacgaagtcaggaaagttaggaaattaatgtctaaccgtggcaccagcaagtcagctggttggagcttgatggaggcacatggaattgtgcacaagtttctagtaggggacatgaatcacaaagattctgcgcggatatataacatgctttgcacgattaacagaaggttggctgaggcgggctatgtaccagacgtgtcatcagtcttgcatgacatcggggatgaagagaaggttcatgcgattaaggtgcatagcgaacggcttgcaattgcttacgggttcattgttgttgaagctggcagcccaatccgtattgtcaagaaccttagtgtgtgtggtgattgtcatgagttcagtaagatggtgacaaaggtttttggcagggaaattgttgtgagggatggtagtaggtttcatcatatgaaagatggaaagtgttcttgccatgattattggtgattaatcattcgatatgtttcttctcaactatgatgtggagtttaggccatgatttcaatatatttgattggcaagctggtaattgacatgagttctgtttctgagagattccgatataccatttcagatgccatgtaaggcctctcctcacgagttcatagctccacttataagaggcagccaatgatccctacatcttgttgcctcctaagaaatttctggggcatcggtgcagcggtagagcctaccgtctgtaaccggaaggtctcgggttcgagccccagcctctgcatattacgtgggtaagacttgtcgcttaaagatacccttccccaaaccccgcacagtgcggaaagcctacaacactgggtgcgccctttttatcctcatgaagcaagaggtaccttcagctctctctttttctccaaaatttagacaaaattggtggcatcaacaggtggtatgtattggtcaaatgtttgtatgaaggtccactgctcaattgtcatcttatggttttgcctctctcacaatatgtattttcatttgtctccttcaaaggttatcagaaccccatttttattatctgtagggtaagcttgtcctgttatttgttagcaccagctgcagtgtaggaaatggaggaagtcagtacgtgaacaatgttagaatcacaagaaaaatatagatatgctcaaatacgtttattggaagaagatttactatactttcctgaaactgtcagtttaagcaactaagcaagcactaaaatgctgttcagaattctgcactggaagtcttcatttcttcaataagaattttaaacagctaacaaagactgagaagctgtgcttttgtaagtgagctgatgattcattaatatcccccttttttggttataatttcagtgtgctttatcttttctgggatactgaaggcaatggttaaaaagtgcatgatggagttggatcatttctatggatacatcaaagaacagattgaaagcagtgcaacctttacaaatactgaagatgctcatatgctcagtccattaccacctcaattgctactgcgctcattggttgatcatatggctccgactgtttcaagtgaattattcagttggattacccaggagtatacagaagcacacaaccttgagaaatcattcagttgcactttatgattatgcaaggtgtgagcatttgattccttcagtttcatgctatcaggtacttcttcattttctgatcagaaacaaaaaaggacgaattgatttgaagagtatatgtggacatacttaaagttggatttggttcttgcaccaaaggaggtattatttattctgttgccatatctttaatcaagaaagatagttttctgcaagctcttggtattcttcggcaactaaagagtttggatcttaaattaagcaagggagccttgtcaactatagaagaagaatttaacaaggaaagcaaattggggatatgatgaatttgttggaaagagtggagatgttcccctgagttgcgtcttcgcaacaaaatctttgtgtctgtgtgtacaaatcttggcactgatcaggcatggttgttattccaaatattggaggccttagggtttgctccagatgcttcgactcttgaaattttcatatttcatagctgtagagaaacgaaactgaaatctgcacatgtatatttatcagagtgcttttctaggcatattaaacctggagtttattcttataatgctattttaggtggcgttcagggagggactgtacagaaatgcaaagtatgtcttcgaagacatagttgaaagagaagtaacacccaatctttcaacatattaaataattcttgcaagatattgcaggatattgcaggttacctaggggtggaaaccaagagagataatgccactggtttctcaaaagctgagtttttttattcagttggcaatggactgtgtttggacactgagtccaaaatgtttgagagttcactggcgcaggctttggatagtgcagttcacacagatattaactcagcgctagtcagggcatctcagcaaggtaatgtttcaagtgctcttcttgtgaaagacgaagctcatcaaattagctacctgttctgagctattcaaggccttattcgtgatccctgcttatgtaatagatgccattgaccttatggaggagatgccagatatgttggaccttttgacttatcatactgtaactaattcgtgtgttcgtgtaggaacttgcaatttgactctagaggaaagcactatcaagaatcaagatggcttccaagtgagccacagattttttttttatgttttggtatgaactatttatgtagccttatgttgtagtaatgca

SEQ ID NO: 67916 - DNA, 3647 bp, Zea Mays
ctggcgcggacgcgcggtggcgccgtcgccgcctcaatgcagttcggaacgccgcttcctccggccgctcggcgcgcacccaccttccacgcagaccccgccgccgacgcgaggcagctcctcggcgcgctcctgccgccacgccctgcgctctaccacgttttgcaggcccacgcccgcctcgccgttctcggcctcgctaccgcgcgtgccctcccgcaactcctcgccgcccttccgcgcctgacgctcgccgccgccgacgtttcccactcctacccgctcctcctgttccgttgctccaactgtacctcggccttcgcgtcgaaccacctcctccgcgtgctcccgcacccgctcccgctccgcctcttcccgcgcctcccacgccgcaacccccactccttcactttcctcctcgcttccctctccaatcacctagacactgagcctgccgctgcaggctccatcgcctcccgcttcatgggcacccacgtgcacgcgctggccgtgaaggctggcgccgcgggcgacctgtacgtgcgtaacgcgcagatccacttttacggcgtctgcggagacgtggcggcgatgcggaaggtgttcgacgagctgccgatcgtgcgggacgtggtgacgtggaatgccgtcctcgctggctacgtgcgagcgggcatggtgggggttgcgcgggaggtgttcgacggaatgccagtgagggatgaggtttcttggagtacggtgataggaggctatgtgaaagaaggagagccggaggtcgcgctgggagtgtttaagaatatggtggcgcagggggtgaaggcaaatgaagcggcaatagtgacggcactgtcggccgctgcacagctgggtttgcttgagcaggggaaatttgtgcatgaagtggtcaagagagtaggaatgacgatgagtgtgaacttaggtgctgcactgattgatatgtattccaagtgtggaagtgtggcagcggccaaggaagtttttgatgccatgcctaggagggatgtttttgcttggaactccatgatctgcgggcttgccacccatggattggggcatgacgcagtccagctctttgagaagtttgtcagtgaggggttttgcccgacaagcatcacatttgtgggggtgctgaatgcctgcagccgtactggccttgttgatgaaggacggcggtatttcaagctgatggcagagaaatatgacattgagtcagagatggagcattacggatgcatggttgatcttctgagtcgtgctggtcttgttcaggaggctgttgaattgattgaagggatgcgcatcccacctgacccagttctctggggcacaatactgtcagcttgcaagagacatggccttgtggacttgggcattactgttggtaataagctaattgaactggatccagctcatgatggatactatgttctccttgcaagtatatatgcaaaagcaaagaaatgggacgaagtcaggaaagttaggaaattaatgtctaaccgtggcaccagcaagtcagctggttggagcttgatggaggcacatggaattgtgcacaagtttctagtaggggacatgaatcacaaagattctgcgcggatatataacatgctttgcacgattaacagaaggttggctgaggcgggctatgtaccagacgtgtcatcagtcttgcatgacatcggggatgaagagaaggttcatgcgattaaggtgcatagcgaacggcttgcaattgcttacgggttcattgttgttgaagctggcagcccaatccgtattgtcaagaaccttagtgtgtgtggtgattgtcatgagttcagtaagatggtgacaaaggtttttggcagggaaattgttgtgagggatggtagtaggtttcatcatatgaaagatggaaagtgttcttgccatgattattggtgattaatcattcgatatgtttcttctcaactatgatgtggagtttaggccatgatttcaatatatttgattggcaagctggtaattgacatgagttctgtttctgagagattccgatataccatttcagatgccatgtaaggcctctcctcacgagttcatagctccacttataagaggcagccaatgatccctacatcttgttgcctcctaagaaatttctggggcatcggtgcagcggtagagcctaccgtctgtaaccggaaggtctcgggttcgagccccagcctctgcatattacgtgggtaagacttgtcgcttaaagatacccttccccaaaccccgcacagtgcggaaagcctacaacactgggtgcgccctttttatcctcatgaagcaagagtgtgctttatcttttctgggatactgaaggcaatggttaaaaagtgcatgatggagttggatcatttctatggatacatcaaagaacagattgaaagcagtgcaacctttacaaatactgaagatgctcatatgctcagtccattaccacctcaattgctactgcgctcattggttgatcatatggctccgactgtttcaagtgaattattcagttggattacccaggagtatacagaagcacacaaccttgagaaatcattcagttgcactttatgattatgcaaggtgtgagcatttgattccttcagtttcatgctatcaggtacttcttcattttctgatcagaaacaaaaaaggacgaattgatttgaagagtatatgtggacatacttaaagttggatttggttcttgcaccaaaggaggtattatttattctgttgccatatctttaatcaagaaagatagttttctgcaagctcttggtattcttcggcaactaaagagtttggatcttaaattaagcaagggagccttgtcaactatagaagaagaatttaacaaggaaagcaaattggggatatgatgaatttgttggaaagagtggagatgttcccctgagttgcgtcttcgcaacaaaatctttgtgtctgtgtgtacaaatcttggcactgatcaggcatggttgttattccaaatattggaggccttagggtttgctccagatgcttcgactcttgaaattttcatatttcatagctgtagagaaacgaaactgaaatctgcacatgtatatttatcagagtgcttttctaggcatattaaacctggagtttattcttataatgctattttaggtggcgttcagggagggactgtacagaaatgcaaagtatgtcttcgaagacatagttgaaagagaagtaacacccaatctttcaacatattaaataattcttgcaagatattgcaggatattgcaggttacctaggggtggaaaccaagagagataatgccactggtttctcaaaagctgagtttttttattcagttggcaatggactgtgtttggacactgagtccaaaatgtttgagagttcactggcgcaggctttggatagtgcagttcacacagatattaactcagcgctagtcagggcatctcagcaaggaacttgcaatttgactctagaggaaagcactatcaagaatcaagatggcttccaagtgagccacagattttttttttatgttttggtatgaactatttatgtagccttatgttgtagtaatgca

SEQ ID NO: 67917 - DNA, 3646 bp, Zea Mays
ctggcgcggacgcgcggtggcgccgtcgccgcctcaatgcagttcggaacgccgcttcctccggccgctcggcgcgcacccaccttccacgcagaccccgccgccgacgcgaggcagctcctcggcgcgctcctgccgccacgccctgcgctctaccacgttttgcaggcccacgcccgcctcgccgttctcggcctcgctaccgcgcgtgccctcccgcaactcctcgccgcccttccgcgcctgacgctcgccgccgccgacgtttcccactcctacccgctcctcctgttccgttgctccaactgtacctcggccttcgcgtcgaaccacctcctccgcgtgctcccgcacccgctcccgctccgcctcttcccgcgcctcccacgccgcaacccccactccttcactttcctcctcgcttccctctccaatcacctagacactgagcctgccgctgcaggctccatcgcctcccgcttcatgggcacccacgtgcacgcgctggccgtgaaggctggcgccgcgggcgacctgtacgtgcgtaacgcgcagatccacttttacggcgtctgcggagacgtggcggcgatgcggaaggtgttcgacgagctgccgatcgtgcgggacgtggtgacgtggaatgccgtcctcgctggctacgtgcgagcgggcatggtgggggttgcgcgggaggtgttcgacggaatgccagtgagggatgaggtttcttggagtacggtgataggaggctatgtgaaagaaggagagccggaggtcgcgctgggagtgtttaagaatatggtggcgcagggggtgaaggcaaatgaagcggcaatagtgacggcactgtcggccgctgcacagctgggtttgcttgagcaggggaaatttgtgcatgaagtggtcaagagagtaggaatgacgatgagtgtgaacttaggtgctgcactgattgatatgtattccaagtgtggaagtgtggcagcggccaaggaagtttttgatgccatgcctaggagggatgtttttgcttggaactccatgatctgcgggcttgccacccatggattggggcatgacgcagtccagctctttgagaagtttgtcagtgaggggttttgcccgacaagcatcacatttgtgggggtgctgaatgcctgcagccgtactggccttgttgatgaaggacggcggtatttcaagctgatggcagagaaatatgacattgagtcagagatggagcattacggatgcatggttgatcttctgagtcgtgctggtcttgttcaggaggctgttgaattgattgaagggatgcgcatcccacctgacccagttctctggggcacaatactgtcagcttgcaagagacatggccttgtggacttgggcattactgttggtaataagctaattgaactggatccagctcatgatggatactatgttctccttgcaagtatatatgcaaaagcaaagaaatgggacgaagtcaggaaagttaggaaattaatgtctaaccgtggcaccagcaagtcagctggttggagcttgatggaggcacatggaattgtgcacaagtttctagtaggggacatgaatcacaaagattctgcgcggatatataacatgctttgcacgattaacagaaggttggctgaggcgggctatgtaccagacgtgtcatcagtcttgcatgacatcggggatgaagagaaggttcatgcgattaaggtgcatagcgaacggcttgcaattgcttacgggttcattgttgttgaagctggcagcccaatccgtattgtcaagaaccttagtgtgtgtggtgattgtcatgagttcagtaagatggtgacaaaggtttttggcagggaaattgttgtgagggatgccaatgatccctacatcttgttgcctcctaagaaatttctggggcatcggtgcagcggtagagcctaccgtctgtaaccggaaggtctcgggttcgagccccagcctctgcatattacgtgggtaagacttgtcgcttaaagatacccttccccaaaccccgcacagtgcggaaagcctacaacactgggtgcgccctttttatcctcatgaagcaagagtgtgctttatcttttctgggatactgaaggcaatggttaaaaagtgcatgatggagttggatcatttctatggatacatcaaagaacagattgaaagcagtgcaacctttacaaatactgaagatgctcatatgctcagtccattaccacctcaattgctactgcgctcattggttgatcatatggctccgactgtttcaagtgaattattcagttggattacccaggagtatacagaagcacacaaccttgagaaatcattcagttgcactttatgattatgcaaggtgtgagcatttgattccttcagtttcatgctatcaggtacttcttcattttctgatcagaaacaaaaaaggacgaattgatttgaagagtatatgtggacatacttaaagttggatttggttcttgcaccaaaggaggtattatttattctgttgccatatctttaatcaagaaagatagttttctgcaagctcttggtattcttcggcaactaaagagtttggatcttaaattaagcaagggagccttgtcaactatagaagaagaatttaacaaggaaagcaaattggggatatgatgaatttgttggaaagagtggagatgttcccctgagttgcgtcttcgcaacaaaatctttgtgtctgtgtgtacaaatcttggcactgatcaggcatggttgttattccaaatattggaggccttagggtttgctccagatgcttcgactcttgaaattttcatatttcatagctgtagagaaacgaaactgaaatctgcacatgtatatttatcagagtgcttttctaggcatattaaacctggagtttattcttataatgctattttaggtggcgttcagggagggactgtacagaaatgcaaagtatgtcttcgaagacatagttgaaagagaagtaacacccaatctttcaacatattaaataattcttgcaagatattgcaggtcatctaggggtggaaaccaagagagataattaaataattcttgcaggatattgcaggttacctaggggtggaaaccaagagagataatgccactggtttctcaaaagctgagtttttttattcagttggcaatggactgtgtttggacactgagtccaaaatgtttgagagttcactggcgcaggctttggatagtgcagttcacacagatattaactcagcgctagtcagggcatctcagcaaggtaatgtttcaagtgctcttcttgtgaaagacgaagctcatcaaattagctacctgttctgagctattcaaggccttattcgtgatccctgcttatgtaatagatgccattgaccttatggaggagatgccagatatgttggaccttttgacttatcatactgtaactaattcgtgtgttcgtgtaggaacttgcaatttgactctagaggaaagcactatcaagaatcaagatggcttccaagtgagccacagattttttttttatgttttggtatgaactatttatgtagccttatgttgtagtaatgca

SEQ ID NO: 67918 - DNA, 5984 bp, Zea Mays
ctggcgcggacgcgcggtggcgccgtcgccgcctcaatgcagttcggaacgccgcttcctccggccgctcggcgcgcacccaccttccacgcagaccccgccgccgacgcgaggcagctcctcggcgcgctcctgccgccacgccctgcgctctaccacgttttgcaggcccacgcccgcctcgccgttctcggcctcgctaccgcgcgtgccctcccgcaactcctcgccgcccttccgcgcctgacgctcgccgccgccgacgtttcccactcctacccgctcctcctgttccgttgctccaactgtacctcggccttcgcgtcgaaccacctcctccgcgtgctcccgcacccgctcccgctccgcctcttcccgcgcctcccacgccgcaacccccactccttcactttcctcctcgcttccctctccaatcacctagacactgagcctgccgctgcaggctccatcgcctcccgcttcatgggcacccacgtgcacgcgctggccgtgaaggctggcgccgcgggcgacctgtacgtgcgtaacgcgcagatccacttttacggcgtctgcggagacgtggcggcgatgcggaaggtgttcgacgagctgccgatcgtgcgggacgtggtgacgtggaatgccgtcctcgctggctacgtgcgagcgggcatggtgggggttgcgcgggaggtgttcgacggaatgccagtgagggatgaggtttcttggagtacggtgataggaggctatgtgaaagaaggagagccggaggtcgcgctgggagtgtttaagaatatggtggcgcagggggtgaaggcaaatgaagcggcaatagtgacggcactgtcggccgctgcacagctgggtttgcttgagcaggggaaatttgtgcatgaagtggtcaagagagtaggaatgacgatgagtgtgaacttaggtgctgcactgattgatatgtattccaagtgtggaagtgtggcagcggccaaggaagtttttgatgccatgcctaggagggatgtttttgcttggaactccatgatctgcgggcttgccacccatggattggggcatgacgcagtccagctctttgagaagtttgtcagtgaggggttttgcccgacaagcatcacatttgtgggggtgctgaatgcctgcagccgtactggccttgttgatgaaggacggcggtatttcaagctgatggcagagaaatatgacattgagtcagagatggagcattacggatgcatggttgatcttctgagtcgtgctggtcttgttcaggaggctgttgaattgattgaagggatgcgcatcccacctgacccagttctctggggcacaatactgtcagcttgcaagagacatggccttgtggacttgggcattactgttggtaataagctaattgaactggatccagctcatgatggatactatgttctccttgcaagtatatatgcaaaagcaaagaaatgggacgaagtcaggaaagttaggaaattaatgtctaaccgtggcaccagcaagtcagctggttggagcttgatggaggcacatggaattgtgcacaagtttctagtaggggacatgaatcacaaagattctgcgcggatatataacatgctttgcacgattaacagaaggttggctgaggcgggctatgtaccagacgtgtcatcagtcttgcatgacatcggggatgaagagaaggttcatgcgattaaggtgcatagcgaacggcttgcaattgcttacgggttcattgttgttgaagctggcagcccaatccgtattgtcaagaaccttagtgtgtgtggtgattgtcatgagttcagtaagatggtgacaaaggtttttggcagggaaattgttgtgagggatggtagtaggtttcatcatatgaaagatggaaagtgttcttgccatgattattggtgattaatcattcgatatgtttcttctcaactatgatgtggagtttaggccatgatttcaatatatttgattggcaagctggtaattgacatgagttctgtttctgagagattccgatataccatttcagatgccatgtaaggcctctcctcacgagttcatagctccacttataagaggcagccaatgatccctacatcttgttgcctcctaagaaatttctggggcatcggtgcagcggtagagcctaccgtctgtaaccggaaggtctcgggttcgagccccagcctctgcatattacgtgggtaagacttgtcgcttaaagatacccttccccaaaccccgcacagtgcggaaagcctacaacactgggtgcgccctttttatcctcatgaagcaagagtgtgctttatcttttctgggatactgaaggcaatggttaaaaagtgcatgatggagttggatcatttctatggatacatcaaagaacagattgaaagcagtgcaacctttacaaatactgaaggtcaagtgttttactatccacttgcataaattatactccttcctggtgacgaaggataagcaaaggaatatttgctaggacctgggaagccacaattatttgagataggaacagggggctattatgaggtatcaacatgaattttatgtaaatcaactctcagtcaaccaaattgcaagttttgtagttgaactgcctcctaggaggctaggacttgatcctccctgcctcttgttagttgtcccgttacctttccaaggtatctagaggttagagttgatctgagctgccatgttaacacctcaatcttctaattgatataactaactgtttgaaatccaccagtatcatgtagcaatagcatccttgcataaagctgtttcttggagttaactgtacaagttttgtaagaaactgaaccattaaaagattataaatcttttttctatcttccattatctacacagagttgaattcctctattagcaaaatgtactatttttcccgatgctcattttcaggtaggtttgagctgagtatctggtagtattcttgattcatttactagagcattgagattatcacatgtatcatgtctccagtatgcagaagttgaggaagaattctttgacatatacaagtgttcgtctgttcgactagctatgtttatttggaacagcacaactggctagattatcacttgtataaatgatcaattctgtgaaaggttaggctagttggtccggcagaatggaaacattagggcttgattgacatacttgagacttagcaatctgggtttcttggactagttttgtcaatgggctaagacgagatcgtacggttcacttttctatctttagcattccacttcactccacaaggggacacctaattcacattaggctggtctctttttgtttctagcctgaatgtcaggcgagaagtcaagcccgtgtttggtttcgaatggttccatcccatttttcatggaatcgtcagttttcatgcccctgcctgtcatcttcctgtgtgcatcttcttcctcctcactggaccaccgctcgccggtctcttactctctttgcagcagccccacctcgtctactgtcgctgaacgcaggagcctcgagctctcccagacgccatgtgctcgctcggtttctcccctgcctcaacgggccctgtgggatggcgggcagttctctaacccatcagagcatcagcaacacgattgggatttgggagcagcattgtcttcctcacgccgctatttctcgcttgcctcagttggcctcccccgcctatccaggcacagcgggtggactgagtgttcgctgatcagatgtggcatgcgggtccttactcagcggtgaggctggaaggtctgaacagattagatgtggatggcatggaagttcctcttcacaatccatctctgagccccgacgacaggcaagaggccaagattggagtccggggttccgccaataatgcccctgagctgagtaccaacaaacggagtttgttgtgaggtggaggcctctttgtggagaagcgaaattcaatctttgcttgcgctccacaggagtctggtggctccaatttagagcagaaagctggacaaacgttcaaagtcgaaacaaagctgtcttcgatggagtaaacccttccttgagctctgttaaaagtttgtttctgaatgagttaagttgctgggatagggctggggctaagcagttacctagcattgatcttcctgctgttttagtagggtctaggctgggttccaatctggtctagtgttttggcttgccctctgggcattgtactttggtcctcttggacctttttcctctcttaaaataatggcgtgcatttctcctgcccgttcaagagaaaaaagtcaatgtccattctgaattaaaatcatgctctggaattgggagtctagttatagcgaagtgctctcagatatctaagagaaatgaggacacctttgatggaaagtacagcttgcaagatgttcttaagcctggtttatggctctcaccggagacctccgctggttttgccgggcctatgggctgatgcctaaggattgttttgacattttgattggttttggactcagtgcagcagaagtgagaaagagaagatttctatggaatttgtataggtgggcctcactacagagcaaggagttccaaccagtgtttacaagtcgtccgactaatcgcgattagtcgggctggtcgcctggaagagggtgattaggtggatgacgcgattaggatttcaagtcgtcctagtcgtcgacttgggcgattagccatccggtcgaaagcttcctggttgttttttgtcgtcgcaattttggtactgtgcttcactctagtttttggcccatctacagtagtccgcccctccagcagtaaatcagccgccagaaaccctcccagccgccagtaaccctcccagccaccagtaaaccctactcctctcctctgtcatctctggtttctgccgacgtctctgctccaagtgctccagccgtccagcgtctgccaccggcgtccagtaccccagtgctccgacgtctgtcacctagtcaagaattgaagatgagctcatcatctgaaggtagcacctgctctcccttctctgattatctcccagtctcccttccctctattaccactggtagcactagcacctgaaggtgcacctgcagacctctgtttgagcagtcaccctgagttcagattacctctgtttgagcagtcaccctgcagtacctatattactttcagtttggactttggatggattcagttttacacttttactgaattactgctagtatgctactaattatgcctatattattgcagaaatgcagtgcttatatagttaatataagttatatacatatacatatgtccataaatctataggacgactaacggacgaccagaggtcgaccaggaccgattaatcgacctaatcgtcgccctaatcgcgattaggcgcctggtcgctgctctagctcgaccagctggtcgcccgacttgtaaacattggttccaacatctgccaacagggacggatttgaacctgggactacctcggctgcagccccggtcgcggtgccggcaacaaggcgagtatgcagcagccaacagagagtcacgtgtcggtgtaagcaggccaagacgccagacacgctgtcctgcagtgcacgctataggctgcactgcaagccatggcccacgagatacaaaagaaaaggcgtggcaagggctggaggaacggtgtagtctgtagtgtcatttcaagactgtgccttgccctttttcttttcaatcgacgtcatttatcttccctctagaatctagactttactctatatgattgcctttcaccaagagattaggttttatactttggttattttggattggtcaattatttgctaggttaattgataaaattattttttagtttatag

SEQ ID NO: 67919 - DNA, 6256 bp, Zea Mays
ctggcgcggacgcgcggtggcgccgtcgccgcctcaatgcagttcggaacgccgcttcctccggccgctcggcgcgcacccaccttccacgcagaccccgccgccgacgcgaggcagctcctcggcgcgctcctgccgccacgccctgcgctctaccacgttttgcaggcccacgcccgcctcgccgttctcggcctcgctaccgcgcgtgccctcccgcaactcctcgccgcccttccgcgcctgacgctcgccgccgccgacgtttcccactcctacccgctcctcctgttccgttgctccaactgtacctcggccttcgcgtcgaaccacctcctccgcgtgctcccgcacccgctcccgctccgcctcttcccgcgcctcccacgccgcaacccccactccttcactttcctcctcgcttccctctccaatcacctagacactgagcctgccgctgcaggctccatcgcctcccgcttcatgggcacccacgtgcacgcgctggccgtgaaggctggcgccgcgggcgacctgtacgtgcgtaacgcgcagatccacttttacggcgtctgcggagacgtggcggcgatgcggaaggtgttcgacgagctgccgatcgtgcgggacgtggtgacgtggaatgccgtcctcgctggctacgtgcgagcgggcatggtgggggttgcgcgggaggtgttcgacggaatgccagtgagggatgaggtttcttggagtacggtgataggaggctatgtgaaagaaggagagccggaggtcgcgctgggagtgtttaagaatatggtggcgcagggggtgaaggcaaatgaagcggcaatagtgacggcactgtcggccgctgcacagctgggtttgcttgagcaggggaaatttgtgcatgaagtggtcaagagagtaggaatgacgatgagtgtgaacttaggtgctgcactgattgatatgtattccaagtgtggaagtgtggcagcggccaaggaagtttttgatgccatgcctaggagggatgtttttgcttggaactccatgatctgcgggcttgccacccatggattggggcatgacgcagtccagctctttgagaagtttgtcagtgaggggttttgcccgacaagcatcacatttgtgggggtgctgaatgcctgcagccgtactggccttgttgatgaaggacggcggtatttcaagctgatggcagagaaatatgacattgagtcagagatggagcattacggatgcatggttgatcttctgagtcgtgctggtcttgttcaggaggctgttgaattgattgaagggatgcgcatcccacctgacccagttctctggggcacaatactgtcagcttgcaagagacatggccttgtggacttgggcattactgttggtaataagctaattgaactggatccagctcatgatggatactatgttctccttgcaagtatatatgcaaaagcaaagaaatgggacgaagtcaggaaagttaggaaattaatgtctaaccgtggcaccagcaagtcagctggttggagcttgatggaggcacatggaattgtgcacaagtttctagtaggggacatgaatcacaaagattctgcgcggatatataacatgctttgcacgattaacagaaggttggctgaggcgggctatgtaccagacgtgtcatcagtcttgcatgacatcggggatgaagagaaggttcatgcgattaaggtgcatagcgaacggcttgcaattgcttacgggttcattgttgttgaagctggcagcccaatccgtattgtcaagaaccttagtgtgtgtggtgattgtcatgagttcagtaagatggtgacaaaggtttttggcagggaaattgttgtgagggatgccaatgatccctacatcttgttgcctcctaagaaatttctggggcatcggtgcagcggtagagcctaccgtctgtaaccggaaggtctcgggttcgagccccagcctctgcatattacgtgggtaagacttgtcgcttaaagatacccttccccaaaccccgcacagtgcggaaagcctacaacactgggtgcgccctttttatcctcatgaagcaagaggtaccttcagctctctctttttctccaaaatttagacaaaattggtggcatcaacaggtggtatgtattggtcaaatgtttgtatgaaggtccactgctcaattgtcatcttatggttttgcctctctcacaatatgtattttcatttgtctccttcaaaggttatcagaaccccatttttattatctgtagggtaagcttgtcctgttatttgttagcaccagctgcagtgtaggaaatggaggaagtcagtacgtgaacaatgttagaatcacaagaaaaatatagatatgctcaaatacgtttattggaagaagatttactatactttcctgaaactgtcagtttaagcaactaagcaagcactaaaatgctgttcagaattctgcactggaagtcttcatttcttcaataagaattttaaacagctaacaaagactgagaagctgtgcttttgtaagtgagctgatgattcattaatatcccccttttttggttataatttcagtgtgctttatcttttctgggatactgaaggcaatggttaaaaagtgcatgatggagttggatcatttctatggatacatcaaagaacagattgaaagcagtgcaacctttacaaatactgaaggtcaagtgttttactatccacttgcataaattatactccttcctggtgacgaaggataagcaaaggaatatttgctaggacctgggaagccacaattatttgagataggaacagggggctattatgaggtatcaacatgaattttatgtaaatcaactctcagtcaaccaaattgcaagttttgtagttgaactgcctcctaggaggctaggacttgatcctccctgcctcttgttagttgtcccgttacctttccaaggtatctagaggttagagttgatctgagctgccatgttaacacctcaatcttctaattgatataactaactgtttgaaatccaccagtatcatgtagcaatagcatccttgcataaagctgtttcttggagttaactgtacaagttttgtaagaaactgaaccattaaaagattataaatcttttttctatcttccattatctacacagagttgaattcctctattagcaaaatgtactatttttcccgatgctcattttcaggtaggtttgagctgagtatctggtagtattcttgattcatttactagagcattgagattatcacatgtatcatgtctccagtatgcagaagttgaggaagaattctttgacatatacaagtgttcgtctgttcgactagctatgtttatttggaacagcacaactggctagattatcacttgtataaatgatcaattctgtgaaaggttaggctagttggtccggcagaatggaaacattagggcttgattgacatacttgagacttagcaatctgggtttcttggactagttttgtcaatgggctaagacgagatcgtacggttcacttttctatctttagcattccacttcactccacaaggggacacctaattcacattaggctggtctctttttgtttctagcctgaatgtcaggcgagaagtcaagcccgtgtttggtttcgaatggttccatcccatttttcatggaatcgtcagttttcatgcccctgcctgtcatcttcctgtgtgcatcttcttcctcctcactggaccaccgctcgccggtctcttactctctttgcagcagccccacctcgtctactgtcgctgaacgcaggagcctcgagctctcccagacgccatgtgctcgctcggtttctcccctgcctcaacgggccctgtgggatggcgggcagttctctaacccatcagagcatcagcaacacgattgggatttgggagcagcattgtcttcctcacgccgctatttctcgcttgcctcagttggcctcccccgcctatccaggcacagcgggtggactgagtgttcgctgatcagatgtggcatgcgggtccttactcagcggtgaggctggaaggtctgaacagattagatgtggatggcatggaagttcctcttcacaatccatctctgagccccgacgacaggcaagaggccaagattggagtccggggttccgccaataatgcccctgagctgagtaccaacaaacggagtttgttgtgaggtggaggcctctttgtggagaagcgaaattcaatctttgcttgcgctccacaggagtctggtggctccaatttagagcagaaagctggacaaacgttcaaagtcgaaacaaagctgtcttcgatggagtaaacccttccttgagctctgttaaaagtttgtttctgaatgagttaagttgctgggatagggctggggctaagcagttacctagcattgatcttcctgctgttttagtagggtctaggctgggttccaatctggtctagtgttttggcttgccctctgggcattgtactttggtcctcttggacctttttcctctcttaaaataatggcgtgcatttctcctgcccgttcaagagaaaaaagtcaatgtccattctgaattaaaatcatgctctggaattgggagtctagttatagcgaagtgctctcagatatctaagagaaatgaggacacctttgatggaaagtacagcttgcaagatgttcttaagcctggtttatggctctcaccggagacctccgctggttttgccgggcctatgggctgatgcctaaggattgttttgacattttgattggttttggactcagtgcagcagaagtgagaaagagaagatttctatggaatttgtataggtgggcctcactacagagcaaggagttccaaccagtgtttacaagtcgtccgactaatcgcgattagtcgggctggtcgcctggaagagggtgattaggtggatgacgcgattaggatttcaagtcgtcctagtcgtcgacttgggcgattagccatccggtcgaaagcttcctggttgttttttgtcgtcgcaattttggtactgtgcttcactctagtttttggcccatctacagtagtccgcccctccagcagtaaatcagccgccagaaaccctcccagccgccagtaaccctcccagccaccagtaaaccctactcctctcctctgtcatctctggtttctgccgacgtctctgctccaagtgctccagccgtccagcgtctgccaccggcgtccagtaccccagtgctccgacgtctgtcacctagtcaagaattgaagatgagctcatcatctgaaggtagcacctgctctcccttctctgattatctcccagtctcccttccctctattaccactggtagcactagcacctgaaggtgcacctgcagacctctgtttgagcagtcaccctgagttcagattacctctgtttgagcagtcaccctgcagtacctatattactttcagtttggactttggatggattcagttttacacttttactgaattactgctagtatgctactaattatgcctatattattgcagaaatgcagtgcttatatagttaatataagttatatacatatacatatgtccataaatctataggacgactaacggacgaccagaggtcgaccaggaccgattaatcgacctaatcgtcgccctaatcgcgattaggcgcctggtcgctgctctagctcgaccagctggtcgcccgacttgtaaacattggttccaacatctgccaacagggacggatttgaacctgggactacctcggctgcagccccggtcgcggtgccggcaacaaggcgagtatgcagcagccaacagagagtcacgtgtcggtgtaagcaggccaagacgccagacacgctgtcctgcagtgcacgctataggctgcactgcaagccatggcccacgagatacaaaagaaaaggcgtggcaagggctggaggaacggtgtagtctgtagtgtcatttcaagactgtgccttgccctttttcttttcaatcgacgtcatttatcttccctctagaatctagactttactctatatgattgcctttcaccaagagattaggttttatactttggttattttggattggtcaattatttgctaggttaattgataaaattattttttagtttatag

SEQ ID NO: 67920 - DNA, 3357 bp, Zea Mays
ctggcgcggacgcgcggtggcgccgtcgccgcctcaatgcagttcggaacgccgcttcctccggccgctcggcgcgcacccaccttccacgcagaccccgccgccgacgcgaggcagctcctcggcgcgctcctgccgccacgccctgcgctctaccacgttttgcaggcccacgcccgcctcgccgttctcggcctcgctaccgcgcgtgccctcccgcaactcctcgccgcccttccgcgcctgacgctcgccgccgccgacgtttcccactcctacccgctcctcctgttccgttgctccaactgtacctcggccttcgcgtcgaaccacctcctccgcgtgctcccgcacccgctcccgctccgcctcttcccgcgcctcccacgccgcaacccccactccttcactttcctcctcgcttccctctccaatcacctagacactgagcctgccgctgcaggctccatcgcctcccgcttcatgggcacccacgtgcacgcgctggccgtgaaggctggcgccgcgggcgacctgtacgtgcgtaacgcgcagatccacttttacggcgtctgcggagacgtggcggcgatgcggaaggtgttcgacgagctgccgatcgtgcgggacgtggtgacgtggaatgccgtcctcgctggctacgtgcgagcgggcatggtgggggttgcgcgggaggtgttcgacggaatgccagtgagggatgaggtttcttggagtacggtgataggaggctatgtgaaagaaggagagccggaggtcgcgctgggagtgtttaagaatatggtggcgcagggggtgaaggcaaatgaagcggcaatagtgacggcactgtcggccgctgcacagctgggtttgcttgagcaggggaaatttgtgcatgaagtggtcaagagagtaggaatgacgatgagtgtgaacttaggtgctgcactgattgatatgtattccaagtgtggaagtgtggcagcggccaaggaagtttttgatgccatgcctaggagggatgtttttgcttggaactccatgatctgcgggcttgccacccatggattggggcatgacgcagtccagctctttgagaagtttgtcagtgaggggttttgcccgacaagcatcacatttgtgggggtgctgaatgcctgcagccgtactggccttgttgatgaaggacggcggtatttcaagctgatggcagagaaatatgacattgagtcagagatggagcattacggatgcatggttgatcttctgagtcgtgctggtcttgttcaggaggctgttgaattgattgaagggatgcgcatcccacctgacccagttctctggggcacaatactgtcagcttgcaagagacatggccttgtggacttgggcattactgttggtaataagctaattgaactggatccagctcatgatggatactatgttctccttgcaagtatatatgcaaaagcaaagaaatgggacgaagtcaggaaagttaggaaattaatgtctaaccgtggcaccagcaagtcagctggttggagcttgatggaggcacatggaattgtgcacaagtttctagtaggggacatgaatcacaaagattctgcgcggatatataacatgctttgcacgattaacagaaggttggctgaggcgggctatgtaccagacgtgtcatcagtcttgcatgacatcggggatgaagagaaggttcatgcgattaaggtgcatagcgaacggcttgcaattgcttacgggttcattgttgttgaagctggcagcccaatccgtattgtcaagaaccttagtgtgtgtggtgattgtcatgagttcagtaagatggtgacaaaggtttttggcagggaaattgttgtgagggatggtagtaggtttcatcatatgaaagatggaaagtgttcttgccatgattattggtgattaatcattcgatatgtttcttctcaactatgatgtggagtttaggccatgatttcaatatatttgattggcaagctggtaattgacatgagttctgtttctgagagattccgatataccatttcagatgccatgtaaggcctctcctcacgagttcatagctccacttataagaggcagccaatgatccctacatcttgttgcctcctaagaaatttctggggcatcggtgcagcggtagagcctaccgtctgtaaccggaaggtctcgggttcgagccccagcctctgcatattacgtgggtaagacttgtcgcttaaagatacccttccccaaaccccgcacagtgcggaaagcctacaacactgggtgcgccctttttatcctcatgaagcaagaggtaccttcagctctctctttttctccaaaatttagacaaaattggtggcatcaacaggtggtatgtattggtcaaatgtttgtatgaaggtccactgctcaattgtcatcttatggttttgcctctctcacaatatgtattttcatttgtctccttcaaaggttatcagaaccccatttttattatctgtagggtaagcttgtcctgttatttgttagcaccagctgcagtgtaggaaatggaggaagtcagtacgtgaacaatgttagaatcacaagaaaaatatagatatgctcaaatacgtttattggaagaagatttactatactttcctgaaactgtcagtttaagcaactaagcaagcactaaaatgctgttcagaattctgcactggaagtcttcatttcttcaataagaattttaaacagctaacaaagactgagaagctgtgcttttgtaagtgagctgatgattcattaatatcccccttttttggttataatttcagtgtgctttatcttttctgggatactgaaggcaatggttaaaaagtgcatgatggagttggatcatttctatggatacatcaaagaacagattgaaagcagtgcaacctttacaaatactgaaggtcaagtgttttactatccacttgcataaattatactccttcctggtgacgaaggataagcaaaggaatatttgctaggacctgggaagccacaattatttgagataggaacagggggctattatgaggtatcaacatgaattttatgtaaatcaactctcagtcaaccaaattgcaagttttgtagttgaactgcctcctaggaggctaggacttgatcctccctgcctcttgttagttgtcccgttacctttccaaggtatctagaggttagagttgatctgagctgccatgttaacacctcaatcttctaattgatataactaactgtttgaaatccaccagtatcatgtagcaatagcatccttgcataaag

SEQ ID NO: 67921 - DNA, 3144 bp, Zea Mays
gcccaccgcagcgaacaatcccttccactcccctcccctaaacccctcgccgcccgcggggctcgccggccggcgcccctccaggcccccactccctccgcgtgggcgcgatgccaacggcggtgccgacgcccaaggcggtggtccaccagcggttcggcgccaaggcgcggtacacggtcgaggaggtgcgggaggacgtgggcggctgcccgggcctcgcgccgcagaccaggaacgtctaccgctgcgcgctcgacctcccgggcctctccgttgccacgcccggtaccttcctcaggaagaaggacgctgagcaggccgccgcgcagatcgcgctcgacaagaactttctgtcatctacccatcctcttattggccatttgtgtgtgtctctccggagaactggagacctcattgggaggttacctttgtcggctattgctgcatgtgatgtgaaggtcaatacattgtgtaaattgatcgaccatagggcagaatttgatcctctattggtcttgtcattattgtacaatgctgcaaaacaatctcctggagtctctgttagtgacagcaacttctggattcagagtgaaaagccttattctccggaggctgttgactcggcacttgagcgttggtctggtacaacagatcccgtagaagtagaggcagttcttgttccccacatgttggaggatgaactgaagacagtaagaattaatctacgagataatgaacattatatgagttatgttgcagcagagctctcagcaattgattcctctcatgttcttgtatcaagaacaattggaaaaacatcatccgagataagactgtattttgcagccgcaaatatacatgctgtttctgatatgtcaaaacacgcgcttgattctcttggagatggtgacatcaactggcaagtaaataagcgagcttcctacatttgtggccaaacaatttatggagatgcactcttggcaaatattggatacacaaggagagattcggaacttcacactgaagatgtcaatctatgttcctattacaggatacttctgggcaagttacctgatggaaattgtaagatgtctagggattcgattcttgcagcggagcttccatctgcatactctcgttttagttggaaaggcctctctccacgagatcttctttgctcattttgtcgccttcagaggttgccagagccccattttgctgtcagtagggtctcttgtgatacattaatgtcagctgtgagctctgaagaaagaggagcaccagcaggcagcgcagaaaatcagtacaccaatgatgtcaggatcaacaaggaaaaaccagatctttttaaatgtgaagtgaacatacgttcacggaagcaagaagttttactagagtattctgcagctgacacttggagcaaggaatctgatgctattcagaattcttcattaaaggtcttgatttggttcaataattattttaagaaactaacctcaaaaacaggcaagctatatctttctgagtctactgctggtgtcaagtgcagttggaccattttctatggatacacaaaagaagcaccttgaaagcactgcaaagttaacacacattgaaggtccagactctggtgttttcccgtcccacggatcattgacttgtataagttatactgcttcccttgtgacgaaggataaagcaaaaacatatttgttggagagccacaacgagtttgagtttgagattgggacgggtgctgttagtaatcagcttgaatcatgtgtaactcagctgtcagtgaatcaaactgcacgttttgtagctgaactgcctcctagggatttaatcatggctgcatcttgtgagttctcacatgacctctccaatgtatctagcgagagctgcttcctggagttctctgtaaaggttctgcaggtaactgaaccattagaagatagaatggagaaagccctgttcagtcctccattatctaaacaaagagttgaatttgctgtacggcacatcaacgagctgcatgctaccacacttgttgattttggctgtggatctggtagccttcttgattcgttgttagagcatccaaccacgctggaaaagcttgttggcgttgatatttctcgaaaaggcctcacacgtgcagcaaagagccttcatcagaagctgagcaaaaaatcaacgacgcagacaaatgttccaactgctgtgctgtatgacggatcaataacggactacgattctcgcttatatgggtttgatattggcacttgtcttgaggtgatcgagcacgtcgaggaggaccaggcgactttatttggcaacgtcgtcttgagctcattccgcccgaccgtgctcattgtttccacacccaactacgaatacaaccctatcctccaggggtctgctatgcccaacaaggacgacgaggcagacgaaagcgctggtccctgcaagttccgcaatcacgaccacaagttcgagtggaccaggctacagttccagtgctgggctactggcctcgcggtgaagcatagctacagcgtggaattctccggcgtcggtggctcaggcgaggagccaggctacgcttcccagatcgctgttttcagaagactggtgcagggccaggaagcgatgtgcctggacgaggatggcgatcagccttacgaggttctctgggagtggcctaacgcgtgtgtgaactaggtagattgcacgtctaatctctctagggcttggaactttgaatcgtgcccccggtttggaactgagtaatatatgtgtcaggaaagtgggcatccgacttgtggcaagaacacaaaaaattaacattgctgcatgcaagtgcagaaattcagtctgcttctaggttctggatgtacggtagttactacactgtatatgatacactgtatatacgaataggtctggacgaaatgctcgtgcctcgttggctcgctcggtttatttgaatttttcacgagctgagccgacattctagctgtatttgttaacgagacagctcgatttgttaacgagccagcttgcgagctaaacgagctaccacttctagcaaaacgaaactagatgtataacatttataaaataattaatgaacatgtt

SEQ ID NO: 67922 - DNA, 2994 bp, Zea Mays
gcccaccgcagcgaacaatcccttccactcccctcccctaaacccctcgccgcccgcggggctcgccggccggcgcccctccaggcccccactccctccgcgtgggcgcgatgccaacggcggtgccgacgcccaaggcggtggtccaccagcggttcggcgccaaggcgcggtacacggtcgaggaggtgcgggaggacgtgggcggctgcccgggcctcgcgccgcagaccaggaacgtctaccgctgcgcgctcgacctcccgggcctctccgttgccacgcccggtaccttcctcaggaagaaggacgctgagcaggccgccgcgcagatcgcgctcgacaagcttggtattcatcctacagcaaatagtcccaccacaccccaagaagcttgggctgaactgattgctcgcatatctggttttttcatagatgagagtgaaaagccttattctccggaggctgttgactcggcacttgagcgttggtctggtacaacagatcccgtagaagtagaggcagttcttgttccccacatgttggaggatgaactgaagacagtaagaattaatctacgagataatgaacattatatgagttatgttgcagcagagctctcagcaattgattcctctcatgttcttgtatcaagaacaattggaaaaacatcatccgagataagactgtattttgcagccgcaaatatacatgctgtttctgatatgtcaaaacacgcgcttgattctcttggagatggtgacatcaactggcaagtaaataagcgagcttcctacatttgtggccaaacaatttatggagatgcactcttggcaaatattggatacacaaggagagattcggaacttcacactgaagatgtcaatctatgttcctattacaggatacttctgggcaagttacctgatggaaattgtaagatgtctagggattcgattcttgcagcggagcttccatctgcatactctcgttttagttggaaaggcctctctccacgagatcttctttgctcattttgtcgccttcagaggttgccagagccccattttgctgtcagtagggtctcttgtgatacattaatgtcagctgtgagctctgaagaaagaggagcaccagcaggcagcgcagaaaatcagtacaccaatgatgtcaggatcaacaaggaaaaaccagatctttttaaatgtgaagtgaacatacgttcacggaagcaagaagttttactagagtattctgcagctgacacttggagcaaggaatctgatgctattcagaattcttcattaaaggtcttgatttggttcaataattattttaagaaactaacctcaaaaacaggcaagctatatctttctgagtctactgctggtgtcaagtgcagttggaccattttctatggatacacaaaagaagcaccttgaaagcactgcaaagttaacacacattgaaggtccagactctggtgttttcccgtcccacggatcattgacttgtataagttatactgcttcccttgtgacgaaggataaagcaaaaacatatttgttggagagccacaacgagtttgagtttgagattgggacgggtgctgttagtaatcagcttgaatcatgtgtaactcagctgtcagtgaatcaaactgcacgttttgtagctgaactgcctcctagggatttaatcatggctgcatcttgtgagttctcacatgacctctccaatgtatctagcgagagctgcttcctggagttctctgtaaaggttctgcaggtaactgaaccattagaagatagaatggagaaagccctgttcagtcctccattatctaaacaaagagttgaatttgctgtacggcacatcaacgagctgcatgctaccacacttgttgattttggctgtggatctggtagccttcttgattcgttgttagagcatccaaccacgctggaaaagcttgttggcgttgatatttctcgaaaaggcctcacacgtgcagcaaagagccttcatcagaagctgagcaaaaaatcaacgacgcagacaaatgttccaactgctgtgctgtatgacggatcaataacggactacgattctcgcttatatgggtttgatattggcacttgtcttgaggtgatcgagcacgtcgaggaggaccaggcgactttatttggcaacgtcgtcttgagctcattccgcccgaccgtgctcattgtttccacacccaactacgaatacaaccctatcctccaggggtctgctatgcccaacaaggacgacgaggcagacgaaagcgctggtccctgcaagttccgcaatcacgaccacaagttcgagtggaccaggctacagttccagtgctgggctactggcctcgcggtgaagcatagctacagcgtggaattctccggcgtcggtggctcaggcgaggagccaggctacgcttcccagatcgctgttttcagaagactggtgcagggccaggaagcgatgtgcctggacgaggatggcgatcagccttacgaggttctctgggagtggcctaacgcgtgtgtgaactaggtagattgcacgtctaatctctctagggcttggaactttgaatcgtgcccccggtttggaactgagtaatatatgtgtcaggaaagtgggcatccgacttgtggcaagaacacaaaaaattaacattgctgcatgcaagtgcagaaattcagtctgcttctaggttctggatgtacggtagttactacactgtatatgatacactgtatatacgaataggtctggacgaaatgctcgtgcctcgttggctcgctcggtttatttgaatttttcacgagctgagccgacattctagctgtatttgttaacgagacagctcgatttgttaacgagccagcttgcgagctaaacgagctaccacttctagcaaaacgaaactagatgtataacatttataaaataattaatgaacatgtt

SEQ ID NO: 67923 - DNA, 3204 bp, Zea Mays
gcccaccgcagcgaacaatcccttccactcccctcccctaaacccctcgccgcccgcggggctcgccggccggcgcccctccaggcccccactccctccgcgtgggcgcgatgccaacggcggtgccgacgcccaaggcggtggtccaccagcggttcggcgccaaggcgcggtacacggtcgaggaggtgcgggaggacgtgggcggctgcccgggcctcgcgccgcagaccaggaacgtctaccgctgcgcgctcgacctcccgggcctctccgttgccacgcccggtaccttcctcaggaagaaggacgctgagcaggccgccgcgcagatcgcgctcgacaagaactttctgtcatctacccatcctcttattggccatttgtgtgtgtctctccggagaactggagacctcattgggaggttacctttgtcggctattgctgcatgtgatgtgaaggtcaatacattgtgtaaattgatcgaccatagggcagaatttgatcctctattggtcttgtcattattgtacaatgctgcaaaacaatctcctggagtctctgttagtgacagcaacttctggattcagagtgaaaagccttattctccggaggctgttgactcggcacttgagcgttggtctggtacaacagatcccgtagaagtagaggcagttcttgttccccacatgttggaggatgaactgaagacagtaagaattaatctacgagataatgaacattatatgagttatgttgcagcagagctctcagcaattgattcctctcatgttcttgtatcaagaacaattggaaaaacatcatccgagataagactgtattttgcagccgcaaatatacatgctgtttctgatatgtcaaaacacgcgcttgattctcttggagatggtgacatcaactggcaagtaaataagcgagcttcctacatttgtggccaaacaatttatggagatgcactcttggcaaatattggatacacaaggagagattcggaacttcacactgaagatgtcaatctatgttcctattacaggatacttctgggcaagttacctgatggaaattgtaagatgtctagggattcgattcttgcagcggagcttccatctgcatactctcgttttagttggaaaggcctctctccacgagatcttctttgctcattttgtcgccttcagaggttgccagagccccattttgctgtcagtagggtctcttgtgatacattaatgtcagctgtgagctctgaagaaagaggagcaccagcaggcagcgcagaaaatcagtacaccaatgatgtcaggatcaacaaggaaaaaccagatctttttaaatgtgaagtgaacatacgttcacggaagcaagaagttttactagagtattctgcagctgacacttggagcaaggaatctgatgctattcagaattcttcattaaaggtcttgatttggttcaataattattttaagaaactaacctcaaaaacaggcaagctatatctttctgagtctactgctggtgtcaaggtacattcaaatatttttcttcaagagtttgcaatgtgtctatctgtttatggcaagaatggatgcagtgattcagcaatgtgcagtgcagttggaccattttctatggatacacaaaagaagcaccttgaaagcactgcaaagttaacacacattgaaggtccagactctggtgttttcccgtcccacggatcattgacttgtataagttatactgcttcccttgtgacgaaggataaagcaaaaacatatttgttggagagccacaacgagtttgagtttgagattgggacgggtgctgttagtaatcagcttgaatcatgtgtaactcagctgtcagtgaatcaaactgcacgttttgtagctgaactgcctcctagggatttaatcatggctgcatcttgtgagttctcacatgacctctccaatgtatctagcgagagctgcttcctggagttctctgtaaaggttctgcaggtaactgaaccattagaagatagaatggagaaagccctgttcagtcctccattatctaaacaaagagttgaatttgctgtacggcacatcaacgagctgcatgctaccacacttccttcttgattcgttgttagagcatccaaccacgctggaaaagcttgttggcgttgatatttctcgaaaaggcctcacacgtgcagcaaagagccttcatcagaagctgagcaaaaaatcaacgacgcagacaaatgttccaactgctgtgctgtatgacggatcaataacggactacgattctcgcttatatgggtttgatattggcacttgtcttgaggtgatcgagcacgtcgaggaggaccaggcgactttatttggcaacgtcgtcttgagctcattccgcccgaccgtgctcattgtttccacacccaactacgaatacaaccctatcctccaggggtctgctatgcccaacaaggacgacgaggcagacgaaagcgctggtccctgcaagttccgcaatcacgaccacaagttcgagtggaccaggctacagttccagtgctgggctactggcctcgcggtgaagcatagctacagcgtggaattctccggcgtcggtggctcaggcgaggagccaggctacgcttcccagatcgctgttttcagaagactggtgcagggccaggaagcgatgtgcctggacgaggatggcgatcagccttacgaggttctctgggagtggcctaacgcgtgtgtgaactaggtagattgcacgtctaatctctctagggcttggaactttgaatcgtgcccccggtttggaactgagtaatatatgtgtcaggaaagtgggcatccgacttgtggcaagaacacaaaaaattaacattgctgcatgcaagtgcagaaattcagtctgcttctaggttctggatgtacggtagttactacactgtatatgatacactgtatatacgaataggtctggacgaaatgctcgtgcctcgttggctcgctcggtttatttgaatttttcacgagctgagccgacattctagctgtatttgttaacgagacagctcgatttgttaacgagccagcttgcgagctaaacgagctaccacttctagcaaaacgaaactagatgtataacatttataaaataattaatgaacatgtt

SEQ ID NO: 67924 - DNA, 3484 bp, Zea Mays
gcccaccgcagcgaacaatcccttccactcccctcccctaaacccctcgccgcccgcggggctcgccggccggcgcccctccaggcccccactccctccgcgtgggcgcgatgccaacggcggtgccgacgcccaaggcggtggtccaccagcggttcggcgccaaggcgcggtacacggtcgaggaggtgcgggaggacgtgggcggctgcccgggcctcgcgccgcagaccaggaacgtctaccgctgcgcgctcgacctcccgggcctctccgttgccacgcccggtaccttcctcaggaagaaggacgctgagcaggccgccgcgcagatcgcgctcgacaagcttggtattcatcctacagcaaatagtcccaccacaccccaagaagcttgggctgaactgattgctcgcatatctggttttttcatagatgagaactttctgtcatctacccatcctcttattggccatttgtgtgtgtctctccggagaactggagacctcattgggaggttacctttgtcggctattgctgcatgtgatgtgaaggtcaatacattgtgtaaattgatcgaccatagggcagaatttgatcctctattggtcttgtcattattgtacaatgctgcaaaacaatctcctggagtctctgttagtgacagcaacttctggattcagagtgaaaagccttattctccggaggctgttgactcggcacttgagcgttggtctggtacaacagatcccgtagaagtagaggcagttcttgttccccacatgttggaggatgaactgaagacagtaagaattaatctacgagataatgaacattatatgagttatgttgcagcagagctctcagcaattgattcctctcatgttcttgtatcaagaacaattggaaaaacatcatccgagataagactgtattttgcagccgcaaatatacatgctgtttctgatatgtcaaaacacgcgcttgattctcttggagatggtgacatcaactggcaagtaaataagcgagcttcctacatttgtggccaaacaatttatggagatgcactcttggcaaatattggatacacaaggagagattcggaacttcacactgaagatgtcaatctatgttcctattacaggtaaagctttattgaacatttcactacaacggcattgttaaatacaatttcgctatgctaatcaatgaatcaagatgcattccattttatattgttagtagatattgtcatttttttctcaggaatcatcacatgattcaagctgcagaggttggctcgtgttctgtttgtctttcatgtctgtgctgcttttatctattatttaagcaccaaacttcctatagttcttcagagtgacacgctgacatgcttttgcctcaggatacttctgggcaagttacctgatggaaattgtaagatgtctagggattcgattcttgcagcggagcttccatctgcatactctcgttttagttggaaaggcctctctccacgagatcttctttgctcattttgtcgccttcagaggttgccagagccccattttgctgtcagtagggtctcttgtgatacattaatgtcagctgtgagctctgaagaaagaggagcaccagcaggcagcgcagaaaatcagtacaccaatgatgtcaggatcaacaaggaaaaaccagatctttttaaatgtgaagtgaacatacgttcacggaagcaagaagttttactagagtattctgcagctgacacttggagcaaggaatctgatgctattcagaattcttcattaaaggtcttgatttggttcaataattattttaagaaactaacctcaaaaacaggcaagctatatctttctgagtctactgctggtgtcaagttggaccattttctatggatacacaaaagaagcaccttgaaagcactgcaaagttaacacacattgaaggtccagactctggtgttttcccgtcccacggatcattgacttgtataagttatactgcttcccttgtgacgaaggataaagcaaaaacatatttgttggagagccacaacgagtttgagtttgagattgggacgggtgctgttagtaatcagcttgaatcatgtgtaactcagctgtcagtgaatcaaactgcacgttttgtagctgaactgcctcctagggatttaatcatggctgcatcttgtgtacatattttaaacattgttgcagagagctgcttcctggagttctctgtaaaggttctgcaggtaactgaaccattagaagatagaatggagaaagccctgttcagtcctccattatctaaacaaagagttgaatttgctgtacggcacatcaacgagctgcatgctaccacacttgttgattttggctgtggatctggtagccttcttgattcgttgttagagcatccaaccacgctggaaaagcttgttggcgttgatatttctcgaaaaggcctcacacgtgcagcaaagagccttcatcagaagctgagcaaaaaatcaacgacgcagacaaatgttccaactgctgtgctgtatgacggatcaataacggactacgattctcgcttatatgggtttgatattggcacttgtcttgaggtgatcgagcacgtcgaggaggaccaggcgactttatttggcaacgtcgtcttgagctcattccgcccgaccgtgctcattgtttccacacccaactacgaatacaaccctatcctccaggggtctgctatgcccaacaaggacgacgaggcagacgaaagcgctggtccctgcaagttccgcaatcacgaccacaagttcgagtggaccaggctacagttccagtgctgggctactggcctcgcggtgaagcatagctacagcgtggaattctccggcgtcggtggctcaggcgaggagccaggctacgcttcccagatcgctgttttcagaagactggtgcagggccaggaagcgatgtgcctggacgaggatggcgatcagccttacgaggttctctgggagtggcctaacgcgtgtgtgaactaggtagattgcacgtctaatctctctagggcttggaactttgaatcgtgcccccggtttggaactgagtaatatatgtgtcaggaaagtgggcatccgacttgtggcaagaacacaaaaaattaacattgctgcatgcaagtgcagaaattcagtctgcttctaggttctggatgtacggtagttactacactgtatatgatacactgtatatacgaataggtctggacgaaatgctcgtgcctcgttggctcgctcggtttatttgaatttttcacgagctgagccgacattctagctgtatttgttaacgagacagctcgatttgttaacgagccagcttgcgagctaaacgagctaccacttctagcaaaacgaaactagatgtataacatttataaaataattaatgaacatgtt

SEQ ID NO: 67925 - DNA, 2901 bp, Zea Mays
gcccaccgcagcgaacaatcccttccactcccctcccctaaacccctcgccgcccgcggggctcgccggccggcgcccctccaggcccccactccctccgcgtgggcgcgatgccaacggcggtgccgacgcccaaggcggtggtccaccagcggttcggcgccaaggcgcggtacacggtcgaggaggtgcgggaggacgtgggcggctgcccgggcctcgcgccgcagaccaggaacgtctaccgctgcgcgctcgacctcccgggcctctccgttgccacgcccggtaccttcctcaggaagaaggacgctgagcaggccgccgcgcagatcgcgctcgacaagagtgaaaagccttattctccggaggctgttgactcggcacttgagcgttggtctggtacaacagatcccgtagaagtagaggcagttcttgttccccacatgttggaggatgaactgaagacagtaagaattaatctacgagataatgaacattatatgagttatgttgcagcagagctctcagcaattgattcctctcatgttcttgtatcaagaacaattggaaaaacatcatccgagataagactgtattttgcagccgcaaatatacatgctgtttctgatatgtcaaaacacgcgcttgattctcttggagatggtgacatcaactggcaagtaaataagcgagcttcctacatttgtggccaaacaatttatggagatgcactcttggcaaatattggatacacaaggagagattcggaacttcacactgaagatgtcaatctatgttcctattacaggatacttctgggcaagttacctgatggaaattgtaagatgtctagggattcgattcttgcagcggagcttccatctgcatactctcgttttagttggaaaggcctctctccacgagatcttctttgctcattttgtcgccttcagaggttgccagagccccattttgctgtcagtagggtctcttgtgatacattaatgtcagctgtgagctctgaagaaagaggagcaccagcaggcagcgcagaaaatcagtacaccaatgatgtcaggatcaacaaggaaaaaccagatctttttaaatgtgaagtgaacatacgttcacggaagcaagaagttttactagagtattctgcagctgacacttggagcaaggaatctgatgctattcagaattcttcattaaaggtcttgatttggttcaataattattttaagaaactaacctcaaaaacaggcaagctatatctttctgagtctactgctggtgtcaagtgcagttggaccattttctatggatacacaaaagaagcaccttgaaagcactgcaaagttaacacacattgaaggtccagactctggtgttttcccgtcccacggatcattgacttgtataagttatactgcttcccttgtgacgaaggataaagcaaaaacatatttgttggagagccacaacgagtttgagtttgagattgggacgggtgctgttagtaatcagcttgaatcatgtgtaactcagctgtcagtgaatcaaactgcacgttttgtagctgaactgcctcctagggatttaatcatggctgcatcttgtgagttctcacatgacctctccaatgtatctagcgagagctgcttcctggagttctctgtaaaggttctgcaggtaactgaaccattagaagatagaatggagaaagccctgttcagtcctccattatctaaacaaagagttgaatttgctgtacggcacatcaacgagctgcatgctaccacacttgttgattttggctgtggatctggtagccttcttgattcgttgttagagcatccaaccacgctggaaaagcttgttggcgttgatatttctcgaaaaggcctcacacgtgcagcaaagagccttcatcagaagctgagcaaaaaatcaacgacgcagacaaatgttccaactgctgtgctgtatgacggatcaataacggactacgattctcgcttatatgggtttgatattggcacttgtcttgaggtgatcgagcacgtcgaggaggaccaggcgactttatttggcaacgtcgtcttgagctcattccgcccgaccgtgctcattgtttccacacccaactacgaatacaaccctatcctccaggggtctgctatgcccaacaaggacgacgaggcagacgaaagcgctggtccctgcaagttccgcaatcacgaccacaagttcgagtggaccaggctacagttccagtgctgggctactggcctcgcggtgaagcatagctacagcgtggaattctccggcgtcggtggctcaggcgaggagccaggctacgcttcccagatcgctgttttcagaagactggtgcagggccaggaagcgatgtgcctggacgaggatggcgatcagccttacgaggttctctgggagtggcctaacgcgtgtgtgaactaggtagattgcacgtctaatctctctagggcttggaactttgaatcgtgcccccggtttggaactgagtaatatatgtgtcaggaaagtgggcatccgacttgtggcaagaacacaaaaaattaacattgctgcatgcaagtgcagaaattcagtctgcttctaggttctggatgtacggtagttactacactgtatatgatacactgtatatacgaataggtctggacgaaatgctcgtgcctcgttggctcgctcggtttatttgaatttttcacgagctgagccgacattctagctgtatttgttaacgagacagctcgatttgttaacgagccagcttgcgagctaaacgagctaccacttctagcaaaacgaaactagatgtataacatttataaaataattaatgaacatgtt

SEQ ID NO: 67926 - DNA, 3430 bp, Zea Mays
ccgaagtcgccaagagcccaccgcagcgaacaatcccttccactcccctcccctaaacccctcgccgcccgcggggctcgccggccggcgcccctccaggcccccactccctccgcgtgggcgcgatgccaacggcggtgccgacgcccaaggcggtggtccaccagcggttcggcgccaaggcgcggtacacggtcgaggaggtgcgggaggacgtgggcggctgcccgggcctcgcgccgcagaccaggaacgtctaccgctgcgcgctcgacctcccgggcctctccgttgccacgcccggtaccttcctcaggaagaaggacgctgagcaggccgccgcgcagatcgcgctcgacaagcttggtattcatcctacagcaaatagtcccaccacaccccaagaagcttgggctgaactgattgctcgcatatctggttttttcatagatgagaactttctgtcatctacccatcctcttattggccatttgtgtgtgtctctccggagaactggagacctcattgggaggttacctttgtcggctattgctgcatgtgatgtgaaggtcaatacattgtgtaaattgatcgaccatagggcagaatttgatcctctattggtcttgtcattattgtacaatgctgcaaaacaatctcctggagtctctgttagtgacagcaacttctggattcagagtgaaaagccttattctccggaggctgttgactcggcacttgagcgttggtctggtacaacagatcccgtagaagtagaggcagttcttgttccccacatgttggaggatgaactgaagacagtaagaattaatctacgagataatgaacattatatgagttatgttgcagcagagctctcagcaattgattcctctcatgttcttgtatcaagaacaattggaaaaacatcatccgagataagactgtattttgcagccgcaaatatacatgctgtttctgatatgtcaaaacacgcgcttgattctcttggagatggtgacatcaactggcaagtaaataagcgagcttcctacatttgtggccaaacaatttatggagatgcactcttggcaaatattggatacacaaggagagattcggaacttcacactgaagatgtcaatctatgttcctattacaggtaaagctttattgaacatttcactacaacggcattgttaaatacaatttcgctatgctaatcaatgaatcaagatgcattccattttatattgttagtagatattgtcatttttttctcaggaatcatcacatgattcaagctgcagaggttggctcgtgttctgtttgtctttcatgatacttctgggcaagttacctgatggaaattgtaagatgtctagggattcgattcttgcagcggagcttccatctgcatactctcgttttagttggaaaggcctctctccacgagatcttctttgctcattttgtcgccttcagaggttgccagagccccattttgctgtcagtagggtctcttgtgatacattaatgtcagctgtgagctctgaagaaagaggagcaccagcaggcagcgcagaaaatcagtacaccaatgatgtcaggatcaacaaggaaaaaccagatctttttaaatgtgaagtgaacatacgttcacggaagcaagaagttttactagagtattctgcagctgacacttggagcaaggaatctgatgctattcagaattcttcattaaaggtcttgatttggttcaataattattttaagaaactaacctcaaaaacaggcaagctatatctttctgagtctactgctggtgtcaagtgcagttggaccattttctatggatacacaaaagaagcaccttgaaagcactgcaaagttaacacacattgaaggtccagactctggtgttttcccgtcccacggatcattgacttgtataagttatactgcttcccttgtgacgaaggataaagcaaaaacatatttgttggagagccacaacgagtttgagtttgagattgggacgggtgctgttagtaatcagcttgaatcatgtgtaactcagctgtcagtgaatcaaactgcacgttttgtagctgaactgcctcctagggatttaatcatggctgcatcttgtgagttctcacatgacctctccaatgtatctagcgagagctgcttcctggagttctctgtaaaggttctgcaggtaactgaaccattagaagatagaatggagaaagccctgttcagtcctccattatctaaacaaagagttgaatttgctgtacggcacatcaacgagctgcatgctaccacacttgttgattttggctgtggatctggtagccttcttgattcgttgttagagcatccaaccacgctggaaaagcttgttggcgttgatatttctcgaaaaggcctcacacgtgcagcaaagagccttcatcagaagctgagcaaaaaatcaacgacgcagacaaatgttccaactgctgtgctgtatgacggatcaataacggactacgattctcgcttatatgggtttgatattggcacttgtcttgaggtgatcgagcacgtcgaggaggaccaggcgactttatttggcaacgtcgtcttgagctcattccgcccgaccgtgctcattgtttccacacccaactacgaatacaaccctatcctccaggggtctgctatgcccaacaaggacgacgaggcagacgaaagcgctggtccctgcaagttccgcaatcacgaccacaagttcgagtggaccaggctacagttccagtgctgggctactggcctcgcggtgaagcatagctacagcgtggaattctccggcgtcggtggctcaggcgaggagccaggctacgcttcccagatcgctgttttcagaagactggtgcagggccaggaagcgatgtgcctggacgaggatggcgatcagccttacgaggttctctgggagtggcctaacgcgtgtgtgaactaggtagattgcacgtctaatctctctagggcttggaactttgaatcgtgcccccggtttggaactgagtaatatatgtgtcaggaaagtgggcatccgacttgtggcaagaacacaaaaaattaacattgctgcatgcaagtgcagaaattcagtctgcttctaggttctggatgtacggtagttactacactgtatatgatacactgtatatacgaataggtctggacgaaatgctcgtgcctcgttggctcgctcggtttatttgaatttttcacgagctgagccgacattctagctgtatttgttaacgagacagctcgatttgttaacgagccagcttgcgagctaaacgagctaccacttctagcaaaacgaaactagatgtataacatttataaaataattaatgaacatgtt

SEQ ID NO: 67927 - DNA, 5434 bp, Zea Mays
ggacagagccgcccggtcgccctttcttcatctcccatcttaatttcctcgcagcgccggcgctcatcttccgctttctcccttactcgcgctcagcacgcaggcgacggcgtcggcgctcaggtcgggctctgggcgacggcgtcatcggcttctcctcccgcctctctccagtcgcctcgcgccctcgcctccggtcctccgcacaccggccggtgaccctgcgtgcgtgcctctctctctctctcccccttcccgcctccggtggatcgtcaacgccgcccggcccgggtggcagcaccgcgcgcgacctgaggggtgagggcagcgggagccagcagccgctgctccaccaaggcggtcgcgccgcttttggagcgcttatgccccccggtccgctgagcgcttagtgcagtttttttggaacatgagacctcctagcagtggcaaaaagactgaggtctcccatagcgtggggaaatgtggggtttctgatcaagcttgtcatggcaaatgccaaagctgtggcattgatgcaaaacctttttgtgctggagtgaacgaagtctccttgttgactggcagtcacactgatgtggaggcctcaaaagagaaccgtggagcatgcagtttgaacaatgatcgtgctgatgctctagaagaagaggccaatgtttccacagctaggataggtcatgttgagagtgctgaccctggtggctctgtgggtgtagaaaaggaaattttcatggctgttaatgaggagtctgagggggagcaagctggggcaacactggaggatctgtttttctttaatggtgaagaggatgatgacagtgattgggaacctgctagtcgccttgttgtgaatagatggttttgcttgaactgcacaatgccaaatgtggacaagattacatattgcatgaattgccgtgagcttccaggatctgttgtagatggatatgatgtcttcaaaaagcaaattgcacaaacagctttgttatctgctgacacagggttgctgccagtgtctacggcgattggttttgatgaaagaatgctgctccacagtgagctagaagttaaaccaaatccacatccagaaagaccggatcgccttcgcgccattgctgcaagtcttgctgctgcagggatctttccctcaaaatgtgctttggtacctcctcgagaaatcacgaaggaggaacttcttatggttcatagtccagaccacattgaaagtgtcgagcagacaaagaacatgctttacagttacttcacttcggatacttacgcaaatggacattcagcatgtgctgccaaacttgcagctggattatgtgctgatcttgctagtttgatagtatctgggcgtgttcgcaatggctttgcgctggtaagacctcctgggcatcatgcaggggtgaagcaagcaatggggttttgtcttcacaacaatgcagcagtagctgcgttagctgcaaaaagagcaggtgccaagaaagtcctcatagttgactgggatgtgcaccatggaaatggcacacaagagatattcgacggggacaaaacagtcttgtacatatcattacatcgtcatgaggatggaaacttttaccctggaactggagctgctcatgaggtgggagttcttgatggtcaaggattctcagttaatataccttggagccgtggtggtgttggagatgatgactacatctttgcttttcagactgtggtgcttccaatagcttcagagtttgccgcagacatcactataatatctgcaggattcgatgcagctagaggtgaccctctgggttgttgtgacgtcactccaactggatactcttggatgacatccctgctagctggttcctcaaatggaagattgttggtgatacttgagggaggatacaatctccggtcgatatcctcatcagctactgaagttgttaaggtcctacttggggagggtcccaatcgtgcttcatttgtagtttcaccatcaaaagaggccttgagtactgtttctcaagtcctgaagattcaacaacagttttggccagttttaggtccaacatacgcatcactacaggcgcagcaggggtcggtttcttccaatcatagtaatgagctgaagaaaaggaagcgtccaggaggaggaccagggcccttctggtggaagatgggaagcaaaaggcttctatacgaagcgcttattgagcctcgcagccgtccgaggaaactcaaggggtcaactggttcagcagcgccttagacttagatgggcagtttgctggccgttgatcttctagacatgaacaggatgttacaacatatgcaaaccgtgccgcggttatgaacctctgtcagatgcctgttccaccttcatcactctgttgctggcatctttagaagcgccgcaacaacttcgccgcaacaactttgtttgtcggggtgaaatgtccctggtagctgttatcctacgtgcttgccttgcggacgttcgcatatcacatatgggcataccgcctaaagcttggtattcatcctacagcaaatagtcccaccacaccccaagaagcttgggctgaactgattgctcgcatatctggttttttcatagatgagaactttctgtcatctacccatcctcttattggccatttgtgtgtgtctctccggagaactggagacctcattgggaggttacctttgtcggctattgctgcatgtgatgtgaaggtcaatacattgtgtaaattgatcgaccatagggcagaatttgatcctctattggtcttgtcattattgtacaatgctgcaaaacaatctcctggagtctctgttagtgacagcaacttctggattcagagtgaaaagccttattctccggaggctgttgactcggcacttgagcgttggtctggtacaacagatcccgtagaagtagaggcagttcttgttccccacatgttggaggatgaactgaagacagtaagaattaatctacgagataatgaacattatatgagttatgttgcagcagagctctcagcaattgattcctctcatgttcttgtatcaagaacaattggaaaaacatcatccgagataagactgtattttgcagccgcaaatatacatgctgtttctgatatgtcaaaacacgcgcttgattctcttggagatggtgacatcaactggcaagtaaataagcgagcttcctacatttgtggccaaacaatttatggagatgcactcttggcaaatattggatacacaaggagagattcggaacttcacactgaagatgtcaatctatgttcctattacaggatacttctgggcaagttacctgatggaaattgtaagatgtctagggattcgattcttgcagcggagcttccatctgcatactctcgttttagttggaaaggcctctctccacgagatcttctttgctcattttgtcgccttcagaggttgccagagccccattttgctgtcagtagggtctcttgtgatacattaatgtcagctgtgagctctgaagaaagaggagcaccagcaggcagcgcagaaaatcagtacaccaatgatgtcaggatcaacaaggaaaaaccagatctttttaaatgtgaagtgaacatacgttcacggaagcaagaagttttactagagtattctgcagctgacacttggagcaaggaatctgatgctattcagaattcttcattaaaggtcttgatttggttcaataattattttaagaaactaacctcaaaaacaggcaagctatatctttctgagtctactgctggtgtcaagtgcagttggaccattttctatggatacacaaaagaagcaccttgaaagcactgcaaagttaacacacattgaaggtccagactctggtgttttcccgtcccacggatcattgacttgtataagttatactgcttcccttgtgacgaaggataaagcaaaaacatatttgttggagagccacaacgagtttgagtttgagattgggacgggtgctgttagtaatcagcttgaatcatgtgtaactcagctgtcagtgaatcaaactgcacgttttgtagctgaactgcctcctagggatttaatcatggctgcatcttgtgagttctcacatgacctctccaatgtatctagcgagagctgcttcctggagttctctgtaaaggttctgcaggtaactgaaccattagaagatagaatggagaaagccctgttcagtcctccattatctaaacaaagagttgaatttgctgtacggcacatcaacgagctgcatgctaccacacttgttgattttggctgtggatctggtagccttcttgattcgttgttagagcatccaaccacgctggaaaagcttgttggcgttgatatttctcgaaaaggcctcacacgtgcagcaaagagccttcatcagaagctgagcaaaaaatcaacgacgcagacaaatgttccaactgctgtgctgtatgacggatcaataacggactacgattctcgcttatatgggtttgatattggcacttgtcttgaggtgatcgagcacgtcgaggaggaccaggcgactttatttggcaacgtcgtcttgagctcattccgcccgaccgtgctcattgtttccacacccaactacgaatacaaccctatcctccaggggtctgctatgcccaacaaggacgacgaggcagacgaaagcgctggtccctgcaagttccgcaatcacgaccacaagttcgagtggaccaggctacagttccagtgctgggctactggcctcgcggtgaagcatagctacagcgtggaattctccggcgtcggtggctcaggcgaggagccaggctacgcttcccagatcgctgttttcagaagactggtgcagggccaggaagcgatgtgcctggacgaggatggcgatcagccttacgaggttctctgggagtggcctaacgcgtgtgtgaactaggtagattgcacgtctaatctctctagggcttggaactttgaatcgtgcccccggtttggaactgagtaatatatgtgtcaggaaagtgggcatccgacttgtggcaagaacacaaaaaattaacattgctgcatgcaagtgcagaaattcagtctgcttctaggttctggatgtacggtagttactacactgtatatgatacactgtatatacgaataggtctggacgaaatgctcgtgcctcgttggctcgctcggtttatttgaatttttcacgagctgagccgacattctagctgtatttgttaacgagacagctcgatttgttaacgagccagcttgcgagctaaacgagctaccacttctagcaaaacgaaactagatgtataacatttataaaataattaatgaacatgtt

SEQ ID NO: 67928 - DNA, 1357 bp, Zea Mays
gttatatgacctacctgtacttgtggtcctccccgaaccattgtcaagcatccgagtgctgccactgctcatctccatgtgcctcttgcctccttccctcgcctgttttccatatatgcgctgctgccgcacgcaaccatcctccctacctcttcccctccccttgctcactgctggtgctgcccccttctagatcccctgtactagaacttctggcctgctgctgcccctcccagatctccaatgacacagaagttggctggtgaagaaagttgcaatgatcacatgagctccagataatggggatgggagcagagacgggcgcacttggccttgtctgctcctccagttcttcctctctttcctcccttccctcctctcattttgccgatttttggttgtggctacagtgatgcttaagtttttttagtgcctggacgcctagacgacaagacaactaagtgtcaccttataaaaacatgatcaagggtacaccctcatgtcactccaactggatactcttggatgacatccctgctagctggttcctcaaatggaagattgttggtgatacttgagggaggatacaatctccggtcgatatcctcatcagctactgaagttgttaaggtcctacttggggagggtcccaatcgtgcttcatttgtagtttcaccatcaaaagaggccttgagtactgtttctcaagtcctgaagattcaacaacagttttggccagttttaggtccaacatacgcatcactacaggcgcagcaggggtcggtttcttccaatcatagtaatgagctgaagaaaaggaagcgtccaggaggaggaccagggcccttctggtggaagatgggaagcaaaaggcttctatacgaagcgcttattgagcctcgcagccgtccgaggaaactcaaggggtcaactggttcagcagcgccttagacttagatgggcagtttgctggccgttgatcttctagacatgaacagggtagctcgctgaccgcgtttcctcaagcagagtaggctgcgtttacctagaaaacctagttttggctggttacttgcatgatggtcgaccgtttcagatggagtttgacagcaaacccgttgtgttaaccatgcgtggcgtatcagccgatgtttcatgcatgctactgtctttttctttggttggtttcgtaccatagatagacgtgtgtagcgaccatcgatggaaaaaaaccttgcacatctggaacggcatgcatctcagttattagcccctgctgttgcacatgcattttttttttgcggattttctgtgcgacttgactgcgacgtctgatgtgcatttgttacacatcaga

SEQ ID NO: 67929 - DNA, 1990 bp, Zea Mays
ggacagagccgcccggtcgccctttcttcatctcccatcttaatttcctcgcagcgccggcgctcatcttccgctttctcccttactcgcgctcagcacgcaggcgacggcgtcggcgctcaggtcgggctctgggcgacggcgtcatcggcttctcctcccgcctctctccagtcgcctcgcgccctcgcctccggtcctccgcacaccggccggtgaccctgcaattgccgtgagcttccaggatctgttgtagatggatatgatgtcttcaaaaagcaaattgcacaaacagctttgttatctgctgacacagggttgctgccagtgtctacggcgattggttttgatgaaagaatgctgctccacagtgagcagctagaagttaaaccaaatccacatccagaaagaccggatcgccttcgcgccattgctgcaagtcttgctgctgcagggatctttccctcaaaatgtgctttggtacctcctcgagaaatcacgaaggaggaacttcttatggttcatagtccagaccacattgaaagtgtcgagcagacaaagaacatgctttacagttacttcacttcggatacttacgcaaatggacattcagcatgtgctgccaaacttgcagctggattatgtgctgatcttgctagtttgatagtatctgggcgtgttcgcaatggctttgcgctggtaagacctcctgggcatcatgcaggggtgaagcaagcaatggggttttgtcttcacaacaatgcagcagtagctgcgttagctgcaaaaagagcaggtgccaagaaagtcctcatagttgactgggatgtgcaccatggaaatggcacacaagagatattcgacggggacaaaacagtcttgtacatatcattacatcgtcatgaggatggaaacttttaccctggaactggagctgctcatgaggtgggagttcttgatggtcaaggattctcagttaatataccttggagccgtggtggtgttggagatgatgactacatctttgcttttcagactgtggtgcttccaatagcttcagagtttgccgcagacatcactataatatctgcaggattcgatgcagctagaggtgaccctctgggttgttgtgacgtcactccaactggatactcttggatgacatccctgctagctggttcctcaaatggaagattgttggtgatacttgagggaggatacaatctccggtcgatatcctcatcagctactgaagttgttaaggtcctacttggggagggtcccaatcgtgcttcatttgtagtttcaccatcaaaagaggccttgagtactgtttctcaagtcctgaagattcaacaacagttttggccagttttaggtccaacatacgcatcactacaggcgcagcaggggtcggtttcttccaatcatagtaatgagctgaagaaaaggaagcgtccaggaggaggaccagggcccttctggtggaagatgggaagcaaaaggcttctatacgaagcgcttattgagcctcgcagccgtccgaggaaactcaaggggtcaactggttcagcagcgccttagacttagatgggcagtttgctggccgttgatcttctagacatgaacagggtagctcgctgaccgcgtttcctcaagcagagtaggctgcgtttacctagaaaacctagttttggctggttacttgcatgatggtcgaccgtttcagatggagtttgacagcaaacccgttgtgttaaccatgcgtggcgtatcagccgatgtttcatgcatgctactgtctttttctttggttggtttcgtaccatagatagacgtgtgtagcgaccatcgatggaaaaaaaccttgcacatctggaacggcatgcatctcagttattagcccctgctgttgcacatgcattttttttttgcggattttctgtgcgacttgactgcgacgtctgatgtgcatttgttacacatcaga

SEQ ID NO: 67930 - DNA, 1507 bp, Zea Mays
gagatgcccgggcgacaccgcggatcgctcgccagtcgccacgcggctccaccgtcgccaaacgtccccgaccgacggacgcggcgacgcacgttctcacacaccttccgccgcgggccttcttctcctttccgctcgcctcttctccacctgtctgtccgctctactgtatagaggaaggccgaaggccgtttccatttctcgaagccgcggcagcacgcgtcctgcttgcctcccggtcccggatcttgcccaccccgcaacgcgccgccacctccgccaagcaagcttgatcatattcaagatggggaaggacaaagaagctgccaatctgaaggagggggagacagagatcaaggccaagtttgttgagaaggaagaggccaaagactcgggtggtggcgcagggtctgtgggaggaaagagtaaagaggggaagaaagacagagagagaaaggaggaggagaagtcggtggagcatgaatatggcgaaggcgatgagaaggcgatcaagaagaaggataaaaaggagaaagacaagaaaaagaaggaagatgatggagattcagggaaggcagagaaagataagaaggataagaaggctaaagagaaggacggatcagagttgaagggttcaagtggtgagaaacaagagaaaatcaaagataagaaagagacaggagatggcaaagatgtgggggaggaagataaacgcaagaagataggaaacaaggacaaagataagaaggataaaaaggccaaagaaaaggatggatcggaaccaaagggtgacaaggatgaagatggtaagaagaaagaggccgatggcgatgaagacgaagaaggtaagaaggaggacaaggaaaagaaagagaagaagaggaaacacaagggtgcaaaggagaagacgattgatccggtgaagctgaaggcaaaactggagaagattgatgccaaattgcatgacctacaggccaagagagaagacatcctgaggcagctgaaagagctggaagaaggcggcaagggaaacgcgaatgaagaggagcctgcacatgtgcaggaggacaaagggaaggatgttgtgcctgcacagatactggaacaggttggagagagcaaggtcgaggaacagaatcctgttgccacagcctgatcttgtggagatcctgtagcggttcatgtaacaataactctgatctggttttgcacacatgcattacacagtgtaaaggaatacagccatatagggcgtgtttgaatgcctggatgggctgagacacgtgcatcttcaattgtttgtttgcatagaccgcatgggagcttggagcttgtgcgctgcagccaggccatggggaaacgaaatctaggctcttgctcgacctccagcctccggtgcatgtggggtgggggtggattggtggttggggaaggccgggagggttgtctcttgtctgccgtgtaaatgcatgtactctgtttttttattagtcgcgttttagttaaa

SEQ ID NO: 67931 - DNA, 4006 bp, Zea Mays
  misc_feature (4005)..(4006): n is a, c, g, or t
atggctgcttcgccctcgccgtcgaccgcgaccgcgaccgcttctccctcagcgtcagcggcggcggtcttggctgtaaacggggagcgggttgagctccgcgagggggacgtgaaccccggcaccacgctcctcgagttcctccgcacccgcacccgcttcaccgggcccaagctcggctgcggcgaaggcacgtcaccccgccctcctcctccctctccccgcgctcttccgtttcgcggatgcggcgcgtgcgtggtgctcctctccgcctacgacgcggcttcgggcgcggtgtcgcacgcggcggcgagctcctgcctcacgctggtgcacggccttcatcaccgcgccgtgaccaccaccgaggggctcgggggcggcggccgcctccacgccgtgcacgagcggctcgcggggttccacgcctcgcagtgcggcttctgcacgcccggggtgtgcatgtccctcgccgccgcgctcgcgggggccgaggccgaggccaaggccaaggcggggaggaggcccgccccacccgaggggttcgcgaggctcacggcggctgaggcggagtgggccgtggcgggaaatctctgccgttgcacggggtaccgcccgatcgccgacgcctgcaagagcttcgcggctgacgtggatttggaggacctgggcctcaactccttctggaggaagggggacgcccatgcttccaagctgccgcggtacgacgaggggagcatcggtgtgttcccggagttcctcaaggctgagatcagagcttcttctggggttgaccagtacacaccgccggcattgctgggaagtgccaccacttggcaccggcctcggagcgtggaggagtactataagctggtagattctgagttgtttgaccaaagtaaaacaaaggtggttgtggggaacacagcttcaggcgtttacagagaaacagaggtgtatgataggtacatcgacctcagatgcatcccggagctgaattcggttagtaaggaagccaatggtgttcaaattggagctgcagtaacgatttctcaggcaattgagattttaagagtagaagctggtggctgcaatgatgtaatcttctgtaagattgctgatcatatggaaaaggtggcgtctccatttgtccggaacactgcaagtttgggtggaaatttggtgatggcacagagggaccagtttgcctctgacatcgcaacgatccttcttgctgctgggtcatcgatatgcatccaggcatcatcaaaaaggttgactgtcatgatggaggacttccttcagatgccaccttgcgatcacaagacactgctattaagcatttgcattcctcgttggactcctattggtggcctattttctggtgataaaaccatggctgggacagaaagtaagacaggaacttctgtgctgtttgagacgtaccgagctgctccacgccctcttggcaatgcagttgcatatcttaattctgctttcttggctcaggtctcttcagatggaacttcaagcagattaatattgagagagatatgtctggcttttggtgcatatgggagccaacatgccatcagggctaggaatgttgagaaactgttagtgggtaaacctattactacatcggtgctacttgaagcatgtagacgtctcaaggaaacaattgttcctaaagaaggcacaaggcatgctgcttataggtcaagcttggcagttgcctttctgtttacttttctttacccagtaactgaaggaactttgaagactgtaaaggaagttcatcttaatggctatgcaacttttggcaccaatggaaatccaaattgtggacccgatgcacatgttgatgtttcacttaaaaaggtcattgatgtgaactccggttcatgtaccaatgaacgcattcttgaatattcaaatcagattattgaaatcaataaagactatttccccgttggcataccaaccaagaaggttggagcagaactccaagcctctggtgaggctgtatttgtggatgacatccccgctcccaaggattgtgtttatggagcatttatatatagcacaaaacctttagcccatgtgaagagcatagaactcgacctttcactcaagcagcttaaaacgctgggagtagttactgttaaggatattccagaatgtggcagcaatgttggggccaacactatatttggacctgaacctctgtttggtgatccagttactcagtgtgcaggggaacctcttggtgttgtgaaacacaaagatttgccaatatagctgcaaaaaaagctgttgttaactacagtactgagaacttagatgctccaattttatccatagaggaggctgttaaaaggtgcagttatttcgaaaccccgccgtttcttcttcccctgaaaattggtgatttctcaaaaggaatggcagaagcagatcagaaaatctattctgaggttaaactcaattctcagtactacttttacatggaaacacaagctgctctggcaatacccgatgaggataactgcatggtagtgtatagctcaagccaatgccctgagacagcacagaatgtcattgcaaagtgccttggtttaccttgtcacaacgttcgtgttattaccagaagagttggtggtggatttggaggaaaggctgttagatcattacctcatttaagttgcaccgtcctgtccgtatgtatcttgaccgcaagactgacatgatagtgactggaggtcggcatcccatgaaaatatgctattcagtgggattcaaaccagatgggaaaatcactgctttgcatataggtttgttcataaatgcaggaatgacaaaagatattagcctcataatccctcataatttcattgaggcactgaagaaatataattggggtgccttttcttatgaagcaaaggtctgcagaacaaaccttgctacaaagtctgcgatgcgggggcctggagaagtacaaggttcttatgttgccgaagctataattgagcatgttgcttccacgctctccgctgatgctaatttggttagacgtaaaaatcttcacacggttgagagccttgctttgtttcacagtgagtgcactgaagatgccatgggttatacacttcactctatatgtgatcaagtgactgcatcagaaaactatcagcatcggcttgaaataatccagtctttcaacaaaaacaacaaatggaaaaagaggggcctctcttttgtgccaatagtacacaaagtattatctcgaccgacacctggaaaagtgtctattcttaatgatggatctgttgctgttgaagttggaggcattgagttaggccaggggctttggacaaaagtgaagcagatgacagcttttggtcttggacaactctgtcctaatcgaagtcaagagctgttggagagaataagagttattcaagcggatacattaagtaacgtacagggagggtggaccactgggagtaccacatcagaatctagttgtgaagcagttcgtctcgcatgcaatgtcttggtcaacaggctgaagccagtcaaggagcaatctcaagaaaagcaagacaatgtttcatgggatgaacttatttccaagggacgaggaggtatcagcgaatgttggttcgcatgccagccttttccccttctattgtacgcaatgtgaaagggtcgcaaccagaaggttgtttccccctcgatcagggcgtgaggtggagtcgggctcagtcctctgaccaagttcgacatgagataaacctaacattctccccctgttctcatacttactcgcttatgtttagaacttgttagactatgtgtgtgtgagtgtgtgtgggccggcaccactgttgggctgccagcccattagggttagggtttcctgtctctatatattgtaaccccatctattatcaatacaacacttaatcttccaacagaacttactctctccatcccataaann

SEQ ID NO: 67932 - DNA, 3988 bp, Zea Mays
  misc_feature (3987)..(3988): n is a, c, g, or t
agtagataagcaagctgcgggcgccgcccagatgggaatcgggttccgacttccgacacgcacacgcccccacatcgcgccgcgatggctgcttcgccctcgccgtcgaccgcgaccgcgaccgcttctccctcagcgtcagcggcggcggtcttggctgtaaacggggagcgggttgagctccgcgagggggacgtgaaccccggcaccacgctcctcgagttcctccgcacccgcacccgcttcaccgggcccaagctcggctgcggcgaaggcacgtcaccccgccctcctcctccctctccccgcgctcttccgtttcgcggatgcggcgcgtgcgtggtgctcctctccgcctacgacgcggcttcgggcgcggtgtcgcacgcggcggcgagctcctgcctcacgctggtgcacggccttcatcaccgcgccgtgaccaccaccgaggggctcgggggcggcggccgcctccacgccgtgcacgagcggctcgcggggttccacgcctcgcagtgcggcttctgcacgcccggggtgtgcatgtccctcgccgccgcgctcgcgggggccgaggccgaggccaaggccaaggcggggaggaggcccgccccacccgaggggttcgcgaggctcacggcggctgaggcggagtgggccgtggcgggaaatctctgccgttgcacggggtaccgcccgatcgccgacgcctgcaagagcttcgcggctgacgtggatttggaggacctgggcctcaactccttctggaggaagggggacgcccatgcttccaagctgccgcggtacgacgaggggagcatcggtgtgttcccggagttcctcaaggctgagatcagagcttcttctggggttgaccagtacacaccgccggcattgctgggaagtgccaccacttggcaccggcctcggagcgtggaggagtactataagctggtagattctgagttgtttgaccaaagtaaaacaaaggtggttgtggggaacacagcttcaggcgtttacagagaaacagaggtgtatgataggtacatcgacctcagatgcatcccggagctgaattcggttagtaaggaagccaatggtgttcaaattggagctgcagtaacgatttctcaggcaattgagattttaagagtagaagctggtggctgcaatgatgtaatcttctgtaagattgctgatcatatggaaaaggtggcgtctccatttgtccggaacactgcaagtttgggtggaaatttggtgatggcacagagggaccagtttgcctctgacatcgcaacgatccttcttgctgctgggtcatcgatatgcatccaggcatcatcaaaaaggttgactgtcatgatggaggacttccttcagatgccaccttgcgatcacaagacactgctattaagcatttgcattcctcgttggactcctattggtggcctattttctggtgataaaaccatggctgggacagaaagtctcttcagatggaacttcaagcagattaatattgagagagatatgtctggcttttggtgcatatgggagccaacatgccatcagggctaggaatgttgagaaactgttagtgggtaaacctattactacatcggtgctacttgaagcatgtagacgtctcaaggaaacaattgttcctaaagaaggcacaaggcatgctgcttataggtcaagcttggcagttgcctttctgtttacttttctttacccagtaactgaaggaactttgaagactgtaaaggaagttcatcttaatggctatgcaacttttggcaccaatggaaatccaaattgtggacccgatgcacatgttgatgtttcacttaaaaaggtcattgatgtgaactccggttcatgtaccaatgaacgcattcttgaatattcaaatcagattattgaaatcaataaagactatttccccgttggcataccaaccaagaaggttggagcagaactccaagcctctggtgaggctgtatttgtggatgacatccccgctcccaaggattgtgtttatggagcatttatatatagcacaaaacctttagcccatgtgaagagcatagaactcgacctttcactcaagcagcttaaaacgctgggagtagttactgttaaggatattccagaatgtggcagcaatgttggggccaacactatatttggacctgaacctctgtttggtgatccagttactcagtgtgcaggggaacctcttggtgttgtgattgcagaaacacaaagatttgccaatatagctgcaaaaaaagctgttgttaactacagtactgagaacttagatgctccaattttatccatagaggaggctgttaaaaggtgcagttatttcgaaaccccgccgtttcttcttcccctgaaaattggtgatttctcaaaaggaatggcagaagcagatcagaaaatctattctgaggttaaactcaattctcagtactacttttacatggaaacacaagctgctctggcaatacccgatgaggataactgcatggtagtgtatagctcaagccaatgccctgagacagcacagaatgtcattgcaaagtgccttggtttaccttgtcacaacgttcgtgttattaccagaagagttggtggtggatttggaggaaaggctgttagatcattacctcatttaagttgcaccgtcctgtccgtatgtatcttgaccgcaagactgacatgatagtgactggaggtcggcatcccatgaaaatatgctattcagtgggattcaaaccagatgggaaaatcactgctttgcatataggtctgcagaacaaaccttgctacaaagtctgcgatgcgggggcctggagaagtacaaggttcttatgttgccgaagctataattgagcatgttgcttccacgctctccgctgatgctaatttggttagacgtaaaaatcttcacacggttgagagccttgctttgtttcacagtgagtgcactgaagatgccatgggttatacacttcactctatatgtgatcaagtgactgcatcagaaaactatcagcatcggcttgaaataatccagtctttcaacaaaaacaacaaatggaaaaagaggggcctctcttttgtgccaatagtacacaaagtattatctcgaccgacacctggaaaagtgtctattcttaatgatggatctgttgctgttgaagttggaggcattgagttaggccaggggctttggacaaaagtgaagcagatgacagcttttggtcttggacaactctgtcctaatcgaagtcaagagctgttggagagaataagagttattcaagcggatacattaagtaacgtacagggagggtggaccactgggagtaccacatcagaatctagttgtgaagcagttcgtctcgcatgcaatgtcttggtcaacaggctgaagccagtcaaggagcaatctcaagaaaagcaagacaatgtttcatgggatgaacttatttccaagggaattacgtgttgactctataggatctttagcttgtaacgctagccacaagagcgggaaaaactagggctataccattgggattggaggaccccatagggacgaggaggtatcagcgaatgttggttcgcatgccagccttttccccttctattgtacgcaatgtgaaagggtcgcaaccagaaggttgtttccccctcgatcagggcgtgaggtggagtcgggctcagtcctctgaccaagttcgacatgagataaacctaacattctccccctgttctcatacttactcgcttatgtttagaacttgttagactatgtgtgtgtgagtgtgtgtgggccggcaccactgttgggctgccagcccattagggttagggtttcctgtctctatatattgtaaccccatctattatcaatacaacacttaatcttccaacagaacttactctctccatcccataaann

SEQ ID NO: 67933 - DNA, 4167 bp, Zea Mays
  misc_feature (4166)..(4167): n is a, c, g, or t
ggcggtgctagtagtctagtagagtactcccagtagataagcaagctgcgggcgccgcccagatgggaatcgggttccgacttccgacacgcacacgcccccacatcgcgccgcgatggctgcttcgccctcgccgtcgaccgcgaccgcgaccgcttctccctcagcgtcagcggcggcggtcttggctgtaaacggggagcgggttgagctccgcgagggggacgtgaaccccggcaccacgctcctcgagttcctccgcacccgcacccgcttcaccgggcccaagctcggctgcggcgaaggcacgtcaccccgccctcctcctccctctccccgcgctcttccgtttcgcggatgcggcgcgtgcgtggtgctcctctccgcctacgacgcggcttcgggcgcggtgtcgcacgcggcggcgagctcctgcctcacgctggtgcacggccttcatcaccgcgccgtgaccaccaccgaggggctcgggggcggcggccgcctccacgccgtgcacgagcggctcgcggggttccacgcctcgcagtgcggcttctgcacgcccggggtgtgcatgtccctcgccgccgcgctcgcgggggccgaggccgaggccaaggccaaggcggggaggaggcccgccccacccgaggggttcgcgaggctcacggcggctgaggcggagtgggccgtggcgggaaatctctgccgttgcacggggtaccgcccgatcgccgacgcctgcaagagcttcgcggctgacgtggatttggaggacctgggcctcaactccttctggaggaagggggacgcccatgcttccaagctgccgcggtacgacgaggggagcatcggtgtgttcccggagttcctcaaggctgagatcagagcttcttctggggttgaccagtacacaccgccggcattgctgggaagtgccaccacttggcaccggcctcggagcgtggaggagtactataagctggtagattctgagttgtttgaccaaagtaaaacaaaggtggttgtggggaacacagcttcaggcgtttacagagaaacagaggtgtatgataggtacatcgacctcagatgcatcccggagctgaattcggttagtaaggaagccaatggtgttcaaattggagctgcagtaacgatttctcaggcaattgagattttaagagtagaagctggtggctgcaatgatgtaatcttctgtaagattgctgatcatatggaaaaggtggcgtctccatttgtccggaacactgcaagtttgggtggaaatttggtgatggcacagagggaccagtttgcctctgacatcgcaacgatccttcttgctgctgggtcatcgatatgcatccaggcatcatcaaaaaggttgactgtcatgatggaggacttccttcagatgccaccttgcgatcacaagacactgctattaagcatttgcattcctcgttggactcctattggtggcctattttctggtgataaaaccatggctgggacagaaagtaagacaggaacttctgtgctgtttgagacgtaccgagctgctccacgccctcttggcaatgcagttgcatatcttaattctgctttcttggctcaggtctcttcagatggaacttcaagcagattaatattgagagagatatgtctggcttttggtgcatatgggagccaacatgccatcagggctaggaatgttgagaaactgttagtgggtaaacctattactacatcggtgctacttgaagcatgtagacgtctcaaggaaacaattgttcctaaagaaggcacaaggcatgctgcttataggtcaagcttggcagttgcctttctgtttacttttctttacccagtaactgaaggaactttgaagactgtaaaggaagttcatcttaatggctatgcaacttttggcaccaatggaaatccaaattgtggacccgatgcacatgttgatgtttcacttaaaaaggtcattgatgtgaactccggttcatgtaccaatgaacgcattcttgaatattcaaatcagattattgaaatcaataaagactatttccccgttggcataccaaccaagaaggttggagcagaactccaagcctctggtgaggctgtatttgtggatgacatccccgctcccaaggattgtgtttatggagcatttatatatagcacaaaacctttagcccatgtgaagagcatagaactcgacctttcactcaagcagcttaaaacgctgggagtagttactgttaaggatattccagaatgtggcagcaatgttggggccaacactatatttggacctgaacctctgtttggtgatccagttactcagtgtgcaggggaacctcttggtgttgtgttctgttgttactgaatctttttggcacagattgcagaaacacaaagatttgccaatatagctgcaaaaaaagctgttgttaactacagtactgagaacttagatgctccaattttatccatagaggaggctgttaaaaggtgcagttatttcgaaaccccgccgtttcttcttcccctgaaaattggtgatttctcaaaaggaatggcagaagcagatcagaaaatctattctgaggttaaactcaattctcagtactacttttacatggaaacacaagctgctctggcaatacccgatgaggataactgcatggtagtgtatagctcaagccaatgccctgagacagcacagaatgtcattgcaaagtgccttggtttaccttgtcacaacgttcgtgttattaccagaagagttggtggtggatttggaggaaaggctgttagatcattacctcatttaagttgcaccgtcctgtccgtatgtatcttgaccgcaagactgacatgatagtgactggaggaatgacaaaagatattagcctcataatccctcataatttcattgaggcactgaagaaatataattggggtgccttttcttatgaagcaaaggtctgcagaacaaaccttgctacaaagtctgcgatgcgggggcctggagaagtacaaggttcttatgttgccgaagctataattgagcatgttgcttccacgctctccgctgatgctaatttggttagacgtaaaaatcttcacacggttgagagccttgctttgtttcacagtgagtgcactgaagatgccatgggttatacacttcactctatatgtgatcaagtgactgcatcagaaaactatcagcatcggcttgaaataatccagtctttcaacaaaaacaacaaatggaaaaagaggggcctctcttttgtgccaatagtacacaaagtattatctcgaccgacacctggaaaagtgtctattcttaatgatggatctgttgctgttgaagttggaggcattgagttaggccaggggctttggacaaaagtgaagcagatgacagcttttggtcttggacaactctgtcctaatcgaagtcaagagctgttggagagaataagagttattcaagcggatacattaagtaacgtacagggagggtggaccactgggagtaccacatcagaatctagttgtgaagcagttcgtctcgcatgcaatgtcttggtcaacaggctgaagccagtcaaggagcaatctcaagaaaagcaagacaatgtttcatgggatgaacttatttccaagggaattacgtgttgactctataggatctttagcttgtaacgctagccacaagagcgggaaaaactagggctataccattgggattggaggaccccatagggacgaggaggtatcagcgaatgttggttcgcatgccagccttttccccttctattgtacgcaatgtgaaagggtcgcaaccagaaggttgtttccccctcgatcagggcgtgaggtggagtcgggctcagtcctctgaccaagttcgacatgagataaacctaacattctccccctgttctcatacttactcgcttatgtttagaacttgttagactatgtgtgtgtgagtgtgtgtgggccggcaccactgttgggctgccagcccattagggttagggtttcctgtctctatatattgtaaccccatctattatcaatacaacacttaatcttccaacagaacttactctctccatcccataaann

SEQ ID NO: 67934 - DNA, 4307 bp, Zea Mays
  misc_feature (4306)..(4307): n is a, c, g, or t
tgcgatttgcgaagctgcgagagtggcggtgctagtagtctagtagagtactcccagtagataagcaagctgcgggcgccgcccagatgggaatcgggttccgacttccgacacgcacacgcccccacatcgcgccgcgatggctgcttcgccctcgccgtcgaccgcgaccgcgaccgcttctccctcagcgtcagcggcggcggtcttggctgtaaacggggagcgggttgagctccgcgagggggacgtgaaccccggcaccacgctcctcgagttcctccgcacccgcacccgcttcaccgggcccaagctcggctgcggcgaaggcacgtcaccccgccctcctcctccctctccccgcgctcttccgtttcgttccgcggcttttgagcttcacggcccatttctgcaggcggatgcggcgcgtgcgtggtgctcctctccgcctacgacgcggcttcgggcgcggtgtcgcacgcggcggcgagctcctgcctcacgctggtgcacggccttcatcaccgcgccgtgaccaccaccgaggggctcgggggcggcggccgcctccacgccgtgcacgagcggctcgcggggttccacgcctcgcagtgcggcttctgcacgcccggggtgtgcatgtccctcgccgccgcgctcgcgggggccgaggccgaggccaaggccaaggcggggaggaggcccgccccacccgaggggttcgcgaggctcacggcggctgaggcggagtgggccgtggcgggaaatctctgccgttgcacggggtaccgcccgatcgccgacgcctgcaagagcttcgcggctgacgtggatttggaggacctgggcctcaactccttctggaggaagggggacgcccatgcttccaagctgccgcggtacgacgaggggagcatcggtgtgttcccggagttcctcaaggctgagatcagagcttcttctggggttgaccagtacacaccgccggcattgctgggaagtgccaccacttggcaccggcctcggagcgtggaggagtactataagctggtagattctgagttgtttgaccaaagtaaaacaaaggtggttgtggggaacacagcttcaggcgtttacagagaaacagaggtgtatgataggtacatcgacctcagatgcatcccggagctgaattcggttagtaaggaagccaatggtgttcaaattggagctgcagtaacgatttctcaggcaattgagattttaagagtagaagctggtggctgcaatgatgtaatcttctgtaagattgctgatcatatggaaaaggtggcgtctccatttgtccggaacactgcaagtttgggtggaaatttggtgatggcacagagggaccagtttgcctctgacatcgcaacgatccttcttgctgctgggtcatcgatatgcatccaggcatcatcaaaaaggttgactgtcatgatggaggacttccttcagatgccaccttgcgatcacaagacactgctattaagcatttgcattcctcgttggactcctattggtggcctattttctggtgataaaaccatggctgggacagaaagtaagacaggaacttctgtgctgtttgagacgtaccgagctgctccacgccctcttggcaatgcagttgcatatcttaattctgctttcttggctcaggtctcttcagatggaacttcaagcagattaatattgagagagatatgtctggcttttggtgcatatgggagccaacatgccatcagggctaggaatgttgagaaactgttagtgggtaaacctattactacatcggtgctacttgaagcatgtagacgtctcaaggaaacaattgttcctaaagaaggcacaaggcatgctgcttataggtcaagcttggcagttgcctttctgtttacttttctttacccagtaactgaaggaactttgaagactgtaaaggaagttcatcttaatggctatgcaacttttggcaccaatggaaatccaaattgtggacccgatgcacatgttgatgtttcacttaaaaaggtcattgatgtgaactccggttcatgtaccaatgaacgcattcttgaatattcaaatcagattattgaaatcaataaagactatttccccgttggcataccaaccaagaaggttggagcagaactccaagcctctggtgaggctgtatttgtggatgacatccccgctcccaaggattgtgtttatggagcatttatatatagcacaaaacctttagcccatgtgaagagcatagaactcgacctttcactcaagcagcttaaaacgctgggagtagttactgttaaggatattccagaatgtggcagcaatgttggggccaacactatatttggacctgaacctctgtttggtgatccagttactcagtgtgcaggggaacctcttggtgttgtgaaacacaaagatttgccaatatagctgcaaaaaaagctgttgttaactacagtactgagaacttagatgctccaattttatccatagaggaggctgttaaaaggtgcagttatttcgaaaccccgccgtttcttcttcccctgaaaattggtgatttctcaaaaggaatggcagaagcagatcagaaaatctattctgaggttaaactcaattctcagtactacttttacatggaaacacaagctgctctggcaatacccgatgaggataactgcatggtagtgtatagctcaagccaatgccctgagacagcacagaatgtcattgcaaagtgccttggtttaccttgtcacaacgttcgtgttattaccagaagagttggtggtggatttggaggaaaggctgttagatcattacctgtggcaactgcttgtgcacttgcagcatttaagttgcaccgtcctgtccgtatgtatcttgaccgcaagactgacatgatagtgactggaggtcggcatcccatgaaaatatgctattcagtgggattcaaaccagatgggaaaatcactgctttgcatataggtttgttcataaatgcaggaatgacaaaagatattagcctcataatccctcataatttcattgaggcactgaagaaatataattggggtgccttttcttatgaagcaaaggtctgcagaacaaaccttgctacaaagtctgcgatgcgggggcctggagaagtacaaggttcttatgttgccgaagctataattgagcatgttgcttccacgctctccgctgatgctaatttggttagacgtaaaaatcttcacacggttgagagccttgctttgtttcacagtgagtgcactgaagatgccatgggttatacacttcactctatatgtgatcaagtgactgcatcagaaaactatcagcatcggcttgaaataatccagtctttcaacaaaaacaacaaatggaaaaagaggggcctctcttttgtgccaatagtacacaaagtattatctcgaccgacacctggaaaagtgtctattcttaatgatggatctgttgctgttgaagttggaggcattgagttaggccaggggctttggacaaaagtgaagcagatgacagcttttggtcttggacaactctgtcctaatcgaagtcaagagctgttggagagaataagagttattcaagcggatacattaagtaacgtacagggagggtggaccactgggagtaccacatcagaatctagttgtgaagcagttcgtctcgcatgcaatgtcttggtcaacaggctgaagccagtcaaggagcaatctcaagaaaagcaagacaatgtttcatgggatgaacttatttccaagggaattacgtgttgactctataggatctttagcttgtaacgctagccacaagagcgggaaaaactagggctataccattgggattggaggaccccatagggacgaggaggtatcagcgaatgttggttcgcatgccagccttttccccttctattgtacgcaatgtgaaagggtcgcaaccagaaggttgtttccccctcgatcagggcgtgaggtggagtcgggctcagtcctctgaccaagttcgacatgagataaacctaacattctccccctgttctcatacttactcgcttatgtttagaacttgttagactatgtgtgtgtgagtgtgtgtgggccggcaccactgttgggctgccagcccattagggttagggtttcctgtctctatatattgtaaccccatctattatcaatacaacacttaatcttccaacagaacttactctctccatcccataaann

SEQ ID NO: 67935 - DNA, 4047 bp, Zea Mays
  misc_feature (4046)..(4047): n is a, c, g, or t
cccgtgatgcccgttctctctccgttttggaatttctcggcgacagcgaccctgcttgcgatttgcgaagctgcgagagtggcggtgctagtagtctagtagagtactcccagtagataagcaagctgcgggcgccgcccagatgggaatcgggttccgacttccgacacgcacacgcccccacatcgcgccgcgatggctgcttcgccctcgccgtcgaccgcgaccgcgaccgcttctccctcagcgtcagcggcggcggtcttggctgtaaacggggagcgggttgagctccgcgagggggacgtgaaccccggcaccacgctcctcgagttcctccgcacccgcacccgcttcaccgggcccaagctcggctgcggcgaaggcacgtcaccccgccctcctcctccctctccccgcgctcttccgtttcgcggatgcggcgcgtgcgtggtgctcctctccgcctacgacgcggcttcgggcgcggtgtcgcacgcggcggcgagctcctgcctcacgctggtgcacggccttcatcaccgcgccgtgaccaccaccgaggggctcgggggcggcggccgcctccacgccgtgcacgagcggctcgcggggttccacgcctcgcagtgcggcttctgcacgcccggggtgtgcatgtccctcgccgccgcgctcgcgggggccgaggccgaggccaaggccaaggcggggaggaggcccgccccacccgaggggttcgcgaggctcacggcggctgaggcggagtgggccgtggcgggaaatctctgccgttgcacggggtaccgcccgatcgccgacgcctgcaagagcttcgcggctgacgtggatttggaggacctgggcctcaactccttctggaggaagggggacgcccatgcttccaagctgccgcggtacgacgaggggagcatcggtgtgttcccggagttcctcaaggctgagatcagagcttcttctggggttgaccagtacacaccgccggcattgctgggaagtgccaccacttggcaccggcctcggagcgtggaggagtactataagctggtagattctgagttgtttgaccaaagtaaaacaaaggtggttgtggggaacacagcttcaggcgtttacagagaaacagaggtgtatgataggtacatcgacctcagatgcatcccggagctgaattcggttagtaaggaagccaatggtgttcaaattggagctgcagtaacgatttctcaggcaattgagattttaagagtagaagctggtggctgcaatgatgtaatcttctgtaagattgctgatcatatggaaaaggtggcgtctccatttgtccggaacactgcaagtttgggtggaaatttggtgatggcacagagggaccagtttgcctctgacatcgcaacgatccttcttgctgctgggtcatcgatatgcatccaggcatcatcaaaaaggttgactgtcatgatggaggacttccttcagatgccaccttgcgatcacaagacactgctattaagcatttgcattcctcgttggactcctattggtggcctattttctggtgataaaaccatggctgggacagaaagtaagacaggaacttctgtgctgtttgagacgtaccgagctgctccacgccctcttggcaatgcagttgcatatcttaattctgctttcttggctcaggtctcttcagatggaacttcaagcagattaatattgagagagatatgtctggcttttggtgcatatgggagccaacatgccatcagggctaggaatgttgagaaactgttagtgggtaaacctattactacatcggtgctacttgaagcatgtagacgtctcaaggaaacaattgttcctaaagaaggcacaaggcatgctgcttataggtcaagcttggcagttgcctttctgtttacttttctttacccagtaactgaaggaactttgaagactgtaaaggaagttcatcttaatggctatgcaacttttggcaccaatggaaatccaaattgtggacccgatgcacatgttgatgtttcacttaaaaaggtcattgatgtgaactccggttcatgtaccaatgaacgcattcttgaatattcaaatcagattattgaaatcaataaagactatttccccgttggcataccaaccaagaaggttggagcagaactccaagcctctgattgcagaaacacaaagatttgccaatatagctgcaaaaaaagctgttgttaactacagtactgagaacttagatgctccaattttatccatagaggaggctgttaaaaggtgcagttatttcgaaaccccgccgtttcttcttcccctgaaaattggtgatttctcaaaaggaatggcagaagcagatcagaaaatctattctgaggttaaactcaattctcagtactacttttacatggaaacacaagctgctctggcaatacccgatgaggataactgcatggtagtgtatagctcaagccaatgccctgagacagcacagaatgtcattgcaaagtgccttggtttaccttgtcacaacgttcgtgttattaccagaagagttggtggtggatttggaggaaaggctgttagatcattacctcatttaagttgcaccgtcctgtccgtatgtatcttgaccgcaagactgacatgatagtgactggaggtcggcatcccatgaaaatatgctattcagtgggattcaaaccagatgggaaaatcactgctttgcatataggtttgttcataaatgcaggaatgacaaaagatattagcctcataatccctcataatttcattgaggcactgaagaaatataattggggtgccttttcttatgaagcaaaggtctgcagaacaaaccttgctacaaagtctgcgatgcgggggcctggagaagtacaaggttcttatgttgccgaagctataattgagcatgttgcttccacgctctccgctgatgctaatttggttagacgtaaaaatcttcacacggttgagagccttgctttgtttcacagtgagtgcactgaagatgccatgggttatacacttcactctatatgtgatcaagtgactgcatcagaaaactatcagcatcggcttgaaataatccagtctttcaacaaaaacaacaaatggaaaaagaggggcctctcttttgtgccaatagtacacaaagtattatctcgaccgacacctggaaaagtgtctattcttaatgatggatctgttgctgttgaagttggaggcattgagttaggccaggggctttggacaaaagtgaagcagatgacagcttttggtcttggacaactctgtcctaatcgaagtcaagagctgttggagagaataagagttattcaagcggatacattaagtaacgtacagggagggtggaccactgggagtaccacatcagaatctagttgtgaagcagttcgtctcgcatgcaatgtcttggtcaacaggctgaagccagtcaaggagcaatctcaagaaaagcaagacaatgtttcatgggatgaacttatttccaagggaattacgtgttgactctataggatctttagcttgtaacgctagccacaagagcgggaaaaactagggctataccattgggattggaggaccccatagggacgaggaggtatcagcgaatgttggttcgcatgccagccttttccccttctattgtacgcaatgtgaaagggtcgcaaccagaaggttgtttccccctcgatcagggcgtgaggtggagtcgggctcagtcctctgaccaagttcgacatgagataaacctaacattctccccctgttctcatacttactcgcttatgtttagaacttgttagactatgtgtgtgtgagtgtgtgtgggccggcaccactgttgggctgccagcccattagggttagggtttcctgtctctatatattgtaaccccatctattatcaatacaacacttaatcttccaacagaacttactctctccatcccataaann

SEQ ID NO: 67936 - DNA, 4043 bp, Zea Mays
  misc_feature (4042)..(4043): n is a, c, g, or t
cctcacgccgcgtcaccctcgtggcgctcggcgagcgcgcgacacgccggcacgccgccctcccgtgatgcccgttctctctccgttttggaatttctcggcgacagcgaccctgcttgcgatttgcgaagctgcgagagtggcggtgctagtagtctagtagagtactcccagtagataagcaagctgcgggcgccgcccagatgggaatcgggttccgacttccgacacgcacacgcccccacatcgcgccgcgatggctgcttcgccctcgccgtcgaccgcgaccgcgaccgcttctccctcagcgtcagcggcggcggtcttggctgtaaacggggagcgggttgagctccgcgagggggacgtgaaccccggcaccacgctcctcgagttcctccgcacccgcacccgcttcaccgggcccaagctcggctgcggcgaaggcacgtcaccccgccctcctcctccctctccccgcgctcttccgtttcgcggatgcggcgcgtgcgtggtgctcctctccgcctacgacgcggcttcgggcgcggtgtcgcacgcggcggcgagctcctgcctcacgctggtgcacggccttcatcaccgcgccgtgaccaccaccgaggggctcgggggcggcggccgcctccacgccgtgcacgagcggctcgcggggttccacgcctcgcagtgcggcttctgcacgcccggggtgtgcatgtccctcgccgccgcgctcgcgggggccgaggccgaggccaaggccaaggcggggaggaggcccgccccacccgaggggttcgcgaggctcacggcggctgaggcggagtgggccgtggcgggaaatctctgccgttgcacggggtaccgcccgatcgccgacgcctgcaagagcttcgcggctgacgtggatttggaggacctgggcctcaactccttctggaggaagggggacgcccatgcttccaagctgccgcggtacgacgaggggagcatcggtgtgttcccggagttcctcaaggctgagatcagagcttcttctggggttgaccagtacacaccgccggcattgctgggaagtgccaccacttggcaccggcctcggagcgtggaggagtactataagctggtagattctgagttgtttgaccaaagtaaaacaaaggtggttgtggggaacacagcttcaggcgtttacagagaaacagaggtgtatgataggtacatcgacctcagatgcatcccggagctgaattcggttagtaaggaagccaatggtgttcaaattggagctgcagtaacgatttctcaggcaattgagattttaagagtagaagctggtggctgcaatgatgtaatcttctgtaagattgctgatcatatggaaaaggtggcgtctccatttgtccggaacactgcaagtttgggtggaaatttggtgatggcacagagggaccagtttgcctctgacatcgcaacgatccttcttgctgctgggtcatcgatatgcatccaggcatcatcaaaaaggttgactgtcatgatggaggacttccttcagatgccaccttgcgatcacaagacactgctattaagcatttgcattcctcgttggactcctattggtggcctattttctggtgataaaaccatggctgggacagaaagtaagacaggaacttctgtgctgtttgagacgtaccgagctgctccacgccctcttggcaatgcagttgcatatcttaattctgctttcttggctcaggtctcttcagatggaacttcaagcagattaatattgagagagatatgtctggcttttggtgcatatgggagccaacatgccatcagggctaggaatgttgagaaactgttagtgggtaaacctattactacatcggtgctacttgaagcatgtagacgtctcaaggaaacaattgttcctaaagaaggcacaaggcatgctgcttataggtcaagcttggcagttgcctttctgtttacttttctttacccagtaactgaaggaactttgaagactgtaaaggaagttcatcttaatggctatgcaacttttggcaccaatggaaatccaaattgtggacccgatgcacatgttgatgtttcacttaaaaaggtcattgatgtgaactccggttcatgtaccaatgaacgcattcttgaatattcaaatcagattattgaaatcaataaagactatttccccgttggcataccaaccaagaaggttggagcagaactccaagcctctgattgcagaaacacaaagatttgccaatatagctgcaaaaaaagctgttgttaactacagtactgagaacttagatgctccaattttatccatagaggaggctgttaaaaggtgcagttatttcgaaaccccgccgtttcttcttcccctgaaaattggtgatttctcaaaaggaatggcagaagcagatcagaaaatctattctgaggttaaactcaattctcagtactacttttacatggaaacacaagctgctctggcaatacccgatgaggataactgcatggtagtgtatagctcaagccaatgccctgagacagcacagaatgtcattgcaaagtgccttggtttaccttgtcacaacgttcgtgttattaccagaagagttggtggtggatttggaggaaaggctgttagatcattacctgtggcaactgcttgtgcacttgcagcatttaagttgcaccgtcctgtccgtatgtatcttgaccgcaagactgacatgatagtgactggaggaatgacaaaagatattagcctcataatccctcataatttcattgaggcactgaagaaatataattggggtgccttttcttatgaagcaaaggtctgcagaacaaaccttgctacaaagtctgcgatgcgggggcctggagaagtacaaggttcttatgttgccgaagctataattgagcatgttgcttccacgctctccgctgatgctaatttggttagacgtaaaaatcttcacacggttgagagccttgctttgtttcacagtgagtgcactgaagatgccatgggttatacacttcactctatatgtgatcaagtgactgcatcagaaaactatcagcatcggcttgaaataatccagtctttcaacaaaaacaacaaatggaaaaagaggggcctctcttttgtgccaatagtacacaaagtattatctcgaccgacacctggaaaagtgtctattcttaatgatggatctgttgctgttgaagttggaggcattgagttaggccaggggctttggacaaaagtgaagcagatgacagcttttggtcttggacaactctgtcctaatcgaagtcaagagctgttggagagaataagagttattcaagcggatacattaagtaacgtacagggagggtggaccactgggagtaccacatcagaatctagttgtgaagcagttcgtctcgcatgcaatgtcttggtcaacaggctgaagccagtcaaggagcaatctcaagaaaagcaagacaatgtttcatgggatgaacttatttccaagggaattacgtgttgactctataggatctttagcttgtaacgctagccacaagagcgggaaaaactagggctataccattgggattggaggaccccatagggacgaggaggtatcagcgaatgttggttcgcatgccagccttttccccttctattgtacgcaatgtgaaagggtcgcaaccagaaggttgtttccccctcgatcagggcgtgaggtggagtcgggctcagtcctctgaccaagttcgacatgagataaacctaacattctccccctgttctcatacttactcgcttatgtttagaacttgttagactatgtgtgtgtgagtgtgtgtgggccggcaccactgttgggctgccagcccattagggttagggtttcctgtctctatatattgtaaccccatctattatcaatacaacacttaatcttccaacagaacttactctctccatcccataaann

SEQ ID NO: 67937 - DNA, 3870 bp, Zea Mays
ctcaatttctgttcgcgtataatcgtcggatatctccctctcctcaaaatactcacaacccagagatctcacacccacgaccaccacgagggaaaaaaaacaacaacagaggagagagactagagagagagagagagagagaggagcgttggagtttggaagcagttcctgcgacctgcggccggagccccggggcatattcctcgcccggagatcccgtacccgaccctcccctgataaacagacgcaagcgtcagggagggagggagggacagagagaggtagagagggccggggcgaagggggcaaagatgcgttcttgaggagcctgtgcaggggaggtccaatccagaggccgccattccttttcttttccccccaacctctgcaggctcttcagatccagcaatccggcttgtttcttttgctgatactgtgtgtgttcctgaaacttcatggagacttccatatctccaccaggcacatcaaagcagtcagctgtccgcaaaccttctcctggaagctctcttaaggatctgtgccttgtttccaaacaagggtcaatagctgaagtagaatctgctttggccttgttgaaaaaaagtggtgggaacattgatggtagaaatgcatttggtcttagtgccctccaccttgcaacatggagaaatcatctacccattgtgaggcgactcctagatgctggcgctgatccagatgcaagggatggagaatctggctggagtagcctgcatagagcacttcattttggtcacctatgtattgctggtgttcttttacagtttggtgcttccctcgctttggaggacactaagggccgtacacctgttgaccttatctcctgtccagtatcacaggccaatggagattttccagatgcagttggggaagtgggacaaattatcagctgggaactggcaacgcccacatacaaaaactaccatgcaaagtagaagctttgcatggatcatatatcaaaacagttgctgcatcaaagtttcacagtgtagcagttagttctaatggtgaactatacacatggggatttggtcgaggtggtcgtcttggtcatccagatattcacagtggacagacaactgctgtgattacccctcgccaggtgacagtaggattaggccgtaaacgagttaatgctgtggctgcagccaaacatcatactgtgattgctacagagctgggggaattgtttacctggggatcaaatagagagggtcagcttgggtacccttctgttgatacccaaccaacaccaaggcgtgttggttcgctcaagcaaaggataatttcagtagctgctgcaaacaagcactccgctgcagttgctgatactggcgaagtattcacctggggttgcaataaggagggccaactaggatatggcacttcaaactcagcatcaaactgtatcccaagaatggtggagtacttgaaaggaaaagtacttagaggtgtttctgcagcaaagtatcatacaatagtgttaggagctgatggagaggtgttcacttggggccatcgccttgtcaccccacggcgtgtcgtagtagctcgatgccttaagaagggtggaaatacaaatctgaagtttcatcgtatggaacgacttcaagtgatttcagtggctgctggaacaacgcacaatactgctttaacagctgatggtgctcttttctactgggtttcatcagatcctgatctaaaatgccagcagatattttcaatgtgtggaaggaatattgtgaacatctcggctggaaagtactggaccgctgtggctacatcaactggtgatgttttcatgtgggatgcaaagaaacgtaaggacgaaacgccaattttcactcgggtgcatggtgttaagcgagcaacatttgtttgtgttggtgaaacgcacatgcttgtgctctcaagtatataccatcctgagtatccacccaagcctaaaagccaaggcttaaaatccatgttagaatggaacggtggaacagaagagctgggtgaagatatcctgtttgatgatgttcagcccaacagtggtttatcaggaagcagtggtgaaatgagcaaaggtgtgcctagcttgaaaagcctctgtgagaaggttgcagttgagtatttattggagccaaaaaactcaatacagcttcttgaaattgctgattccttggaagctaaggagctcaagaagcattgtgaggtgatgtagaggaagatgaagcaagagaattccccaagacccgtaaatgtgggaaatctgcatcaaggccatctgcgatgtctagtgatgacagcttccttcagaaagactgcaccgctgaacaagccgtctctaagcagatcagagcacttcgcaagaagctgcaacagattgagattctcgaggctaaacaacttgcaggtcatcagcttgacagtcagcaggtagcgaagctcgagtctagggctgcccttgaagaaggtaggacaaacagaaaacctgaggtttctaagaaacagaagagaaagaacaagcagtcaacacagaccccgtcagtgaaaaatgagcctgggcaacaaatccccattacggaacttcaagttctacaagtcaatgtctctgctgaaaagcaggaggcgtatgccgctgatccaattaaacctatggaggctgccgcgttcagcaacacaaaggacaccgcttctccaccggagaagaaaccttcccaaccaactccatcaaagaagaagaacagaaaaggcggcctgtcgctgttcctgagcggcgctctcgacgacaccccaaaaccaagcctccctgcccccgctgtgcctgccacaccgaagcccgaaggacccgcctggggcggcgtgaagataaccaagggacccgcttcgcttcgagacatccagaccgagcagagcagaacaaacgagcccgcgtcggccaaggcgaaggaccgccacgagaactcgccggacagcgccggccgcgcgacaaggctctcctcgttcatccccgacgcgcgttccagcccagtagccgtcgtggcgcctgctcgcgcagcggcggcgccttcttccgaaggtgacaggagcacgccgccgtggtcgtcctctgccacctcgcccaacgtgtcgcagccttcgctcagggacatacaacagatgcagcagaggcaccatggcggcgtctcccacagcccgaaaacccagacatcgggcttctgtataccgccccacggcggagcgccagaggccgctggcggtggcggcgtgaaggacaacgtgcccaaccggtggttcaggccggagaccgacgccccgtcctccatccgctccatccagatcgaggagcaggctatgaaggacttcaggcgcttctacagcagcgtgaggatcgtcaagccgcaggtctagtagcactggcggcggcggcggtggcggccttggcggagagtgactgatggcacaacaaccccctttaggctcaccctcccatttgacactggctcgttgtacattcgagtgtacagttggttctgttcgccataggttccttgagctgaacaataaacaaacaccctttgctgctgttgctgctgctttcgcagtgagtggtctcgtttagttgtaacagaagattgtacaggccatgtgagatcaccaccccccggctttggcttaacagtttaacttgagccaatgcttctttttttttttttggcgccaaaatgtctttggttgttccaagcagaggtcataaaaactgtgtggtgcgtctgcacccaggtacccaacatttttagcttcgatcggacatgatctcactttggggctgtagcctagtgc

SEQ ID NO: 67938 - DNA, 2846 bp, Zea Mays
ctcaatttctgttcgcgtataatcgtcggatatctccctctcctcaaaatactcacaacccagagatctcacacccacgaccaccacgagggaaaaaaaacaacaacagaggagagagactagagagagagagagagagagaggagcgttggagtttggaagcagttcctgcgacctgcggccggagccccggggcatattcctcgcccggagatcccgtacccgaccctcccctgataaacagacgcaagcgtcagggagggagggagggacagagagaggtagagagggccggggcgaagggggcaaagatgcgttcttgaggagcctgtgcaggggaggtccaatccagaggccgccattccttttcttttccccccaacctctgcaggctcttcagatccagcaatccggcttgtttcttttgctggttgatttatactctatagtggttctctacttagcatcaagtcttggcatggcaatggcctcgtagctcgcggctctctaataggaataattttactcaaaatgaagctatagcgtcatgctatcttaggcacatcaaagcagtcagctgtccgcaaaccttctcctggaagctctcttaaggatctgtgccttgtttccaaacaagggtcaatagctgaagtagaatctgctttggccttgttgaaaaaaagtggtgggaacattgatggtagaaatgcatttggtcttagtgccctccaccttgcaacatggagaaatcatctacccattgtgaggcgactcctagatgctggcgctgatccagatgcaagggatggagaatctggctggagtagcctgcatagagcacttcattttggtcacctatgtattgctggtgttcttttacagtttggtgcttccctcgctttggaggacactaagggccgtacacctgttgaccttatctcctgtccagtatcacaggccaatggagattttccagatgcagtggacagacaactgctgtgattacccctcgccaggtgacagtaggattaggccgtaaacgagttaatgctgtggctgcagccaaacatcatactgtgattgctacagagctgggggaattgtttacctggggatcaaatagagagggtcagcttgggtacccttctgttgatacccaaccaacaccaaggcgtgttggttcgctcaagcaaaggataatttcagtagctgctgcaaacaagcactccgctgcagttgctgatactggcgaagtattcacctggggttgcaataaggagggccaactaggatatggcacttcaaactcagcatcaaactgtatcccaagaatggtggagtacttgaaaggaaaagtacttagaggtgtttctgcagcaaagtatcatacaatagtgttaggagctgatggagaggtgttcacttggggccatcgccttgtcaccccacggcgtgtcgtagtagctcgatgccttaagaagggtggaaatacaaatctgaagtttcatcgtatggaacgacttcaagtgatttcagtggctgctggaacaacgcacaatactgctttaacagctgatggtgctcttttctactgggtttcatcagatcctgatctaaaatgccagcaggaggcgtatgccgctgatccaattaaacctatggaggctgccgcgttcagcaacacaaaggacaccgcttctccaccggagaagaaaccttcccaaccaactccatcaaagaagaagaacagaaaaggcggcctgtcgctgttcctgagcggcgctctcgacgacaccccaaaaccaagcctccctgcccccgctgtgcctgccacaccgaagcccgaaggacccgcctggggcggcgtgaagataaccaagggacccgcttcgcttcgagacatccagaccgagcagagcagaacaaacgagcccgcgtcggccaaggcgaaggaccgccacgagaactcgccggacagcgccggccgcgcgacaaggctctcctcgttcatccccgacgcgcgttccagcccagtagccgtcgtggcgcctgctcgcgcagcggcggcgccttcttccgaaggtgacaggagcacgccgccgtggtcgtcctctgccacctcgcccaacgtgtcgcagccttcgctcagggacatacaacagatgcagcagaggcaccatggcggcgtctcccacagcccgaaaacccagacatcgggcttctgtataccgccccacggcggagcgccagaggccgctggcggtggcggcgtgaaggacaacgtgcccaaccggtggttcaggccggagaccgacgccccgtcctccatccgctccatccagatcgaggagcaggctatgaaggacttcaggcgcttctacagcagcgtgaggatcgtcaagccgcaggtctagtagcactggcggcggcggcggtggcggccttggcggagagtgactgatggcacaacaaccccctttaggctcaccctcccatttgacactggctcgttgtacattcgagtgtacagttggttctgttcgccataggttccttgagctgaacaataaacaaacaccctttgctgctgttgctgctgctttcgcagtgagtggtctcgtttagttgtaacagaagattgtacaggccatgtgagatcaccaccccccggctttggcttaacagtttaacttgagccaatgcttctttttttttttttggcgccaaaatgtctttggttgttccaagcagaggtcataaaaactgtgtggtgcgtctgcacccaggtacccaacatttttagcttcgatcggacatgatctcactttggggctgtagcctagtgc

SEQ ID NO: 67939 - DNA, 4405 bp, Zea Mays
ctcaatttctgttcgcgtataatcgtcggatatctccctctcctcaaaatactcacaacccagagatctcacacccacgaccaccacgagggaaaaaaaacaacaacagaggagagagactagagagagagagagagagagaggagcgttggagtttggaagcagttcctgcgacctgcggccggagccccggggcatattcctcgcccggagatcccgtacccgaccctcccctgataaacagacgcaagcgtcagggagggagggagggacagagagaggtagagagggccggggcgaagggggcaaagatgcgttcttgaggagcctgtgcaggggaggtccaatccagaggccgccattccttttcttttccccccaacctctgcaggctcttcagatccagcaatccggcttgtttcttttgctggttgatttatactctatagtggttctctacttagcatcaagtcttggcatggcaatggcctcgtagctcgcggctctctaataggaataattttactcaaaatgaagctatagcgtcatgctatcttaggttgtttggacagttccttaggatactgaaactgtcttagataatggagatgatgttcactcaaacatttctcccgatagatatacaattgtaattacaccagaactgtacttacaattaagaacaacatcagctgtaacattagtagtaagaaacagttcagatagtgtgaagaagttcatctgttggcctgctatttcaggcacatcaaagcagtcagctgtccgcaaaccttctcctggaagctctcttaaggatctgtgccttgtttccaaacaagggtcaatagctgaagtagaatctgctttggccttgttgaaaaaaagtggtgggaacattgatggtagaaatgcatttggtcttagtgccctccaccttgcaacatggagaaatcatctacccattgtgaggcgactcctagatgctggcgctgatccagatgcaagggatggagaatctggctggagtagcctgcatagagcacttcattttggtcacctatgtattgctggtgttcttttacagtttggtgcttccctcgctttggaggacactaagggccgtacacctgttgaccttatctcctgtccagtatcacaggccaatggagattttccagatgcagttgcaacggaagtcttcagttggggaagtgggacaaattatcagctgggaactggcaacgcccacatacaaaaactaccatgcaaagtagaagctttgcatggatcatatatcaaaacagttgctgcatcaaagtttcacagtgtagcagttagttctaatggtgaactatacacatggggatttggtcgaggtggtcgtcttggtcatccagatattcacagtggacagacaactgctgtgattacccctcgccaggtgacagtaggattaggccgtaaacgagttaatgctgtggctgcagccaaacatcatactgtgattgctacagagctgggggaattgtttacctggggatcaaatagagagggtcagcttgggtacccttctgttgatacccaaccaacaccaaggcgtgttggttcgctcaagcaaaggataatttcagtagctgctgcaaacaagcactccgctgcagttgctgatactggcgaagtattcacctggggttgcaataaggagggccaactaggatatggcacttcaaactcagcatcaaactgtatcccaagaatggtggagtacttgaaaggaaaagtacttagaggtgtttctgcagcaaagtatcatacaatagtgttaggagctgatggagaggtgttcacttggggccatcgccttgtcaccccacggcgtgtcgtagtagctcgatgccttaagaagggtggaaatacaaatctgaagtttcatcgtatggaacgacttcaagtgatttcagtggctgctggaacaacgcacaatactgctttaacagctgatggtgctcttttctactgggtttcatcagatcctgatctaaaatgccagcagatattttcaatgtgtggaaggaatattgtgaacatctcggctggaaagtactggaccgctgtggctacatcaactggtgatgttttcatgtgggatgcaaagaaacgtaaggacgaaacgccaattttcactcgggtgcatggtgttaagcgagcaacatttgtttgtgttggtgaaacgcacatgcttgtgctctcaagtatataccatcctgagtatccacccaagcctaaaagccaaggcttaaaatccatgttagaatggaacggtggaacagaagagctgggtgaagatatcctgtttgatgatgttcagcccaacagtggtttatcaggaagcagtggtgaaatgagcaaaggtgtgcctagcttgaaaagcctctgtgagaaggttgcagttgagtatttattggagccaaaaaactcaatacagcttcttgaaattgctgattccttggaagctaaggagctcaagaagcattgtgaggatttagctattcgcaacctcgattacattttcacagtgggagcttcttcaattatgaatgcttcttctgaaattcttgtgaacttagagaaattgctagatgagaaatcctcagagccttggagtcagcaccgtcttcccacaatgacagctacctatcctgctgtcattgacagtgatgtagaggaagatgaagcaagagaattccccaagacccgtaaatgtgggaaatctgcatcaaggccatctgcgatgtctagtgatgacagcttccttcagaaagactgcaccgctgaacaagccgtctctaagcagatcagagcacttcgcaagaagctgcaacagattgagattctcgaggctaaacaacttgcaggtcatcagcttgacagtcagcaggtagcgaagctcgagtctagggctgcccttgaaggtgaacttgctgaacttggcattccctcagagatatactcaacttcctctgcttgtccagcagaaggtaggacaaacagaaaacctgaggtttctaagaaacagaagagaaagaacaagcagtcaacacagaccccgtcagtgaaaaatgagcctgggcaacaaatccccattacggaacttcaagttctacaagtcaatgtctctgctgaaaaggaggcgtatgccgctgatccaattaaacctatggaggctgccgcgttcagcaacacaaaggacaccgcttctccaccggagaagaaaccttcccaaccaactccatcaaagaagaagaacagaaaaggcggcctgtcgctgttcctgagcggcgctctcgacgacaccccaaaaccaagcctccctgcccccgctgtgcctgccacaccgaagcccgaaggacccgcctggggcggcgtgaagataaccaagggacccgcttcgcttcgagacatccagaccgagcagagcagaacaaacgagcccgcgtcggccaaggcgaaggaccgccacgagaactcgccggacagcgccggccgcgcgacaaggctctcctcgttcatccccgacgcgcgttccagcccagtagccgtcgtggcgcctgctcgcgcagcggcggcgccttcttccgaaggtgacaggagcacgccgccgtggtcgtcctctgccacctcgcccaacgtgtcgcagccttcgctcagggacatacaacagatgcagcagaggcaccatggcggcgtctcccacagcccgaaaacccagacatcgggcttctgtataccgccccacggcggagcgccagaggccgctggcggtggcggcgtgaaggacaacgtgcccaaccggtggttcaggccggagaccgacgccccgtcctccatccgctccatccagatcgaggagcaggctatgaaggacttcaggcgcttctacagcagcgtgaggatcgtcaagccgcaggtctagtagcactggcggcggcggcggtggcggccttggcggagagtgactgatggcacaacaaccccctttaggctcaccctcccatttgacactggctcgttgtacattcgagtgtacagttggttctgttcgccataggttccttgagctgaacaataaacaaacaccctttgctgctgttgctgctgctttcgcagtgagtggtctcgtttagttgtaacagaagattgtacaggccatgtgagatcaccaccccccggctttggcttaacagtttaacttgagccaatgcttctttttttttttttggcgccaaaatgtctttggttgttccaagcagaggtcataaaaactgtgtggtgcgtctgcacccaggtacccaacatttttagcttcgatcggacatgatctcactttggggctgtagcctagtgc

SEQ ID NO: 67940 - DNA, 4074 bp, Zea Mays
ctcaatttctgttcgcgtataatcgtcggatatctccctctcctcaaaatactcacaacccagagatctcacacccacgaccaccacgagggaaaaaaaacaacaacagaggagagagactagagagagagagagagagagaggagcgttggagtttggaagcagttcctgcgacctgcggccggagccccggggcatattcctcgcccggagatcccgtacccgaccctcccctgataaacagacgcaagcgtcagggagggagggagggacagagagaggtagagagggccggggcgaagggggcaaagatgcgttcttgaggagcctgtgcaggggaggtccaatccagaggccgccattccttttcttttccccccaacctctgcaggctcttcagatccagcaatccggcttgtttcttttgctggcacatcaaagcagtcagctgtccgcaaaccttctcctggaagctctcttaaggatctgtgccttgtttccaaacaagggtcaatagctgaagtagaatctgctttggccttgttgaaaaaaagtggtgggaacattgatggtagaaatgcatttggtcttagtgccctccaccttgcaacatggagaaatcatctacccattgtgaggcgactcctagatgctggcgctgatccagatgcaagggatggagaatctggctggagtagcctgcatagagcacttcattttggtcacctatgtattgctggtgttcttttacagtttggtgcttccctcgctttggaggacactaagggccgtacacctgttgaccttatctcctgtccagtatcacaggccaatggagattttccagatgcagttgcaacggaagtcttcagttggggaagtgggacaaattatcagctgggaactggcaacgcccacatacaaaaactaccatgcaaagtagaagctttgcatggatcatatatcaaaacagttgctgcatcaaagtttcacagtgtagcagttagttctaatggtgaactatacacatggggatttggtcgaggtggtcgtcttggtcatccagatattcacagtggacagacaactgctgtgattacccctcgccaggtgacagtaggattaggccgtaaacgagttaatgctgtggctgcagccaaacatcatactgtgattgctacagagctgggggaattgtttacctggggatcaaatagagagggtcagcttgggtacccttctgttgatacccaaccaacaccaaggcgtgttggttcgctcaagcaaaggataatttcagtagctgctgcaaacaagcactccgctgcagttgctgatactggcgaagtattcacctggggttgcaataaggagggccaactaggatatggcacttcaaactcagcatcaaactgtatcccaagaatggtggagtacttgaaaggaaaagtacttagaggtgtttctgcagcaaagtatcatacaatagtgttaggagctgatggagaggtgttcacttggggccatcgccttgtcaccccacggcgtgtcgtagtagctcgatgccttaagaagggtggaaatacaaatctgaagtttcatcgtatggaacgacttcaagtgatttcagtggctgctggaacaacgcacaatactgctttaacagctgatggtgctcttttctactgggtttcatcagatcctgatctaaaatgccagcagatattttcaatgtgtggaaggaatattgtgaacatctcggctggaaagtactggaccgctgtggctacatcaactggtgatgttttcatgtgggatgcaaagaaacgtaaggacgaaacgccaattttcactcgggtgcatggtgttaagcgagcaacatttgtttgtgttggtgaaacgcacatgcttgtgctctcaagtatataccatcctgagtatccacccaagcctaaaagccaaggcttaaaatccatgttagaatggaacggtggaacagaagagctgggtgaagatatcctgtttgatgatgttcagcccaacagtggtttatcaggaagcagtggtgaaatgagcaaaggtgtgcctagcttgaaaagcctctgtgagaaggttgcagttgagtatttattggagccaaaaaactcaatacagcttcttgaaattgctgattccttggaagctaaggagctcaagaagcattgtgaggatttagctattcgcaacctcgattacattttcacagtgggagcttcttcaattatgaatgcttcttctgaaattcttgtgaacttagagaaattgctagatgagaaatcctcagagccttggagtcagcaccgtcttcccacaatgacagctacctatcctgctgtcattgacagtgatgtagaggaagatgaagcaagagaattccccaagacccgtaaatgtgggaaatctgcatcaaggccatctgcgatgtctagtgatgacagcttccttcagaaagactgcaccgctgaacaagccgtctctaagcagatcagagcacttcgcaagaagctgcaacagattgagattctcgaggctaaacaacttgcaggtcatcagcttgacagtcagcaggtagcgaagctcgagtctagggctgcccttgaaggtgaacttgctgaacttggcattccctcagagatatactcaacttcctctgcttgtccagcagaaggtaggacaaacagaaaacctgaggtttctaagaaacagaagagaaagaacaagcagtcaacacagaccccgtcagtgaaaaatgagcctgggcaacaaatccccattacggaacttcaagttctacaagtcaatgtctctgctgaaaaggaggcgtatgccgctgatccaattaaacctatggaggctgccgcgttcagcaacacaaaggacaccgcttctccaccggagaagaaaccttcccaaccaactccatcaaagaagaagaacagaaaaggcggcctgtcgctgttcctgagcggcgctctcgacgacaccccaaaaccaagcctccctgcccccgctgtgcctgccacaccgaagcccgaaggacccgcctggggcggcgtgaagataaccaagggacccgcttcgcttcgagacatccagaccgagcagagcagaacaaacgagcccgcgtcggccaaggcgaaggaccgccacgagaactcgccggacagcgccggccgcgcgacaaggctctcctcgttcatccccgacgcgcgttccagcccagtagccgtcgtggcgcctgctcgcgcagcggcggcgccttcttccgaaggtgacaggagcacgccgccgtggtcgtcctctgccacctcgcccaacgtgtcgcagccttcgctcagggacatacaacagatgcagcagaggcaccatggcggcgtctcccacagcccgaaaacccagacatcgggcttctgtataccgccccacggcggagcgccagaggccgctggcggtggcggcgtgaaggacaacgtgcccaaccggtggttcaggccggagaccgacgccccgtcctccatccgctccatccagatcgaggagcaggctatgaaggacttcaggcgcttctacagcagcgtgaggatcgtcaagccgcaggtctagtagcactggcggcggcggcggtggcggccttggcggagagtgactgatggcacaacaaccccctttaggctcaccctcccatttgacactggctcgttgtacattcgagtgtacagttggttctgttcgccataggttccttgagctgaacaataaacaaacaccctttgctgctgttgctgctgctttcgcagtgagtggtctcgtttagttgtaacagaagattgtacaggccatgtgagatcaccaccccccggctttggcttaacagtttaacttgagccaatgcttctttttttttttttggcgccaaaatgtctttggttgttccaagcagaggtcataaaaactgtgtggtgcgtctgcacccaggtacccaacatttttagcttcgatcggacatgatctcactttggggctgtagcctagtgc

SEQ ID NO: 67941 - DNA, 4172 bp, Zea Mays
ctcaatttctgttcgcgtataatcgtcggatatctccctctcctcaaaatactcacaacccagagatctcacacccacgaccaccacgagggaaaaaaaacaacaacagaggagagagactagagagagagagagagagagaggagcgttggagtttggaagcagttcctgcgacctgcggccggagccccggggcatattcctcgcccggagatcccgtacccgaccctcccctgataaacagacgcaagcgtcagggagggagggagggacagagagaggtagagagggccggggcgaagggggcaaagatgcgttcttgaggagcctgtgcaggggaggtccaatccagaggccgccattccttttcttttccccccaacctctgcaggctcttcagatccagcaatccggcttgtttcttttgctggttgatttatactctatagtggttctctacttagcatcaagtcttggcatggcaatggcctcgtagctcgcggctctctaataggaataattttactcaaaatgaagctatagcgtcatgctatcttaggttgtttggacagttccttaggatactgaaactgtcttagataatggagatgatgttcactcaaacatttctcccgatagatatacaattgtaattacaccagaactgtacttacaattaagaacaacatcagctgtaacattagtagtaagaaacagttcagatagtgtgaagaagttcatctgttggcctgctatttcagatactgtgtgtgttcctgaaacttcatggagacttccatatctccaccaggcacatcaaagcagtcagctgtccgcaaaccttctcctggaagctctcttaaggatctgtgccttgtttccaaacaagggtcaatagctgaagtagaatctgctttggccttgttgaaaaaaagtggtgggaacattgatggtagaaatgcatttggtcttagtgccctccaccttgcaacatggagaaatcatctacccattgtgaggcgactcctagatgctggcgctgatccagatgcaagggatggagaatctggctggagtagcctgcatagagcacttcattttggtcacctatgtattgctggtgttcttttacagtttggtgcttccctcgctttggaggacactaagggccgtacacctgttgaccttatctcctgtccagtatcacaggccaatggagattttccagatgcagtggacagacaactgctgtgattacccctcgccaggtgacagtaggattaggccgtaaacgagttaatgctgtggctgcagccaaacatcatactgtgattgctacagagctgggggaattgtttacctggggatcaaatagagagggtcagcttgggtacccttctgttgatacccaaccaacaccaaggcgtgttggttcgctcaagcaaaggataatttcagtagctgctgcaaacaagcactccgctgcagttgctgatactggcgaagtattcacctggggttgcaataaggagggccaactaggatatggcacttcaaactcagcatcaaactgtatcccaagaatggtggagtacttgaaaggaaaagtacttagaggtgtttctgcagcaaagtatcatacaatagtgttaggagctgatggagaggtgttcacttggggccatcgccttgtcaccccacggcgtgtcgtagtagctcgatgccttaagaagggtggaaatacaaatctgaagtttcatcgtatggaacgacttcaagtgatttcagtggctgctggaacaacgcacaatactgctttaacagctgatggtgctcttttctactgggtttcatcagatcctgatctaaaatgccagcagatattttcaatgtgtggaaggaatattgtgaacatctcggctggaaagtactggaccgctgtggctacatcaactggtgatgttttcatgtgggatgcaaagaaacgtaaggacgaaacgccaattttcactcgggtgcatggtgttaagcgagcaacatttgtttgtgttggtgaaacgcacatgcttgtgctctcaagtatataccatcctgagtatccacccaagcctaaaagccaaggcttaaaatccatgttagaatggaacggtggaacagaagagctgggtgaagatatcctgtttgatgatgttcagcccaacagtggtttatcaggaagcagtggtgaaatgagcaaaggtgtgcctagcttgaaaagcctctgtgagaaggttgcagttgagtatttattggagccaaaaaactcaatacagcttcttgaaattgctgattccttggaagctaaggagctcaagaagcattgtgaggatttagctattcgcaacctcgattacattttcacagtgggagcttcttcaattatgaatgcttcttctgaaattcttgtgaacttagagaaattgctagatgagaaatcctcagagccttggagtcagcaccgtcttcccacaatgacagctacctatcctgctgtcattgacagtgatgtagaggaagatgaagcaagagaattccccaagacccgtaaatgtgggaaatctgcatcaaggccatctgcgatgtctagtgatgacagcttccttcagaaagactgcaccgctgaacaagccgtctctaagcagatcagagcacttcgcaagaagctgcaacagattgagattctcgaggctaaacaacttgcaggtcatcagcttgacagtcagcaggtagcgaagctcgagtctagggctgcccttgaagaaggtaggacaaacagaaaacctgaggtttctaagaaacagaagagaaagaacaagcagtcaacacagaccccgtcagtgaaaaatgagcctgggcaacaaatccccattacggaacttcaagttctacaagtcaatgtctctgctgaaaagcaggaggcgtatgccgctgatccaattaaacctatggaggctgccgcgttcagcaacacaaaggacaccgcttctccaccggagaagaaaccttcccaaccaactccatcaaagaagaagaacagaaaaggcggcctgtcgctgttcctgagcggcgctctcgacgacaccccaaaaccaagcctccctgcccccgctgtgcctgccacaccgaagcccgaaggacccgcctggggcggcgtgaagataaccaagggacccgcttcgcttcgagacatccagaccgagcagagcagaacaaacgagcccgcgtcggccaaggcgaaggaccgccacgagaactcgccggacagcgccggccgcgcgacaaggctctcctcgttcatccccgacgcgcgttccagcccagtagccgtcgtggcgcctgctcgcgcagcggcggcgccttcttccgaaggtgacaggagcacgccgccgtggtcgtcctctgccacctcgcccaacgtgtcgcagccttcgctcagggacatacaacagatgcagcagaggcaccatggcggcgtctcccacagcccgaaaacccagacatcgggcttctgtataccgccccacggcggagcgccagaggccgctggcggtggcggcgtgaaggacaacgtgcccaaccggtggttcaggccggagaccgacgccccgtcctccatccgctccatccagatcgaggagcaggctatgaaggacttcaggcgcttctacagcagcgtgaggatcgtcaagccgcaggtctagtagcactggcggcggcggcggtggcggccttggcggagagtgactgatggcacaacaaccccctttaggctcaccctcccatttgacactggctcgttgtacattcgagtgtacagttggttctgttcgccataggttccttgagctgaacaataaacaaacaccctttgctgctgttgctgctgctttcgcagtgagtggtctcgtttagttgtaacagaagattgtacaggccatgtgagatcaccaccccccggctttggcttaacagtttaacttgagccaatgcttctttttttttttttggcgccaaaatgtctttggttgttccaagcagaggtcataaaaactgtgtggtgcgtctgcacccaggtacccaacatttttagcttcgatcggacatgatctcactttggggctgtagcctagtgc

SEQ ID NO: 67942 - DNA, 4395 bp, Zea Mays
ctcaatttctgttcgcgtataatcgtcggatatctccctctcctcaaaatactcacaacccagagatctcacacccacgaccaccacgagggaaaaaaaacaacaacagaggagagagactagagagagagagagagagagaggagcgttggagtttggaagcagttcctgcgacctgcggccggagccccggggcatattcctcgcccggagatcccgtacccgaccctcccctgataaacagacgcaagcgtcagggagggagggagggacagagagaggtagagagggccggggcgaagggggcaaagatgcgttcttgaggagcctgtgcaggggaggtccaatccagaggccgccattccttttcttttccccccaacctctgcaggctcttcagatccagcaatccggcttgtttcttttgctggttgatttatactctatagtggttctctacttagcatcaagtcttggcatggcaatggcctcgtagctcgcggctctctaataggaataattttactcaaaatgaagctatagcgtcatgctatcttaggttgtttggacagttccttaggatactgaaactgtcttagataatggagatgatgttcactcaaacatttctcccgatagatatacaattgtaattacaccagaactgtacttacaattaagaacaacatcagctgtaacattagtagtaagaaacagttcagatagtgtgaagaagttcatctgttggcctgctatttcagatactgtgtgtgttcctgaaacttcatggagacttccatatctccaccaggcacatcaaagcagtcagctgtccgcaaaccttctcctggaagctctcttaaggatctgtgccttgtttccaaacaagggtcaatagctgaagtagaatctgctttggccttgttgaaaaaaagtggtgggaacattgatggtagaaatgcatttggtcttagtgccctccaccttgcaacatggagaaatcatctacccattgtgaggcgactcctagatgctggcgctgatccagatgcaagggatggagaatctggctggagtagcctgcatagagcacttcattttggtcacctatgtattgctggtgttcttttacagtttggtgcttccctcgctttggaggacactaagggccgtacacctgttgaccttatctcctgtccagtatcacaggccaatggagattttccagatgcagttgcaacggaagtcttcagttggggaagtgggacaaattatcagctgggaactggcaacgcccacatacaaaaactaccatgcaaagtagaagctttgcatggatcatatatcaaaacagttgctgcatcaaagtttcacagtgtagcagttagttctaatggtgaactatacacatggggatttggtcgaggtggtcgtcttggtcatccagatattcacagtggacagacaactgctgtgattacccctcgccaggtgacagtaggattaggccgtaaacgagttaatgctgtggctgcagccaaacatcatactgtgattgctacagagctgggggaattgtttacctggggatcaaatagagagggtcagcttgggtacccttctgttgatacccaaccaacaccaaggcgtgttggttcgctcaagcaaaggataatttcagtagctgctgcaaacaagcactccgctgcagttgctgatactggcgaagtattcacctggggttgcaataaggagggccaactaggatatggcacttcaaactcagcatcaaactgtatcccaagaatggtggagtacttgaaaggaaaagtacttagaggtgtttctgcagcaaagtatcatacaatagtgttaggagctgatggagaggtgttcacttggggccatcgccttgtcaccccacggcgtgtcgtagtagctcgatgccttaagaagggtggaaatacaaatctgaagtttcatcgtatggaacgacttcaagtgatttcagtggctgctggaacaacgcacaatactgctttaacagctgatggtgctcttttctactgggtttcatcagatcctgatctaaaatgccagcagatattttcaatgtgtggaaggaatattgtgaacatctcggctggaaagtactggaccgctgtggctacatcaactggtgatgttttcatgtgggatgcaaagaaacgtaaggacgaaacgccaattttcactcgggtgcatggtgttaagcgagcaacatttgtttgtgttggtgaaacgcacatgcttgtgctctcaagtatataccatcctgagtatccacccaagcctaaaagccaaggcttaaaatccatgttagaatggaacggtggaacagaagagctgggtgaagatatcctgtttgatgatgttcagcccaacagtggtttatcaggaagcagtggtgaaatgagcaaaggtgtgcctagcttgaaaagcctctgtgagaaggttgcagttgagtatttattggagccaaaaaactcaatacagcttcttgaaattgctgattccttggaagctaaggagctcaagaagcattgtgaggatttagctattcgcaacctcgattacattttcacagtgggagcttcttcaattatgaatgcttcttctgaaattcttgtgaacttagagaaattgctagatgagaaatcctcagagccttggagtcagcaccgtcttcccacaatgacagctacctatcctgctgtcattgacagtgatgtagaggaagatgaagcaagagaattccccaagacccgtaaatgtgggaaatctgcatcaaggccatctgcgatgtctagtgatgacagcttccttcagaaagactgcaccgctgaacaagccgtctctaagcagatcagagcacttcgcaagaagctgcaacagattgagattctcgaggctaaacaacttgcaggtcatcagcttgacagtcagcaggtagcgaagctcgagtctagggctgcccttgaagaaggtaggacaaacagaaaacctgaggtttctaagaaacagaagagaaagaacaagcagtcaacacagaccccgtcagtgaaaaatgagcctgggcaacaaatccccattacggaacttcaagttctacaagtcaatgtctctgctgaaaagcaggaggcgtatgccgctgatccaattaaacctatggaggctgccgcgttcagcaacacaaaggacaccgcttctccaccggagaagaaaccttcccaaccaactccatcaaagaagaagaacagaaaaggcggcctgtcgctgttcctgagcggcgctctcgacgacaccccaaaaccaagcctccctgcccccgctgtgcctgccacaccgaagcccgaaggacccgcctggggcggcgtgaagataaccaagggacccgcttcgcttcgagacatccagaccgagcagagcagaacaaacgagcccgcgtcggccaaggcgaaggaccgccacgagaactcgccggacagcgccggccgcgcgacaaggctctcctcgttcatccccgacgcgcgttccagcccagtagccgtcgtggcgcctgctcgcgcagcggcggcgccttcttccgaaggtgacaggagcacgccgccgtggtcgtcctctgccacctcgcccaacgtgtcgcagccttcgctcagggacatacaacagatgcagcagaggcaccatggcggcgtctcccacagcccgaaaacccagacatcgggcttctgtataccgccccacggcggagcgccagaggccgctggcggtggcggcgtgaaggacaacgtgcccaaccggtggttcaggccggagaccgacgccccgtcctccatccgctccatccagatcgaggagcaggctatgaaggacttcaggcgcttctacagcagcgtgaggatcgtcaagccgcaggtctagtagcactggcggcggcggcggtggcggccttggcggagagtgactgatggcacaacaaccccctttaggctcaccctcccatttgacactggctcgttgtacattcgagtgtacagttggttctgttcgccataggttccttgagctgaacaataaacaaacaccctttgctgctgttgctgctgctttcgcagtgagtggtctcgtttagttgtaacagaagattgtacaggccatgtgagatcaccaccccccggctttggcttaacagtttaacttgagccaatgcttctttttttttttttggcgccaaaatgtctttggttgttccaagcagaggtcataaaaactgtgtggtgcgtctgcacccaggtacccaacatttttagcttcgatcggacatgatctcactttggggctgtagcctagtgc

SEQ ID NO: 67943 - DNA, 4219 bp, Zea Mays
ctcaatttctgttcgcgtataatcgtcggatatctccctctcctcaaaatactcacaacccagagatctcacacccacgaccaccacgagggaaaaaaaacaacaacagaggagagagactagagagagagagagagagagaggagcgttggagtttggaagcagttcctgcgacctgcggccggagccccggggcatattcctcgcccggagatcccgtacccgaccctcccctgataaacagacgcaagcgtcagggagggagggagggacagagagaggtagagagggccggggcgaagggggcaaagatgcgttcttgaggagcctgtgcaggggaggtccaatccagaggccgccattccttttcttttccccccaacctctgcaggctcttcagatccagcaatccggcttgtttcttttgctggttgatttatactctatagtggttctctacttagcatcaagtcttggcatggcaatggcctcgtagctcgcggctctctaataggaataattttactcaaaatgaagctatagcgtcatgctatcttaggttgtttggacagttccttaggatactgaaactgtcttagataatggagatgatgttcactcaaacatttctcccgatagatatacaattgtaattacaccagaactgtacttacaattaagaacaacatcagctgtaacattagtagtaagaaacagttcagatagtgtgaagaagttcatctgttggcctgctatttcagatactgtgtgtgttcctgaaacttcatggagacttccatatctccaccaggcacatcaaagcagtcagctgtccgcaaaccttctcctggaagctctcttaaggatctgtgccttgtttccaaacaagggtcaatagctgaagtagaatctgctttggccttgttgaaaaaaagtggtgggaacattgatggtagaaatgcatttggtcttagtgccctccaccttgcaacatggagaaatcatctacccattgtgaggcgactcctagatgctggcgctgatccagatgcaagggatggagaatctggctggagtagcctgcatagagcacttcattttggtcacctatgtattgctggtgttcttttacagtttggtgcttccctcgctttggaggacactaagggccgtacacctgttgaccttatctcctgtccagtatcacaggccaatggagattttccagatgcagttgcaacggaagtcttcagttggggaagtgggacaaattatcagctgggaactggcaacgcccacatacaaaaactaccatgcaaagtagaagctttgcatggatcatatatcaaaacagttgctgcatcaaagtttcacagtgtagcagttagttctaatggtgaactatacacatggggatttggtcgaggtggtcgtcttggtcatccagatattcacagtggacagacaactgctgtgattacccctcgccaggtgacagtaggattaggccgtaaacgagttaatgctgtggctgcagccaaacatcatactgtgattgctacagagctgggggaattgtttacctggggatcaaatagagagggtcagcttgggtacccttctgttgatacccaaccaacaccaaggcgtgttggttcgctcaagcaaaggataatttcagtagctgctgcaaacaagcactccgctgcagttgctgatactggcgaagtattcacctggggttgcaataaggagggccaactaggatatggcacttcaaactcagcatcaaactgtatcccaagaatggtggagtacttgaaaggaaaagtacttagaggtgtttctgcagcaaagtatcatacaatagtgttaggagctgatggagaggtgttcacttggggccatcgccttgtcaccccacggcgtgtcgtagtagctcgatgccttaagaagggtggaaatacaaatctgaagtttcatcgtatggaacgacttcaagtgatttcagtggctgctggaacaacgcacaatactgctttaacagctgatggtgctcttttctactgggtttcatcagatcctgatctaaaatgccagcagatattttcaatgtgtggaaggaatattgtgaacatctcggctggaaagtactggaccgctgtggctacatcaactggtgatgttttcatgtgggatgcaaagaaacgtaaggacgaaacgccaattttcactcgggtgcatggtgttaagcgagcaacatttgtttgtgttggtgaaacgcacatgcttgtgctctcaagtatataccatcctgagtatccacccaagcctaaaagccaaggcttaaaatccatgttagaatggaacggtggaacagaagagctgggtgaagatatcctgtttgatgatgttcagcccaacagtggtttatcaggaagcagtggtgaaatgagcaaaggtgtgcctagcttgaaaagcctctgtgagaaggttgcagttgagtatttattggagccaaaaaactcaatacagcttcttgaaattgctgattccttggaagctaaggagctcaagaagcattgtgagtgatgtagaggaagatgaagcaagagaattccccaagacccgtaaatgtgggaaatctgcatcaaggccatctgcgatgtctagtgatgacagcttccttcagaaagactgcaccgctgaacaagccgtctctaagcagatcagagcacttcgcaagaagctgcaacagattgagattctcgaggctaaacaacttgcaggtcatcagcttgacagtcagcaggtagcgaagctcgagtctagggctgcccttgaagaaggtaggacaaacagaaaacctgaggtttctaagaaacagaagagaaagaacaagcagtcaacacagaccccgtcagtgaaaaatgagcctgggcaacaaatccccattacggaacttcaagttctacaagtcaatgtctctgctgaaaagcaggaggcgtatgccgctgatccaattaaacctatggaggctgccgcgttcagcaacacaaaggacaccgcttctccaccggagaagaaaccttcccaaccaactccatcaaagaagaagaacagaaaaggcggcctgtcgctgttcctgagcggcgctctcgacgacaccccaaaaccaagcctccctgcccccgctgtgcctgccacaccgaagcccgaaggacccgcctggggcggcgtgaagataaccaagggacccgcttcgcttcgagacatccagaccgagcagagcagaacaaacgagcccgcgtcggccaaggcgaaggaccgccacgagaactcgccggacagcgccggccgcgcgacaaggctctcctcgttcatccccgacgcgcgttccagcccagtagccgtcgtggcgcctgctcgcgcagcggcggcgccttcttccgaaggtgacaggagcacgccgccgtggtcgtcctctgccacctcgcccaacgtgtcgcagccttcgctcagggacatacaacagatgcagcagaggcaccatggcggcgtctcccacagcccgaaaacccagacatcgggcttctgtataccgccccacggcggagcgccagaggccgctggcggtggcggcgtgaaggacaacgtgcccaaccggtggttcaggccggagaccgacgccccgtcctccatccgctccatccagatcgaggagcaggctatgaaggacttcaggcgcttctacagcagcgtgaggatcgtcaagccgcaggtctagtagcactggcggcggcggcggtggcggccttggcggagagtgactgatggcacaacaaccccctttaggctcaccctcccatttgacactggctcgttgtacattcgagtgtacagttggttctgttcgccataggttccttgagctgaacaataaacaaacaccctttgctgctgttgctgctgctttcgcagtgagtggtctcgtttagttgtaacagaagattgtacaggccatgtgagatcaccaccccccggctttggcttaacagtttaacttgagccaatgcttctttttttttttttggcgccaaaatgtctttggttgttccaagcagaggtcataaaaactgtgtggtgcgtctgcacccaggtacccaacatttttagcttcgatcggacatgatctcactttggggctgtagcctagtgc

SEQ ID NO: 67944 - DNA, 4124 bp, Zea Mays
ctcaatttctgttcgcgtataatcgtcggatatctccctctcctcaaaatactcacaacccagagatctcacacccacgaccaccacgagggaaaaaaaacaacaacagaggagagagactagagagagagagagagagagaggagcgttggagtttggaagcagttcctgcgacctgcggccggagccccggggcatattcctcgcccggagatcccgtacccgaccctcccctgataaacagacgcaagcgtcagggagggagggagggacagagagaggtagagagggccggggcgaagggggcaaagatgcgttcttgaggagcctgtgcaggggaggtccaatccagaggccgccattccttttcttttccccccaacctctgcaggctcttcagatccagcaatccggcttgtttcttttgctgatactgtgtgtgttcctgaaacttcatggagacttccatatctccaccaggcacatcaaagcagtcagctgtccgcaaaccttctcctggaagctctcttaaggatctgtgccttgtttccaaacaagggtcaatagctgaagtagaatctgctttggccttgttgaaaaaaagtggtgggaacattgatggtagaaatgcatttggtcttagtgccctccaccttgcaacatggagaaatcatctacccattgtgaggcgactcctagatgctggcgctgatccagatgcaagggatggagaatctggctggagtagcctgcatagagcacttcattttggtcacctatgtattgctggtgttcttttacagtttggtgcttccctcgctttggaggacactaagggccgtacacctgttgaccttatctcctgtccagtatcacaggccaatggagattttccagatgcagttgcaacggaagtcttcagttggggaagtgggacaaattatcagctgggaactggcaacgcccacatacaaaaactaccatgcaaagtagaagctttgcatggatcatatatcaaaacagttgctgcatcaaagtttcacagtgtagcagttagttctaatggtgaactatacacatggggatttggtcgaggtggtcgtcttggtcatccagatattcacagtggacagacaactgctgtgattacccctcgccaggtgacagtaggattaggccgtaaacgagttaatgctgtggctgcagccaaacatcatactgtgattgctacagagctgggggaattgtttacctggggatcaaatagagagggtcagcttgggtacccttctgttgatacccaaccaacaccaaggcgtgttggttcgctcaagcaaaggataatttcagtagctgctgcaaacaagcactccgctgcagttgctgatactggcgaagtattcacctggggttgcaataaggagggccaactaggatatggcacttcaaactcagcatcaaactgtatcccaagaatggtggagtacttgaaaggaaaagtacttagaggtgtttctgcagcaaagtatcatacaatagtgttaggagctgatggagaggtgttcacttggggccatcgccttgtcaccccacggcgtgtcgtagtagctcgatgccttaagaagggtggaaatacaaatctgaagtttcatcgtatggaacgacttcaagtgatttcagtggctgctggaacaacgcacaatactgctttaacagctgatggtgctcttttctactgggtttcatcagatcctgatctaaaatgccagcagatattttcaatgtgtggaaggaatattgtgaacatctcggctggaaagtactggaccgctgtggctacatcaactggtgatgttttcatgtgggatgcaaagaaacgtaaggacgaaacgccaattttcactcgggtgcatggtgttaagcgagcaacatttgtttgtgttggtgaaacgcacatgcttgtgctctcaagtatataccatcctgagtatccacccaagcctaaaagccaaggcttaaaatccatgttagaatggaacggtggaacagaagagctgggtgaagatatcctgtttgatgatgttcagcccaacagtggtttatcaggaagcagtggtgaaatgagcaaaggtgtgcctagcttgaaaagcctctgtgagaaggttgcagttgagtatttattggagccaaaaaactcaatacagcttcttgaaattgctgattccttggaagctaaggagctcaagaagcattgtgaggatttagctattcgcaacctcgattacattttcacagtgggagcttcttcaattatgaatgcttcttctgaaattcttgtgaacttagagaaattgctagatgagaaatcctcagagccttggagtcagcaccgtcttcccacaatgacagctacctatcctgctgtcattgacagtgatgtagaggaagatgaagcaagagaattccccaagacccgtaaatgtgggaaatctgcatcaaggccatctgcgatgtctagtgatgacagcttccttcagaaagactgcaccgctgaacaagccgtctctaagcagatcagagcacttcgcaagaagctgcaacagattgagattctcgaggctaaacaacttgcaggtcatcagcttgacagtcagcaggtagcgaagctcgagtctagggctgcccttgaaggtgaacttgctgaacttggcattccctcagagatatactcaacttcctctgcttgtccagcagaaggtaggacaaacagaaaacctgaggtttctaagaaacagaagagaaagaacaagcagtcaacacagaccccgtcagtgaaaaatgagcctgggcaacaaatccccattacggaacttcaagttctacaagtcaatgtctctgctgaaaaggaggcgtatgccgctgatccaattaaacctatggaggctgccgcgttcagcaacacaaaggacaccgcttctccaccggagaagaaaccttcccaaccaactccatcaaagaagaagaacagaaaaggcggcctgtcgctgttcctgagcggcgctctcgacgacaccccaaaaccaagcctccctgcccccgctgtgcctgccacaccgaagcccgaaggacccgcctggggcggcgtgaagataaccaagggacccgcttcgcttcgagacatccagaccgagcagagcagaacaaacgagcccgcgtcggccaaggcgaaggaccgccacgagaactcgccggacagcgccggccgcgcgacaaggctctcctcgttcatccccgacgcgcgttccagcccagtagccgtcgtggcgcctgctcgcgcagcggcggcgccttcttccgaaggtgacaggagcacgccgccgtggtcgtcctctgccacctcgcccaacgtgtcgcagccttcgctcagggacatacaacagatgcagcagaggcaccatggcggcgtctcccacagcccgaaaacccagacatcgggcttctgtataccgccccacggcggagcgccagaggccgctggcggtggcggcgtgaaggacaacgtgcccaaccggtggttcaggccggagaccgacgccccgtcctccatccgctccatccagatcgaggagcaggctatgaaggacttcaggcgcttctacagcagcgtgaggatcgtcaagccgcaggtctagtagcactggcggcggcggcggtggcggccttggcggagagtgactgatggcacaacaaccccctttaggctcaccctcccatttgacactggctcgttgtacattcgagtgtacagttggttctgttcgccataggttccttgagctgaacaataaacaaacaccctttgctgctgttgctgctgctttcgcagtgagtggtctcgtttagttgtaacagaagattgtacaggccatgtgagatcaccaccccccggctttggcttaacagtttaacttgagccaatgcttctttttttttttttggcgccaaaatgtctttggttgttccaagcagaggtcataaaaactgtgtggtgcgtctgcacccaggtacccaacatttttagcttcgatcggacatgatctcactttggggctgtagcctagtgc

SEQ ID NO: 67945 - DNA, 4182 bp, Zea Mays
ctcaatttctgttcgcgtataatcgtcggatatctccctctcctcaaaatactcacaacccagagatctcacacccacgaccaccacgagggaaaaaaaacaacaacagaggagagagactagagagagagagagagagagaggagcgttggagtttggaagcagttcctgcgacctgcggccggagccccggggcatattcctcgcccggagatcccgtacccgaccctcccctgataaacagacgcaagcgtcagggagggagggagggacagagagaggtagagagggccggggcgaagggggcaaagatgcgttcttgaggagcctgtgcaggggaggtccaatccagaggccgccattccttttcttttccccccaacctctgcaggctcttcagatccagcaatccggcttgtttcttttgctggttgatttatactctatagtggttctctacttagcatcaagtcttggcatggcaatggcctcgtagctcgcggctctctaataggaataattttactcaaaatgaagctatagcgtcatgctatcttaggttgtttggacagttccttaggatactgaaactgtcttagataatggagatgatgttcactcaaacatttctcccgatagatatacaattgtaattacaccagaactgtacttacaattaagaacaacatcagctgtaacattagtagtaagaaacagttcagatagtgtgaagaagttcatctgttggcctgctatttcaggcacatcaaagcagtcagctgtccgcaaaccttctcctggaagctctcttaaggatctgtgccttgtttccaaacaagggtcaatagctgaagtagaatctgctttggccttgttgaaaaaaagtggtgggaacattgatggtagaaatgcatttggtcttagtgccctccaccttgcaacatggagaaatcatctacccattgtgaggcgactcctagatgctggcgctgatccagatgcaagggatggagaatctggctggagtagcctgcatagagcacttcattttggtcacctatgtattgctggtgttcttttacagtttggtgcttccctcgctttggaggacactaagggccgtacacctgttgaccttatctcctgtccagtatcacaggccaatggagattttccagatgcagtggacagacaactgctgtgattacccctcgccaggtgacagtaggattaggccgtaaacgagttaatgctgtggctgcagccaaacatcatactgtgattgctacagagctgggggaattgtttacctggggatcaaatagagagggtcagcttgggtacccttctgttgatacccaaccaacaccaaggcgtgttggttcgctcaagcaaaggataatttcagtagctgctgcaaacaagcactccgctgcagttgctgatactggcgaagtattcacctggggttgcaataaggagggccaactaggatatggcacttcaaactcagcatcaaactgtatcccaagaatggtggagtacttgaaaggaaaagtacttagaggtgtttctgcagcaaagtatcatacaatagtgttaggagctgatggagaggtgttcacttggggccatcgccttgtcaccccacggcgtgtcgtagtagctcgatgccttaagaagggtggaaatacaaatctgaagtttcatcgtatggaacgacttcaagtgatttcagtggctgctggaacaacgcacaatactgctttaacagctgatggtgctcttttctactgggtttcatcagatcctgatctaaaatgccagcagatattttcaatgtgtggaaggaatattgtgaacatctcggctggaaagtactggaccgctgtggctacatcaactggtgatgttttcatgtgggatgcaaagaaacgtaaggacgaaacgccaattttcactcgggtgcatggtgttaagcgagcaacatttgtttgtgttggtgaaacgcacatgcttgtgctctcaagtatataccatcctgagtatccacccaagcctaaaagccaaggcttaaaatccatgttagaatggaacggtggaacagaagagctgggtgaagatatcctgtttgatgatgttcagcccaacagtggtttatcaggaagcagtggtgaaatgagcaaaggtgtgcctagcttgaaaagcctctgtgagaaggttgcagttgagtatttattggagccaaaaaactcaatacagcttcttgaaattgctgattccttggaagctaaggagctcaagaagcattgtgaggatttagctattcgcaacctcgattacattttcacagtgggagcttcttcaattatgaatgcttcttctgaaattcttgtgaacttagagaaattgctagatgagaaatcctcagagccttggagtcagcaccgtcttcccacaatgacagctacctatcctgctgtcattgacagtgatgtagaggaagatgaagcaagagaattccccaagacccgtaaatgtgggaaatctgcatcaaggccatctgcgatgtctagtgatgacagcttccttcagaaagactgcaccgctgaacaagccgtctctaagcagatcagagcacttcgcaagaagctgcaacagattgagattctcgaggctaaacaacttgcaggtcatcagcttgacagtcagcaggtagcgaagctcgagtctagggctgcccttgaaggtgaacttgctgaacttggcattccctcagagatatactcaacttcctctgcttgtccagcagaaggtaggacaaacagaaaacctgaggtttctaagaaacagaagagaaagaacaagcagtcaacacagaccccgtcagtgaaaaatgagcctgggcaacaaatccccattacggaacttcaagttctacaagtcaatgtctctgctgaaaaggaggcgtatgccgctgatccaattaaacctatggaggctgccgcgttcagcaacacaaaggacaccgcttctccaccggagaagaaaccttcccaaccaactccatcaaagaagaagaacagaaaaggcggcctgtcgctgttcctgagcggcgctctcgacgacaccccaaaaccaagcctccctgcccccgctgtgcctgccacaccgaagcccgaaggacccgcctggggcggcgtgaagataaccaagggacccgcttcgcttcgagacatccagaccgagcagagcagaacaaacgagcccgcgtcggccaaggcgaaggaccgccacgagaactcgccggacagcgccggccgcgcgacaaggctctcctcgttcatccccgacgcgcgttccagcccagtagccgtcgtggcgcctgctcgcgcagcggcggcgccttcttccgaaggtgacaggagcacgccgccgtggtcgtcctctgccacctcgcccaacgtgtcgcagccttcgctcagggacatacaacagatgcagcagaggcaccatggcggcgtctcccacagcccgaaaacccagacatcgggcttctgtataccgccccacggcggagcgccagaggccgctggcggtggcggcgtgaaggacaacgtgcccaaccggtggttcaggccggagaccgacgccccgtcctccatccgctccatccagatcgaggagcaggctatgaaggacttcaggcgcttctacagcagcgtgaggatcgtcaagccgcaggtctagtagcactggcggcggcggcggtggcggccttggcggagagtgactgatggcacaacaaccccctttaggctcaccctcccatttgacactggctcgttgtacattcgagtgtacagttggttctgttcgccataggttccttgagctgaacaataaacaaacaccctttgctgctgttgctgctgctttcgcagtgagtggtctcgtttagttgtaacagaagattgtacaggccatgtgagatcaccaccccccggctttggcttaacagtttaacttgagccaatgcttctttttttttttttggcgccaaaatgtctttggttgttccaagcagaggtcataaaaactgtgtggtgcgtctgcacccaggtacccaacatttttagcttcgatcggacatgatctcactttggggctgtagcctagtgc

SEQ ID NO: 67946 - DNA, 4375 bp, Zea Mays
ctcaatttctgttcgcgtataatcgtcggatatctccctctcctcaaaatactcacaacccagagatctcacacccacgaccaccacgagggaaaaaaaacaacaacagaggagagagactagagagagagagagagagagaggagcgttggagtttggaagcagttcctgcgacctgcggccggagccccggggcatattcctcgcccggagatcccgtacccgaccctcccctgataaacagacgcaagcgtcagggagggagggagggacagagagaggtagagagggccggggcgaagggggcaaagatgcgttcttgaggagcctgtgcaggggaggtccaatccagaggccgccattccttttcttttccccccaacctctgcaggctcttcagatccagcaatccggcttgtttcttttgctggttgatttatactctatagtggttctctacttagcatcaagtcttggcatggcaatggcctcgtagctcgcggctctctaataggaataattttactcaaaatgaagctatagcgtcatgctatcttaggttgtttggacagttccttaggatactgaaactgtcttagataatggagatgatgttcactcaaacatttctcccgatagatatacaattgtaattacaccagaactgtacttacaattaagaacaacatcagctgtaacattagtagtaagaaacagttcagatagtgtgaagaagttcatctgttggcctgctatttcagatactgtgtgtgttcctgaaacttcatggagacttccatatctccaccaggcacatcaaagcagtcagctgtccgcaaaccttctcctggaagctctcttaaggatctgtgccttgtttccaaacaagggtcaatagctgaagtagaatctgctttggccttgttgaaaaaaagtggtgggaacattgatggtagaaatgcatttggtcttagtgccctccaccttgcaacatggagaaatcatctacccattgtgaggcgactcctagatgctggcgctgatccagatgcaagggatggagaatctggctggagtagcctgcatagagcacttcattttggtcacctatgtattgctggtgttcttttacagtttggtgcttccctcgctttggaggacactaagggccgtacacctgttgaccttatctcctgtccagtatcacaggccaatggagattttccagatgcagttgcaacggaagtcttcagttggggaagtgggacaaattatcagctgggaactggcaacgcccacatacaaaaactaccatgcaaagtagaagctttgcatggatcatatatcaaaacagttgctgcatcaaagtttcacagtgtagcagttagttctaatggtgaactatacacatggggatttggtcgaggtggtcgtcttggtcatccagatattcacagccaaacatcatactgtgattgctacagagctgggggaattgtttacctggggatcaaatagagagggtcagcttgggtacccttctgttgatacccaaccaacaccaaggcgtgttggttcgctcaagcaaaggataatttcagtagctgctgcaaacaagcactccgctgcagttgctgatactggcgaagtattcacctggggttgcaataaggagggccaactaggatatggcacttcaaactcagcatcaaactgtatcccaagaatggtggagtacttgaaaggaaaagtacttagaggtgtttctgcagcaaagtatcatacaatagtgttaggagctgatggagaggtgttcacttggggccatcgccttgtcaccccacggcgtgtcgtagtagctcgatgccttaagaagggtggaaatacaaatctgaagtttcatcgtatggaacgacttcaagtgatttcagtggctgctggaacaacgcacaatactgctttaacagctgatggtgctcttttctactgggtttcatcagatcctgatctaaaatgccagcagatattttcaatgtgtggaaggaatattgtgaacatctcggctggaaagtactggaccgctgtggctacatcaactggtgatgttttcatgtgggatgcaaagaaacgtaaggacgaaacgccaattttcactcgggtgcatggtgttaagcgagcaacatttgtttgtgttggtgaaacgcacatgcttgtgctctcaagtatataccatcctgagtatccacccaagcctaaaagccaaggcttaaaatccatgttagaatggaacggtggaacagaagagctgggtgaagatatcctgtttgatgatgttcagcccaacagtggtttatcaggaagcagtggtgaaatgagcaaaggtgtgcctagcttgaaaagcctctgtgagaaggttgcagttgagtatttattggagccaaaaaactcaatacagcttcttgaaattgctgattccttggaagctaaggagctcaagaagcattgtgaggatttagctattcgcaacctcgattacattttcacagtgggagcttcttcaattatgaatgcttcttctgaaattcttgtgaacttagagaaattgctagatgagaaatcctcagagccttggagtcagcaccgtcttcccacaatgacagctacctatcctgctgtcattgacagtgatgtagaggaagatgaagcaagagaattccccaagacccgtaaatgtgggaaatctgcatcaaggccatctgcgatgtctagtgatgacagcttccttcagaaagactgcaccgctgaacaagccgtctctaagcagatcagagcacttcgcaagaagctgcaacagattgagattctcgaggctaaacaacttgcaggtcatcagcttgacagtcagcaggtagcgaagctcgagtctagggctgcccttgaaggtgaacttgctgaacttggcattccctcagagatatactcaacttcctctgcttgtccagcagaaggtaggacaaacagaaaacctgaggtttctaagaaacagaagagaaagaacaagcagtcaacacagaccccgtcagtgaaaaatgagcctgggcaacaaatccccattacggaacttcaagttctacaagtcaatgtctctgctgaaaaggaggcgtatgccgctgatccaattaaacctatggaggctgccgcgttcagcaacacaaaggacaccgcttctccaccggagaagaaaccttcccaaccaactccatcaaagaagaagaacagaaaaggcggcctgtcgctgttcctgagcggcgctctcgacgacaccccaaaaccaagcctccctgcccccgctgtgcctgccacaccgaagcccgaaggacccgcctggggcggcgtgaagataaccaagggacccgcttcgcttcgagacatccagaccgagcagagcagaacaaacgagcccgcgtcggccaaggcgaaggaccgccacgagaactcgccggacagcgccggccgcgcgacaaggctctcctcgttcatccccgacgcgcgttccagcccagtagccgtcgtggcgcctgctcgcgcagcggcggcgccttcttccgaaggtgacaggagcacgccgccgtggtcgtcctctgccacctcgcccaacgtgtcgcagccttcgctcagggacatacaacagatgcagcagaggcaccatggcggcgtctcccacagcccgaaaacccagacatcgggcttctgtataccgccccacggcggagcgccagaggccgctggcggtggcggcgtgaaggacaacgtgcccaaccggtggttcaggccggagaccgacgccccgtcctccatccgctccatccagatcgaggagcaggctatgaaggacttcaggcgcttctacagcagcgtgaggatcgtcaagccgcaggtctagtagcactggcggcggcggcggtggcggccttggcggagagtgactgatggcacaacaaccccctttaggctcaccctcccatttgacactggctcgttgtacattcgagtgtacagttggttctgttcgccataggttccttgagctgaacaataaacaaacaccctttgctgctgttgctgctgctttcgcagtgagtggtctcgtttagttgtaacagaagattgtacaggccatgtgagatcaccaccccccggctttggcttaacagtttaacttgagccaatgcttctttttttttttttggcgccaaaatgtctttggttgttccaagcagaggtcataaaaactgtgtggtgcgtctgcacccaggtacccaacatttttagcttcgatcggacatgatctcactttggggctgtagcctagtgc

SEQ ID NO: 67947 - DNA, 4453 bp, Zea Mays
ctcaatttctgttcgcgtataatcgtcggatatctccctctcctcaaaatactcacaacccagagatctcacacccacgaccaccacgagggaaaaaaaacaacaacagaggagagagactagagagagagagagagagagaggagcgttggagtttggaagcagttcctgcgacctgcggccggagccccggggcatattcctcgcccggagatcccgtacccgaccctcccctgataaacagacgcaagcgtcagggagggagggagggacagagagaggtagagagggccggggcgaagggggcaaagatgcgttcttgaggagcctgtgcaggggaggtccaatccagaggccgccattccttttcttttccccccaacctctgcaggctcttcagatccagcaatccggcttgtttcttttgctggttgatttatactctatagtggttctctacttagcatcaagtcttggcatggcaatggcctcgtagctcgcggctctctaataggaataattttactcaaaatgaagctatagcgtcatgctatcttaggttgtttggacagttccttaggatactgaaactgtcttagataatggagatgatgttcactcaaacatttctcccgatagatatacaattgtaattacaccagaactgtacttacaattaagaacaacatcagctgtaacattagtagtaagaaacagttcagatagtgtgaagaagttcatctgttggcctgctatttcagatactgtgtgtgttcctgaaacttcatggagacttccatatctccaccaggcacatcaaagcagtcagctgtccgcaaaccttctcctggaagctctcttaaggatctgtgccttgtttccaaacaagggtcaatagctgaagtagaatctgctttggccttgttgaaaaaaagtggtgggaacattgatggtagaaatgcatttggtcttagtgccctccaccttgcaacatggagaaatcatctacccattgtgaggcgactcctagatgctggcgctgatccagatgcaagggatggagaatctggctggagtagcctgcatagagcacttcattttggtcacctatgtattgctggtgttcttttacagtttggtgcttccctcgctttggaggacactaagggccgtacacctgttgaccttatctcctgtccagtatcacaggccaatggagattttccagatgcagttgcaacggaagtcttcagttggggaagtgggacaaattatcagctgggaactggcaacgcccacatacaaaaactaccatgcaaagtagaagctttgcatggatcatatatcaaaacagttgctgcatcaaagtttcacagtgtagcagttagttctaatggtgaactatacacatggggatttggtcgaggtggtcgtcttggtcatccagatattcacagtggacagacaactgctgtgattacccctcgccaggtgacagtaggattaggccgtaaacgagttaatgctgtggctgcagccaaacatcatactgtgattgctacagagctgggggaattgtttacctggggatcaaatagagagggtcagcttgggtacccttctgttgatacccaaccaacaccaaggcgtgttggttcgctcaagcaaaggataatttcagtagctgctgcaaacaagcactccgctgcagttgctgatactggcgaagtattcacctggggttgcaataaggagggccaactaggatatggcacttcaaactcagcatcaaactgtatcccaagaatggtggagtacttgaaaggaaaagtacttagaggtgtttctgcagcaaagtatcatacaatagtgttaggagctgatggagaggtgttcacttggggccatcgccttgtcaccccacggcgtgtcgtagtagctcgatgccttaagaagggtggaaatacaaatctgaagtttcatcgtatggaacgacttcaagtgatttcagtggctgctggaacaacgcacaatactgctttaacagctgatggtgctcttttctactgggtttcatcagatcctgatctaaaatgccagcagatattttcaatgtgtggaaggaatattgtgaacatctcggctggaaagtactggaccgctgtggctacatcaactggtgatgttttcatgtgggatgcaaagaaacgtaaggacgaaacgccaattttcactcgggtgcatggtgttaagcgagcaacatttgtttgtgttggtgaaacgcacatgcttgtgctctcaagtatataccatcctgagtatccacccaagcctaaaagccaaggcttaaaatccatgttagaatggaacggtggaacagaagagctgggtgaagatatcctgtttgatgatgttcagcccaacagtggtttatcaggaagcagtggtgaaatgagcaaaggtgtgcctagcttgaaaagcctctgtgagaaggttgcagttgagtatttattggagccaaaaaactcaatacagcttcttgaaattgctgattccttggaagctaaggagctcaagaagcattgtgaggatttagctattcgcaacctcgattacattttcacagtgggagcttcttcaattatgaatgcttcttctgaaattcttgtgaacttagagaaattgctagatgagaaatcctcagagccttggagtcagcaccgtcttcccacaatgacagctacctatcctgctgtcattgacagtgatgtagaggaagatgaagcaagagaattccccaagacccgtaaatgtgggaaatctgcatcaaggccatctgcgatgtctagtgatgacagcttccttcagaaagactgcaccgctgaacaagccgtctctaagcagatcagagcacttcgcaagaagctgcaacagattgagattctcgaggctaaacaacttgcaggtcatcagcttgacagtcagcaggtagcgaagctcgagtctagggctgcccttgaaggtgaacttgctgaacttggcattccctcagagatatactcaacttcctctgcttgtccagcagaaggtaggacaaacagaaaacctgaggtttctaagaaacagaagagaaagaacaagcagtcaacacagaccccgtcagtgaaaaatgagcctgggcaacaaatccccattacggaacttcaagttctacaagtcaatgtctctgctgaaaaggaggcgtatgccgctgatccaattaaacctatggaggctgccgcgttcagcaacacaaaggacaccgcttctccaccggagaagaaaccttcccaaccaactccatcaaagaagaagaacagaaaaggcggcctgtcgctgttcctgagcggcgctctcgacgacaccccaaaaccaagcctccctgcccccgctgtgcctgccacaccgaagcccgaaggacccgcctggggcggcgtgaagataaccaagggacccgcttcgcttcgagacatccagaccgagcagagcagaacaaacgagcccgcgtcggccaaggcgaaggaccgccacgagaactcgccggacagcgccggccgcgcgacaaggctctcctcgttcatccccgacgcgcgttccagcccagtagccgtcgtggcgcctgctcgcgcagcggcggcgccttcttccgaaggtgacaggagcacgccgccgtggtcgtcctctgccacctcgcccaacgtgtcgcagccttcgctcagggacatacaacagatgcagcaggcaccatggcggcgtctcccacagcccgaaaacccagacatcgggcttctgtataccgccccacggcggagcgccagaggccgctggcggtggcggcgtgaaggacaacgtgcccaaccggtggttcaggccggagaccgacgccccgtcctccatccgctccatccagatcgaggagcaggctatgaaggacttcaggcgcttctacagcagcgtgaggatcgtcaagccgcaggtctagtagcactggcggcggcggcggtggcggccttggcggagagtgactgatggcacaacaaccccctttaggctcaccctcccatttgacactggctcgttgtacattcgagtgtacagttggttctgttcgccataggttccttgagctgaacaataaacaaacaccctttgctgctgttgctgctgctttcgcagtgagtggtctcgtttagttgtaacagaagattgtacaggccatgtgagatcaccaccccccggctttggcttaacagtttaacttgagccaatgcttctttttttttttttggcgccaaaatgtctttggttgttccaagcagaggtcataaaaactgtgtggtgcgtctgcacccaggtacccaacatttttagcttcgatcggacatgatctcactttggggctgtagcctagtgc

SEQ ID NO: 67948 - DNA, 1497 bp, Zea Mays
cagtgttctttcgtagaggagtgaagaggcctatctataactcgacgcgctagggttttccatcaccgccgccgccgacgcatccaaacccaaatcaagccaccaccctctcctcctcctcagcggcgagcaccaccagcaacagcgagacacgatgaggccgatcttgatgaagggccacgagcgcccgctcacgttcctgcgctacaaccgcgacggggacctcctcttctcctgcgccaaggaccacacccccacggtctggtacgccgacaacggcgaccgcctcggcacctaccgcggccacaacggcgctgtctggacctgcgacgtctcccgcgactcggcgcgcctcatcaccggatccgccgaccagaccgccaagctctgggatgtcagcacggggaaggagctcttcagcttccgcttcgacgcgcccgccaggtccgtcgagttcgccatcggggacgcgctcgccgtcgtcaccaccgacaacttcatggaccacgtccccaccgtccaggtcaagcgcatcgccgaggacatcgacgaccagacggaggagtctgcactcgtcatcaccggcatcaagggaaggatcaacagggccgtttgggggccgctcaacaggaccatcatcactgccggagaggatgccaccgttcgcatttgggattcagagactggacaacttctgaaagagtctgacaaggaatccggacatcagaagaccatttcatcattgtcaaaatccctagattggtcacattttattactggctccttggataaatctgccaagctatgggatacaagaacgctgaccctgatcaagacatatgtcacagagagacctgttaatgctgttgacatctctcccactcatgatactgaggtggtcaggatgcaatgaatgtgactatgactgaccgccgtgctggtaaatttgaggctaaattctaccacaagattttgcaagaggaaattggtggtgttaaagggcattttgggccaattaatgctttggcatttaatcctgatgggcggagcttttcaagtggtggtgaagatggatatgtaaggttgcatcattttgattctgactactttagcatcaaaatgtagataaagaacagacgaatcagaggctgtttgatgaccaaccggttcagtttcttggttcagatgttagatgttgctggttggccatggcgcatgtagagcaggctcagatcctaggtttttggtctgcttgtttgatgatgttgctctggataagcagctttttggtctgcttgaggaatttgtacacacttggcaatgaaaagatccttggactgagttgtcattctcgctcatgtttccagttttgtttcgatttgtagtgctcacatttcaaaacctgtgttttaactctacatatgaggctgctgtattactgcattggctaaacggctaaacctactacgttccccacttaaatgactgaacgatcaa

SEQ ID NO: 67949 - DNA, 1824 bp, Zea Mays
ggacgccagtgttctttcgtagaggagtgaagaggcctatctataactcgacgcgctagggttttccatcaccgccgccgccgacgcatccaaacccaaatcaagccaccaccctctcctcctcctcagcggcgagcaccaccagcaacagcgagacacgatgaggccgatcttgatgaagggccacgagcgcccgctcacgttcctgcgctacaaccgcgacggggacctcctcttctcctgcgccaaggaccacacccccacggtctggtacgccgacaacggcgaccgcctcggcacctaccgcggccacaacggcgctgtctggacctgcgacgtctcccgcgactcggcgcgcctcatcaccggatccgccgaccagaccgccaagctctgggatgtcagcacggggaaggagctcttcagcttccgcttcgacgcgcccgccaggtccgtcgagttcgccatcggggacgcgctcgccgtcgtcaccaccgacaacttcatggaccacgtccccaccgtccaggtcaagcgcatcgccgaggacatcgacgaccagacggaggagtctgcactcgtcatcaccggcatcaagggaaggatcaacagggccgtttgggggccgctcaacaggaccatcatcactgccggagaggatgccaccgttcgcatttgggattcagagactggacaacttctgaaagagtctgacaaggaatccggacatcagaagaccatttcatcattgtcaaaatccctagattggtcacattttattactggctccttggataaatctgccaagctatgggatacaagaacgctgaccctgatcaagacatatgtcacagagagacctgttaatgctgttgacatctctcccactcatgatactgtggttctaggaggtggtcaggatgcaatgaatgtgactatgactgaccgccgtgctggtaaatttgaggctaaattctaccacaagattttgcaagaggaaattggtggtgttaaagggcattttgggccaattaatgctttggcatttaatcctgatgggcggagcttttcaagtggtggtgaagatggatatgtaaggttgcatcattttgattctgactactttagcatcaaaatgtagataaagaacagacgaatcagaggtaccacttcagctctcagctgttttattaagattggtttgttaattttgttatcgcttgctacctgtgtactgttgacatggcatattgtttttcttgcaacccgaccttttggtttgactttttaggtgggttttctggttattatacacgtcagatgtatctatggcatgttctaacagattgacaatgttgaaacatcaatgatgtctatcctaagaattccatttcttgcatccagaccgaaagccctgttgcttatgtttttaggtcgtgtttgttttaaccttcatccttcaattccttttcaggctgtttgatgaccaaccggttcagtttcttggttcagatgttagatgttgctggttggccatggcgcatgtagagcaggctcagatcctaggtttttggtctgcttgtttgatgatgttgctctggataagcagctttttggtctgcttgaggaatttgtacacacttggcaatgaaaagatccttggactgagttgtcattctcgctcatgtttccagttttgtttcgatttgtagtgctcacatttcaaaacctgtgttttaactctacatatgaggctgctgtattactgcattggctaaacggctaaacctactacgttccccacttaaatgactgaacgatcaa

SEQ ID NO: 67950 - DNA, 1087 bp, Zea Mays
ggacgccagtgttctttcgtagaggagtgaagaggcctatctataactcgacgcgctagggttttccatcaccgccgccgccgacgcatccaaacccaaatcaagccaccaccctctcctcctcctcagcggcgagcaccaccagcaacagcgagacacgatgaggccgatcttgatgaagggccacgagcgcccgctcacgttcctgcgctacaaccgcgacggggacctcctcttctcctgcgccaaggaccacacccccacggtctggtacgccgacaacggcgaccgcctcggcacctaccgcggccacaacggcgctgtctggacctgcgacgtctcccgcgactcggcgcgcctcatcaccggatccgccgaccagaccgccaagctctgggatgtcagcacggggaaggagctcttcagcttccgcttcgacgcgcccgccaggtccgtcgagttcgccatcggggacgcgctcgccgtcgtcaccaccgacaacttcatggaccacgtccccaccgtccaggtcaagcgcatcgccgaggacatcgacgaccagacggaggagtctgcactcgtcatcaccggcatcaagggaaggatcaacagggccgtttgggggccgctcaacaggaccatcatcactgccggagaggatgccaccgttcgcatttgggattcagagactggacaacttctgaaagagtctgacaaggaatccggacatcagaagaccatttcatcattgtcaaaatccctagattggtcacattttattactggctccttggataaatctgccaagctatgggatacaagaacgctgaccctgatcaagacatatgtcacagagagacctgttaatgctgttgacatctctcccactcatgatactgtggttctaggaggtggtcaggatgcaatgaatgtgactatgactgaccgccgtgctggtaaatttgaggctaaattctaccacaagattttgcaagaggaaattggtggtgttaaagggcattttgggccaattaatgctttggcatttaatcctgatgggcggagctcagtgattgtagccaattac

SEQ ID NO: 67951 - DNA, 2100 bp, Zea Mays
aatcttgccgctctcttccctgatctttcctctcccttccgcgcgcgtcgttcttcttatctgccgctcgccgctctgctgaggaagaaaaatcgcgccgctccagccgtcgttatccccagctgagcttcttctttcccccagcacgccgcacttctctgctccctccagtccacagaagctcccagccgtggcgttctctctgctcggccgcgcccctgcgcttgccgagctgctctctggcgctcgcccatggccacgcctgcccctgctcgcgtccttcagctccagcgctccctcggctcgcctggccggagcgccctgcgctctgctcgcccatcctccgctcctatctccatggccgtggtgcttctccatggctgtcgtcgcccaaatccagaaccttgccgagttcgtcctccactcggctcatggcgcttggcctcagctcggccttacctcctggctattgtataccgctctgctggtggctgccgtcaacctggagcaccgcctcgagcacccgttgccccgcgctctgttctcccggcgagtcgcgcccaggctgcactgagcccttccctggtcgcctgctggcctgctaccgcgtccctggctctagctctgttgccgcgcacgctccctgctcggtgtccctctccactcgtctgggtactccttcgctgctcgtcgtgcacgtgctggccaacgttcggtgtctggctcgccgcgcgcccagcttcttgcgcgccatggcggccgtcgtcgtgttttcctgcgcgtggcgttcctccagctcgcccatggatgcgcgctccattttccccaaccgcgcatccctctgttggccagagttccctggtccgaccccgtgctgtgctcgcctcggccggccatgttggccgcgcagacttcctggccgcgggcagttctggcctatgccgccatcgcgcccgggattttggtgcgcgtccctgcttcccgatagcgccgaccgccgtcgttctctgcctgtgacctccggccgtgttggtcgtggttgctatcttcagctcaccggcatgctgctaggactcgcgtgcgccatggctctgattgccacgctctcgcgcctccctgggctccttttgtcgtgtccagttctagtcacggttatctgctgaaccatcgtcacgccgggttgcccctgattcgtggagttcaccggctttcccgtacacagtcacggatgtcatcacccggtccttgtctcttgccgagctcatcaccaccgtgagactctgcgttgctgtactcggccgcgtctcctagtcatcttatgcgtactcatctccaaatttgaccgtgcggccgacggtcgaccatacagttgcctcacagcatttcgacaccttgtcgtcactcggcaacgtgtttgctcgtcaccacaccatcttcagcatcatggttctgtaagactccgcgcactcgtcaacacccggctatcagtctccaccacgcggcgccacttcggacctctagcctcgtcctactctgctccagcttgcgtctaagcctagggtcaagttcgtacgccacctgctcgataaaataaagtgaactgcgctcgatatggaaagatggagttagatgaagaagaaagcgaagccgcacaactctcgtctaatgttcgacgacaagcccgagccaagacttatcagcattcttacgagtattgagtcacatttgatgctggtacgttaattaatcgagcgatgcggaagaagaaccaagtcgaccccaagcgcgggctaatatgccagctgaagctgatgaatcaacctgaagatggttaaatcaagcaagtgcttggtcgaagaatactcgtcaagcgggcgtcacctaacaacactaacctagtgttactcaggcaagccccggtgcatgcaaccctttccttgtgttttaaaatacttttcgcacacttaagtctagtgaaatgtgcattaagttcataggagttgcttggaaccctttgatgcattgctttccttgatatccatacctttatagatacttcggtgaagtatcaaaatatgatttacaaaaatgcttagcctt

SEQ ID NO: 67952 - DNA, 2084 bp, Zea Mays
aatcttgccgctctcttccctgatctttcctctcccttccgcgcgcgtcgttcttcttatctgccgctcgccgctctgctgaggaagaaaaatcgcgccgctccagccgtcgttatccccagctgagcttcttctttcccccagcacgccgcacttctctgctccctccagtccacagaagctcccagccgtggcgttctctctgctcggccgcgcccctgcgcttgccgagctgctctctggcgctcgcccatggccacgcctgcccctgctcgcgtccttcagctccagcgctccctcggctcgcctggccggagcgccctgcgctctgctcgcccatcctccgctcctatctccatggccgtggtgcttctccatggctgtcgtcgcccaaatccagaaccttgccgagttcgtcctccactcggctcatggcgcttggcctcagctcggccttacctcctggctattgtataccgctctgctggtggctgccgtcaacctggagcaccgcctcgagcacccgttgccccgcgctctgttctcccggcgagtcgcgcccaggctgcactgagcccttccctggtcgcctgctggcctgctaccgcgtccctggctctagctctgttgccgcgcacgctccctgctcggtgtccctctccactcgtctgggtactccttcgctgctcgtcgtgcacgtgctggccaacgttcggtgtctggctcgccgcgcgcccagcttcttgcgcgccatggcggccgtcgtcgtgttttcctgcgcgtggcgttcctccagctcgcccatggatgcgcgctccattttccccaaccgcgcatccctctgttggccagagttccctggtccgaccccgtgctgtgctcgcctcggccggccatgttggccgcgcagacttcctggccgcgggcagttctggcctatgccgccatcgcgcccgggattttggtgcgcgtccctgcttcccgatagcgccgaccgccgtcgttctctgcctgtgacctccggccgtgttggtcgtggttgctatcttcagctcaccggcatgctgctaggactcgcgtgcgccatggctctgattgccacgctctcgcgcctccctgggctccttttgtcgtgtccagttctagtcacggttatctgctgaaccatcgtcacgccgggttgcccctgattcgtggagttcaccggctttcccgtacacagtcacggatgtcatcacccggtccttgtctcttgccgagctcatcaccaccgtgagactctgcgttgctgtactcggccgcgtctcctagtcatcttatgcgtactcatctccaaatttgaccgtgcggccgacggtcgaccatacagttgcctcacagcatttcgacaccttgtcgtcactcggcaacgtgtttgctcgtcaccacaccatcttcagcatcatggttctgtaagactccgcgcactcgtcaacacccggctatcagtctccaccacgcggcgccacttcggacctctagcctcgtcctactctgctccagcttgcgtctaagcctagggtcaagttcgtacgccacctgctcgataaaataaagtgaactgatggagttagatgaagaagaaagcgaagccgcacaactctcgtctaatgttcgacgacaagcccgagccaagacttatcagcattcttacgagtattgagtcacatttgatgctggtacgttaattaatcgagcgatgcggaagaagaaccaagtcgaccccaagcgcgggctaatatgccagctgaagctgatgaatcaacctgaagatggttaaatcaagcaagtgcttggtcgaagaatactcgtcaagcgggcgtcacctaacaacactaacctagtgttactcaggcaagccccggtgcatgcaaccctttccttgtgttttaaaatacttttcgcacacttaagtctagtgaaatgtgcattaagttcataggagttgcttggaaccctttgatgcattgctttccttgatatccatacctttatagatacttcggtgaagtatcaaaatatgatttacaaaaatgcttagcctt

SEQ ID NO: 67953 - DNA, 879 bp, Zea Mays
cagctcctccccttcctttcaatcctgctggttgcagcccctccttttcttcgattttgcagttcaacggcgaccggctgaccgccatctgccgggattggtccggtgtggaccctcttgccatctctggcgctgctgcagggcgcccaaccagcagccagggcccactggtggggcacccgtgcacgttcaagcttaccttgcagtttacagaagattacccaaacaagccaccaactgttcgatttgtctctaggatgtttcatccaaatatatatgctgatggaagcatctgtttggatatcctacagaaccagtggagtcctatatatgatgttgctgcaattttaacttctatccagtccctgctgtgtgatccaaacccaaactcccctgcaaactcagaagcagcaagactgttcagcgagaacaagcgggagtacaaccgcaaagtccgtgagatcgtggagcagagctggacagccgactagtgcataaggatgctcgtcgtgcccgataggggcacaataagaaagcgtgaaaaaaaaaacacacccactccttgtgtttctggttcgccaggcttgtcgaaacattgaagaaccccagtgattggtttgtagtctgtcgtcgtcgttctgcccccatcaagagccccggttgctcatggtggtggctgtcgtaatgtagcggttgttgacctatcttctcatgaattgaaaggatcctgcccatgtacaaaaattatagcgtgggaatggttgtttgacggaccgtgttgctcttgctttgtgggttgagtttgacagggacagagcacactcaacttggaacagcaaggcagacaaggtcgatctcgaagtgagatccgatttttgg

SEQ ID NO: 67954 - DNA, 2016 bp, Zea Mays
gaattccccaatccccgccttcctcggttccctcaccgcgaaccctaaccctagtccaccccgctcccatggacgaggatgctggcggcgcctcgccgccgccggtgccactggctcacgtgccccctcttcagcaacccaccaccgccgccccctcgcatcgggacatggcggcgtcccccaccagctcgcgctccgtgacggagacggtgaacggctcccaccgcttcgtgatccagggctactcgctcgccaagggcatgggcgtggggaagcacatcgccagcgagaccttctccgtgggcggataccagtgggcggtctacttctaccccgacgggaagaaccccgaggacaactccgtctacgtctccgtcttcatcgccctcgcttccgatggcaccgacgtgcgtgccctcttcgagctcacgctccttgatcagagcggcaagggcaagcacaaggtccactcccactttgaccgctccatggagtccgggccgtacaccctcaagtaccgcggatccatgtggggttacaaacgattctttcggcgaactgcccttgaattatcagactatctcaaagatgattgtctgaaaataaattgcactgtgggagttgtagtgtcaactatcgattactccataccgcactctatccatgttccagactcagacatcggctatgattttggttcactgttggacagtcaggagggtgctgatgtcattcttaatgtgggaggagagaggtttcatgcccataagttagtgttggctgcacggtctcatgtattcggatctcaattttttgatgatgaatctgatggagagaagagtgaggttaatgagactgatgaactaaaagagttttctattgatgatatggagccaaatgttttcaaggcaatgcttcacttcatctatagagatacccttgttgatgatgatgagttgggcgcgtcaagctctgatggttctatctttgatactccggcagctaagttgttggctgcagccgataagtatcacttagcaagactaaagtcgctatgtgaatcttacctgtgcaagggcatatcagtggcctcagttgcgagtacgttagcattggctgataggcaccatgccatggagcttaaagctgtttgcctaaaatttgctgctgaaaatctttcagggtgtgaggaccagtgcagcagtgttgggaagagccagagcgtttgtgggcagctctcggacggtggcgattccagttgccgcagggttaggcaaagaacctgaggtcaacccagaactgacatggttagccagctcttgctctgtaaatgacgatggcaatcatctgtatgtgaagaaaaaacaatttgaaggagctgtaactagctgtatctcatcatgctccttacatcttacctgccgtcttgtttgtaactagttgactgtttggtcatgagcagttactgaatcgatgtgtagacagccctgcaaatgctcacgagtcaacgataaacatggtggccttgtgtcttggcaactggtgtttgcagcaggcgggccagcagctgtctgctactaatatggatccgttgattttgttgtattcttctttcgactggaaggtatcataagtcaattaggaggtgattcttatatgtattcgttatgctgcaaaagtgaaggtgacaatatttttggtttattggcaagtacatggaatttacatttttgttgagatggttcgtagatggagtaattttgctgtaaagatatagtggtgacaagttttttttgtttgtttggattttttacatttctgttcgcaagtatcgtcatctgtcaatgttgagaggtgatgatatataggattgtcctttggtggcctccacgagaggtttgtttttttccttgtattttggaccgttttttcttttattaatataatgatatgttcaaggaatgataacatatttgttgacatgtaaatttgttacagacgggtagtaaatgttca

SEQ ID NO: 67955 - DNA, 1998 bp, Zea Mays
cgggacacggctacggcagaaaagttagcaacaacaaaccagcggagctcgaaatcgaattccccaatccccgccttcctcggttccctcaccgcgaaccctaaccctagtccaccccgctcccatggacgaggatgctggcggcgcctcgccgccgccggtgccactggctcacgtgccccctcttcagcaacccaccaccgccgccccctcgcatcgggacatggcggcgtcccccaccagctcgcgctccgtgacggagacggtgaacggctcccaccgcttcgtgatccagggctactcgctcgccaagggcatgggcgtggggaagcacatcgccagcgagaccttctccgtgggcggataccagtgggcggtctacttctaccccgacgggaagaaccccgaggacaactccgtctacgtctccgtcttcatcgccctcgcttccgatggcaccgacgtgcgtgccctcttcgagctcacgctccttgatcagagcggcaagggcaagcacaaggtccactcccactttgaccgctccatggagtccgggccgtacaccctcaagtaccgcggatccatgtggggttacaaacgattctttcggcgaactgcccttgaattatcagactatctcaaagatgattgtctgaaaataaattgcactgtgggagttgtagtgtcaactatcgattactccataccgcactctatccatgttccagactcagacatcggctatgattttggttcactgttggacagtcaggagggtgctgatgtcattcttaatgtgggaggagagaggtttcatgcccataagttagtgttggctgcacggtctcatgtattcggatctcaattttttgatgatgaatctgatggagagaagagtgaggttaatgagactgatgaactaaaagagttttctattgatgatatggagccaaatgttttcaaggcaatgcttcacttcatctatagagatacccttgttgatgatgatgagttgggcgcgtcaagctctgatggttctatctttgatactccggcagctaagttgttggctgcagccgataagtatcacttagcaagactaaagtcgctatgtgaatcttacctgtgcaagggcatatcagtggcctcagttgcgagtacgttagcattggctgataggcaccatgccatggagcttaaagctgtttgcctaaaatttgctgctgaaaatctttcagctgtaatgcggagtgagggtttcatttacctcaaggacaactgcccatctctccagtcagagatactgaaaactgttgcagggtgtgaggaccagtgcagcagtgttgggaagagccagagcgtttgtgggcagctctcggacggtggcgattccagttgccgcagggttaggcaaagaacctgaggtcaacccagaactgacatgttactgaatcgatgtgtagacagccctgcaaatgctcacgagtcaacgataaacatggtggccttgtgtcttggcaactggtgtttgcagcaggcgggccagcagctgtctgctactaatatggatccgttgattttgttgtattcttctttcgactggaaggtatcataagtcaattaggaggtgattcttatatgtattcgttatgctgcaaaagtgaaggtgacaatatttttggtttattggcaagtacatggaatttacatttttgttgagatggttcgtagatggagtaattttgctgtaaagatatagtggtgacaagttttttttgtttgtttggattttttacatttctgttcgcaagtatcgtcatctgtcaatgttgagaggtgatgatatataggattgtcctttggtggcctccacgagaggtttgtttttttccttgtattttggaccgttttttcttttattaatataatgatatgttcaaggaatgataacatatttgttgacatgtaaatttgttacagacgggtagtaaatgttca

SEQ ID NO: 67956 - DNA, 3287 bp, Zea Mays
gttgcctttgggagtttggttgtcttcagttatgatggcattcactccccagactgcttggctatcacagctgctggtatagccgtggccctctctgaaattccaaataaacaaacaattgctggagtaagaattggcctaattaacaaccagtttattgttaacccaactactgaacagatggagaattcagagttagatttgatgatggctgggactgatagtgccattttgatgattgagggctactgtgattttctgactgaggagaagctgcttgaagctgtcgaagctgggcaggtggcaattagagaaatctgcaaagcaattgatgttcttgttcagagctgtgggaagaagaaaatggtcgatgctatcagcctaccgccgcctgaactctacaggcatgttgaagatatttctggagatgagttgatgaaggcattacaaataaaaggaaagattcccagaagaaaagctctttcagcattggaagagaaagttataagtatactttctgagcagggctatgtttccaaagatggcttatctggaggcactgaaagtttggctgatattgttgaggatgaggatgaggatgaaattgtagatgacggagaagtagatgaaggcgatgttcacatcaagccggtttcaaggaagccccttcagctatttgcagaagttgatgtgaagctagtcttcaaggaaatttcatctaaatatttacgaaagcgcattgtagagcgaggaaagcgaagtgatggacggagtccttgggaacttcggcccatcaattctcaatgtggcttacttccaagagctcatggtagtgctctgttcacgaggggagaaacacagtcactggctgtggtcactttaggtggctatcagatggcacaacgaattgacaaccttgttgatacggaggactcaaaaagcttctatcttcagtactcatttcctccatcatgtgttggcgaagttggtcgaattggagcacctagccggagagagattggacatgggatgcttgcagaaagggcactggagccaattttacctctggaagaggattttccgtacactattcgtgttgagagtactatcactgaaagtaatggttcatccagcatggcttctgtttgtggaggttgtttagcacttcaagatgctggggttcctataaagtttcctgttgctggaattgcaatgggcctggtccttgatacacaagaatttggtggagatggtagcccacttatactttctgatattactggagctgaagatgcctctggtgacatggatttgaagattgctggtaatgaaagtggcatatctgcatttcagatggacattaaggtagttgggataactctacctgtgatggagaaagcactccttcaagctagggaagggagacaacatattctaaatgaaatgttgaaatcttcacctccaccctcaaaagcactatctccacacgctccattaattcatgttatgaaggtcaaacctaacaaggtgaatttaataattggttctggtggaaagacaataaaaagcataattgaggagactggggtagatgctattgatactggagatgatggcacggtaaaaattactgcaagagacctaacaagcttagagaagtcaaaaattataatagctaatcttaccatggttccaaaagtaggagaaatatacagggactgtgagatcaagtcaatagctccatatggtgcttttgttgaaattgctccagggcgtgagggtttatgtcatatcagtgagttaagttcgggctggttggccaaggctgaggatgcttttaaagttggagatcgcatagacgtcaagcttattgagataaacgataagggtcaacttcggctaagctctcgagctttgcttccagacgtggattccgaatccaacataggttcaacaaaagaaaaggtgccacaaaaagatgatgtcataaaaatgacaacaaaaagaccaaggcgcaagaaacagccagagccgtctggagctgaaaatgccacaacaaaggctcttgcgaaaagcgctgctgctccagctggttcaaagggcagtgaagcgtagtaggatgtggacagcttggtgccttaatcagacgattgactggccaagctagggatacatccttcaaccgactatatgatggtcatatggcatgagaaagagttcagacatgagggcacaactgtctaaacaggaatataatggagaagaattggttgatcgacctcgatgttagacaggtagagtgtctggttgatgcgttacacaaggcgtgcgcctatccagcagtaatggtgcccaggactggatcgtcgccatggttagcggaacagatcccgtaaccaccatggaaacttgattgtaatcgccagaagtgttgtatcgttctgtactaactacatattcttgccaatccggccaatgcaaactactgcatgaagtaattagccaaaaaaaatttggctcagcctgggaataaccggaacatggaacaaataatttgacagtcagaggcaatgcaactcctatctcacatttacaagccaaatccaactcctatcagttaactgtcccgaccggcaatacaaaatctaccaaaagagaaacagaaactaggatctggggtagctttccaccgacacatactagtttccatgctagcaaaatctaccaagaaggctgttctcaacactttaacgctcaagtctgagcagcgagatgtctttgtactctgtcaactgttccacgccaactcgttaccgttgagcagcccgctccccaccaattcattagcgatgagatgctccaggtcatcaaattcatggaagggcttggccttcaaagtcgcggcattgcctccagcaggagcagcagcaacagccagattgctgcttaccgacttgaaattgttacttctggctgtgctgttattgatcacactagtaggcccggtatagatggtggcagcaccatttacggccatgcgctgtccctgatctcctgtaccagcactgttggtgttagcacctcctgatgtgataccactgcttatgttagggatatctagaggtggttgctgtggcagtgtgtgccttttagcgttcttaacttcttgaatcagctgatttaaagcatgctgctgatactgtgggctcacgcccaggccccggtgattgttttgcaaccccaagccctggaggttgttgtgctggggcattgggtgctgaaatgac

SEQ ID NO: 67957 - DNA, 3970 bp, Zea Mays
gcgagaaagtgataaggttcgtgggtgcgtcgccactcgccaccctcacgtctcccgagtggactcccgcctccttccttccgtcccttcccggctcaccgcccttcgcctcaccccgcgcctcctccctgtcccccctccagaactgtcccccaccgcctcgagatgctcgcggcccccgccgcgctccacctcctcctcccggcgccgccgctgccgcccccgcactaccaccaccaccacgtcgccttccccgcgccgccgctccacgcctcgctcccgtgctcacgccgcccgcggaggaggccgcccaggcatggggtcgccagggcctccgccgcaatggcggaggaggccagcagctccggaccgaccaagttctccgtgaggatccccgtcggcgaccgcgagatattggtggaaacgggccacattgggaggcaagcgagcgcttctgtaatggtcactgatggcgaaacgattctctactgttctgtctgtctgtcggatactccaaacgacccttctgactttttccctttatcggttcactatcaagagcgcctttcagctgctggaagaactagtggcggtttcttcaaacgagaaggcaagacaaaagaccatgaggttttggtttgcagattgatagacaggcccctacgacctactatgcctaagggtttctactttgaaactcagattctatcctgggtcttcagttatgatggcattcactccccagactgcttggctatcacagctgctgggccctctctgaaattccaaataaacaaacaattgctggagtaagaattggcctaattaacaaccagtttattgttaacccaactactgaacagatggagaattcagagttagatttgatgatggctgggactgatagtgccattttgatgattgagggctactgtgattttctgactgaggagaagctgcttgaagctgtcgaagctgggcaggtggcaattagagaaatctgcaaagcaattgatgttcttgttcagagctgtgggaagaagaaaatggtcgatgctatcagcctaccgccgcctgaactctacaggcatgttgaagatatttctggagatgagttgatgaaggcattacaaataaaaggaaagattcccagaagaaaagctctttcagcattggaagagaaagttataagtatactttctgagcagggctatgtttccaaagatggcttatctggaggcactgaaagtttggctgatattgttgaggatgaggatgaggatgaaattgtagatgacggagaagtagatgaaggcgatgttcacatcaagccggtttcaaggaagccccttcagctatttgcagaagttgatgtgaagctagtcttcaaggaaatttcatctaaatatttacgaaagcgcattgtagagcgaggaaagcgaagtgatggacggagtccttgggaacttcggcccatcaattctcaatgtggcttacttccaagagctcatggtagtgctctgttcacgaggggagaaacacagtcactggctgtggtcactttaggtggctatcagatggcacaacgaattgacaaccttgttgatacggaggactcaaaaagcttctatcttcagtactcatttcctccatcatgtgttggcgaagttggtcgaattggagcacctagccggagagagattggacatgggatgcttgcagaaagggcactggagccaattttacctctggaagaggattttccgtacactattcgtgttgagagtactatcactgaaagtaatggttcatccagcatggcttctgtttgtggaggttgtttagcacttcaagatgctggggttcctataaagtttcctgttgctggaattgcaatgggcctggtccttgatacacaagaatttggtggagatggtagcccacttatactttctgatattactggagctgaagatgcctctggtgacatggatttgaagattgctggtaatgaaagtggcatatctgcatttcagatggacattaaggtagttgggataactctacctgtgatggagaaagcactccttcaagctagggaagggagacaacatattctaaatgaaatgttgaaatcttcacctccaccctcaaaagcactatctccacacgctccattaattcatgttatgaaggtcaaacctaacaaggtgaatttaataattggttctggtggaaagacaataaaaagcataattgaggagactggggtagatgctattgatactggagatgatggcacggtaaaaattactgcaagagacctaacaagcttagagaagtcaaaaattataatagctaatcttaccatggttccaaaagtaggagaaatatacagggactgtgagatcaagtcaatagctccatatggtgcttttgttgaaattgctccagggcgtgagggtttatgtcatatcagtgagttaagttcgggctggttggccaaggctgaggatgcttttaaagttggagatcgcatagacgtcaagcttattgagataaacgataagggtcaacttcggctaagctctcgagctttgcttccagacgtggattccgaatccaacataggttcaacaaaagaaaaggtgccacaaaaagatgatgtcataaaaatgacaacaaaaagaccaaggcgcaagaaacagccagagccgtctggagctgaaaatgccacaacaaaggctcttgcgaaaagcgctgctgctccagctggttcaaagggcagtgaagcgtagtaggatgtggacagcttggtgccttaatcagacgattgactggccaagctagggatacatccttcaaccgactatatgatggtcatatggcatgagaaagagttcagacatgagggcacaactgtctaaacaggaatataatggagaagaattggttgatcgacctcgatgttagacaggtagagtgtctggttgatgcgttacacaaggcgtgcgcctatccagcagtaatggtgcccaggactggatcgtcgccatggttagcggaacagatcccgtaaccaccatggaaacttgattgtaatcgccagaagtgttgtatcgttctgtactaactacatattcttgccaatccggccaatgcaaactactgcatgaagtaattagccaaaaaaaatttggctcagcctgggaataaccggaacatggaacaaataatttgacagtcagaggcaatgcaactcctatctcacatttacaagccaaatccaactcctatcagttaactgtcccgaccggcaatacaaaatctaccaaaagagaaacagaaactaggatctggggtagctttccaccgacacatactagtttccatgctagcaaaatctaccaagaaggctgttctcaacactttaacgctcaagtctgagcagcgagatgtctttgtactctgtcaactgttccacgccaactcgttaccgttgagcagcccgctccccaccaattcattagcgatgagatgctccaggtcatcaaattcatggaagggcttggccttcaaagtcgcggcattgcctccagcaggagcagcagcaacagccagattgctgcttaccgacttgaaattgttacttctggctgtgctgttattgatcacactagtaggcccggtatagatggtggcagcaccatttacggccatgcgctgtccctgatctcctgtaccagcactgttggtgttagcacctcctgatgtgataccactgcttatgttagggatatctagaggtggttgctgtggcagtgtgtgccttttagcgttcttaacttcttgaatcagctgatttaaagcatgctgctgatactgtgggctcacgcccaggccccggtgattgttttgcaaccccaagccctggaggttgttgtgctggggcattgggtgctgaaatgac

SEQ ID NO: 67958 - DNA, 3990 bp, Zea Mays
gcgagaaagtgataaggttcgtgggtgcgtcgccactcgccaccctcacgtctcccgagtggactcccgcctccttccttccgtcccttcccggctcaccgcccttcgcctcaccccgcgcctcctccctgtcccccctccagaactgtcccccaccgcctcgagatgctcgcggcccccgccgcgctccacctcctcctcccggcgccgccgctgccgcccccgcactaccaccaccaccacgtcgccttccccgcgccgccgctccacgcctcgctcccgtgctcacgccgcccgcggaggaggccgcccaggcatggggtcgccagggcctccgccgcaatggcggaggaggccagcagctccggaccgaccaagttctccgtgaggatccccgtcggcgaccgcgagatattggtggaaacgggccacattgggaggcaagcgagcgcttctgtaatggtcactgatggcgaaacgattctctactgttctgtctgtctgtcggatactccaaacgacccttctgactttttccctttatcggttcactatcaagagcgcctttcagctgctggaagaactagtggcggtttcttcaaacgagaaggcaagacaaaagaccatgaggttttggtttgcagattgatagacaggcccctacgacctactatgcctaagggtttctactttgaaactcagattctatcctgggtcttcagttatgatggcattcactccccagactgcttggctatcacagctgctggtatagccgtggccctctctgaaattccaaataaacaaacaattgctggagtaagaattggcctaattaacaaccagtttattgttaacccaactactgaacagatggagaattcagagttagatttgatgatggctgggactgatagtgccattttgatgattgagtctttggtagggctactgtgattttctgactgaggagaagctgcttgaagctgtcgaagctgggcaggtggcaattagagaaatctgcaaagcaattgatgttcttgttcagagctgtgggaagaagaaaatggtcgatgctatcagcctaccgccgcctgaactctacaggcatgttgaagatatttctggagatgagttgatgaaggcattacaaataaaaggaaagattcccagaagaaaagctctttcagcattggaagagaaagttataagtatactttctgagcagggctatgtttccaaagatggcttatctggaggcactgaaagtttggctgatattgttgaggatgaggatgaggatgaaattgtagatgacggagaagtagatgaaggcgatgttcacatcaagccggtttcaaggaagccccttcagctatttgcagaagttgatgtgaagctagtcttcaaggaaatttcatctaaatatttacgaaagcgcattgtagagcgaggaaagcgaagtgatggacggagtccttgggaacttcggcccatcaattctcaatgtggcttacttccaagagctcatggtagtgctctgttcacgaggggagaaacacagtcactggctgtggtcactttaggtggctatcagatggcacaacgaattgacaaccttgttgatacggaggactcaaaaagcttctatcttcagtactcatttcctccatcatgtgttggcgaagttggtcgaattggagcacctagccggagagagattggacatgggatgcttgcagaaagggcactggagccaattttacctctggaagaggattttccgtacactattcgtgttgagagtactatcactgaaagtaatggttcatccagcatggcttctgtttgtggaggttgtttagcacttcaagatgctggggttcctataaagtttcctgttgctggaattgcaatgggcctggtccttgatacacaagaatttggtggagatggtagcccacttatactttctgatattactggagctgaagatgcctctggtgacatggatttgaagattgctggtaatgaaagtggcatatctgcatttcagatggacattaaggtagttgggataactctacctgtgatggagaaagcactccttcaagctagggaagggagacaacatattctaaatgaaatgttgaaatcttcacctccaccctcaaaagcactatctccacacgctccattaattcatgttatgaaggtcaaacctaacaaggtgaatttaataattggttctggtggaaagacaataaaaagcataattgaggagactggggtagatgctattgatactggagatgatggcacggtaaaaattactgcaagagacctaacaagcttagagaagtcaaaaattataatagctaatcttaccatggttccaaaagtaggagaaatatacagggactgtgagatcaagtcaatagctccatatggtgcttttgttgaaattgctccagggcgtgagggtttatgtcatatcagtgagttaagttcgggctggttggccaaggctgaggatgcttttaaagttggagatcgcatagacgtcaagcttattgagataaacgataagggtcaacttcggctaagctctcgagctttgcttccagacgtggattccgaatccaacataggttcaacaaaagaaaaggtgccacaaaaagatgatgtcataaaaatgacaacaaaaagaccaaggcgcaagaaacagccagagccgtctggagctgaaaatgccacaacaaaggctcttgcgaaaagcgctgctgctccagctggttcaaagggcagtgaagcgtagtaggatgtggacagcttggtgccttaatcagacgattgactggccaagctagggatacatccttcaaccgactatatgatggtcatatggcatgagaaagagttcagacatgagggcacaactgtctaaacaggaatataatggagaagaattggttgatcgacctcgatgttagacaggtagagtgtctggttgatgcgttacacaaggcgtgcgcctatccagcagtaatggtgcccaggactggatcgtcgccatggttagcggaacagatcccgtaaccaccatggaaacttgattgtaatcgccagaagtgttgtatcgttctgtactaactacatattcttgccaatccggccaatgcaaactactgcatgaagtaattagccaaaaaaaatttggctcagcctgggaataaccggaacatggaacaaataatttgacagtcagaggcaatgcaactcctatctcacatttacaagccaaatccaactcctatcagttaactgtcccgaccggcaatacaaaatctaccaaaagagaaacagaaactaggatctggggtagctttccaccgacacatactagtttccatgctagcaaaatctaccaagaaggctgttctcaacactttaacgctcaagtctgagcagcgagatgtctttgtactctgtcaactgttccacgccaactcgttaccgttgagcagcccgctccccaccaattcattagcgatgagatgctccaggtcatcaaattcatggaagggcttggccttcaaagtcgcggcattgcctccagcaggagcagcagcaacagccagattgctgcttaccgacttgaaattgttacttctggctgtgctgttattgatcacactagtaggcccggtatagatggtggcagcaccatttacggccatgcgctgtccctgatctcctgtaccagcactgttggtgttagcacctcctgatgtgataccactgcttatgttagggatatctagaggtggttgctgtggcagtgtgtgccttttagcgttcttaacttcttgaatcagctgatttaaagcatgctgctgatactgtgggctcacgcccaggccccggtgattgttttgcaaccccaagccctggaggttgttgtgctggggcattgggtgctgaaatgac

SEQ ID NO: 67959 - DNA, 3876 bp, Zea Mays
gcgagaaagtgataaggttcgtgggtgcgtcgccactcgccaccctcacgtctcccgagtggactcccgcctccttccttccgtcccttcccggctcaccgcccttcgcctcaccccgcgcctcctccctgtcccccctccagaactgtcccccaccgcctcgagatgctcgcggcccccgccgcgctccacctcctcctcccggcgccgccgctgccgcccccgcactaccaccaccaccacgtcgccttccccgcgccgccgctccacgcctcgctcccgtgctcacgccgcccgcggaggaggccgcccaggcatggggtcgccagggcctccgccgcaatggcggaggaggccagcagctccggaccgaccaagttctccgtgaggatccccgtcggcgaccgcgagatattggtggaaacgggccacattgggaggcaagcgagcgcttctgtaatggtcactgatggcgaaacgattctctactgttctgtctgtctgtcggatactccaaacgacccttctgactttttccctttatcggttcactatcaagagcgcctttcagctgctggaagaactagtggcggtttcttcaaacgagaaggcaagacaaaagaccatgaggttttggtttgcagattgatagacaggcccctacgacctactatgcctaagggtttctactttgaaactcagattctatcctgggtcttcagttatgatggcattcactccccagactgcttggctatcacagctgctgatggagaattcagagttagatttgatgatggctgggactgatagtgccattttgatgattgagggctactgtgattttctgactgaggagaagctgcttgaagctgtcgaagctgggcaggtggcaattagagaaatctgcaaagcaattgatgttcttgttcagagctgtgggaagaagaaaatggtcgatgctatcagcctaccgccgcctgaactctacaggcatgttgaagatatttctggagatgagttgatgaaggcattacaaataaaaggaaagattcccagaagaaaagctctttcagcattggaagagaaagttataagtatactttctgagcagggctatgtttccaaagatggcttatctggaggcactgaaagtttggctgatattgttgaggatgaggatgaggatgaaattgtagatgacggagaagtagatgaaggcgatgttcacatcaagccggtttcaaggaagccccttcagctatttgcagaagttgatgtgaagctagtcttcaaggaaatttcatctaaatatttacgaaagcgcattgtagagcgaggaaagcgaagtgatggacggagtccttgggaacttcggcccatcaattctcaatgtggcttacttccaagagctcatggtagtgctctgttcacgaggggagaaacacagtcactggctgtggtcactttaggtggctatcagatggcacaacgaattgacaaccttgttgatacggaggactcaaaaagcttctatcttcagtactcatttcctccatcatgtgttggcgaagttggtcgaattggagcacctagccggagagagattggacatgggatgcttgcagaaagggcactggagccaattttacctctggaagaggattttccgtacactattcgtgttgagagtactatcactgaaagtaatggttcatccagcatggcttctgtttgtggaggttgtttagcacttcaagatgctggggttcctataaagtttcctgttgctggaattgcaatgggcctggtccttgatacacaagaatttggtggagatggtagcccacttatactttctgatattactggagctgaagatgcctctggtgacatggatttgaagattgctggtaatgaaagtggcatatctgcatttcagatggacattaaggtagttgggataactctacctgtgatggagaaagcactccttcaagctagggaagggagacaacatattctaaatgaaatgttgaaatcttcacctccaccctcaaaagcactatctccacacgctccattaattcatgttatgaaggtcaaacctaacaaggtgaatttaataattggttctggtggaaagacaataaaaagcataattgaggagactggggtagatgctattgatactggagatgatggcacggtaaaaattactgcaagagacctaacaagcttagagaagtcaaaaattataatagctaatcttaccatggttccaaaagtaggagaaatatacagggactgtgagatcaagtcaatagctccatatggtgcttttgttgaaattgctccagggcgtgagggtttatgtcatatcagtgagttaagttcgggctggttggccaaggctgaggatgcttttaaagttggagatcgcatagacgtcaagcttattgagataaacgataagggtcaacttcggctaagctctcgagctttgcttccagacgtggattccgaatccaacataggttcaacaaaagaaaaggtgccacaaaaagatgatgtcataaaaatgacaacaaaaagaccaaggcgcaagaaacagccagagccgtctggagctgaaaatgccacaacaaaggctcttgcgaaaagcgctgctgctccagctggttcaaagggcagtgaagcgtagtaggatgtggacagcttggtgccttaatcagacgattgactggccaagctagggatacatccttcaaccgactatatgatggtcatatggcatgagaaagagttcagacatgagggcacaactgtctaaacaggaatataatggagaagaattggttgatcgacctcgatgttagacaggtagagtgtctggttgatgcgttacacaaggcgtgcgcctatccagcagtaatggtgcccaggactggatcgtcgccatggttagcggaacagatcccgtaaccaccatggaaacttgattgtaatcgccagaagtgttgtatcgttctgtactaactacatattcttgccaatccggccaatgcaaactactgcatgaagtaattagccaaaaaaaatttggctcagcctgggaataaccggaacatggaacaaataatttgacagtcagaggcaatgcaactcctatctcacatttacaagccaaatccaactcctatcagttaactgtcccgaccggcaatacaaaatctaccaaaagagaaacagaaactaggatctggggtagctttccaccgacacatactagtttccatgctagcaaaatctaccaagaaggctgttctcaacactttaacgctcaagtctgagcagcgagatgtctttgtactctgtcaactgttccacgccaactcgttaccgttgagcagcccgctccccaccaattcattagcgatgagatgctccaggtcatcaaattcatggaagggcttggccttcaaagtcgcggcattgcctccagcaggagcagcagcaacagccagattgctgcttaccgacttgaaattgttacttctggctgtgctgttattgatcacactagtaggcccggtatagatggtggcagcaccatttacggccatgcgctgtccctgatctcctgtaccagcactgttggtgttagcacctcctgatgtgataccactgcttatgttagggatatctagaggtggttgctgtggcagtgtgtgccttttagcgttcttaacttcttgaatcagctgatttaaagcatgctgctgatactgtgggctcacgcccaggccccggtgattgttttgcaaccccaagccctggaggttgttgtgctggggcattgggtgctgaaatgac

SEQ ID NO: 67960 - DNA, 3993 bp, Zea Mays
gcgagaaagtgataaggttcgtgggtgcgtcgccactcgccaccctcacgtctcccgagtggactcccgcctccttccttccgtcccttcccggctcaccgcccttcgcctcaccccgcgcctcctccctgtcccccctccagaactgtcccccaccgcctcgagatgctcgcggcccccgccgcgctccacctcctcctcccggcgccgccgctgccgcccccgcactaccaccaccaccacgtcgccttccccgcgccgccgctccacgcctcgctcccgtgctcacgccgcccgcggaggaggccgcccaggcatggggtcgccagggcctccgccgcaatggcggaggaggccagcagctccggaccgaccaagttctccgtgaggatccccgtcggcgaccgcgagatattggtggaaacgggccacattgggaggcaagcgagcgcttctgtaatggtcactgatggcgaaacgattctctactgttctgtctgtctgtcggatactccaaacgacccttctgactttttccctttatcggttcactatcaagagcgcctttcagctgctggaagaactagtggcggtttcttcaaacgagaaggcaagacaaaagaccatgaggttttggtttgcagattgatagacaggcccctacgacctactatgcctaagggtttctactttgaaactcagattctatcctgggtcttcagttatgatggcattcactccccagactgcttggctatcacagctgctggtatagccgtggccctctctgaaattccaaataaacaaacaattgctggagtaagaattggcctaattaacaaccagtttattgttaacccaactactgaacagatggagaattcagagttagatttgatgatggctgggactgatagtgccattttgatgattgagggctactgtgattttctgactgaggagaagctgcttgaagctgtcgaagctgggcaggtggcaattagagaaatctgcaaagcaattgatgttcttgttcagagctgtgggaagaagaaaatggtcgatgctatcagcctaccgccgcctgaactctacaggcatgttgaagatatttctggagatgagttgatgaaggcattacaaataaaaggaaagattcccagaagaaaagctctttcagcattggaagagaaagttataagtatactttctgagcagggctatgtttccaaagatggcttatctggaggcactgaaagtttggctgatattgttgaggatgaggatgaggatgaaattgtagatgacggagaagtagatgaaggcgatgttcacatcaagccggtttcaaggaagccccttcaggtgatgataattgctatttgcagaagttgatgtgaagctagtcttcaaggaaatttcatctaaatatttacgaaagcgcattgtagagcgaggaaagcgaagtgatggacggagtccttgggaacttcggcccatcaattctcaatgtggcttacttccaagagctcatggtagtgctctgttcacgaggggagaaacacagtcactggctgtggtcactttaggtggctatcagatggcacaacgaattgacaaccttgttgatacggaggactcaaaaagcttctatcttcagtactcatttcctccatcatgtgttggcgaagttggtcgaattggagcacctagccggagagagattggacatgggatgcttgcagaaagggcactggagccaattttacctctggaagaggattttccgtacactattcgtgttgagagtactatcactgaaagtaatggttcatccagcatggcttctgtttgtggaggttgtttagcacttcaagatgctggggttcctataaagtttcctgttgctggaattgcaatgggcctggtccttgatacacaagaatttggtggagatggtagcccacttatactttctgatattactggagctgaagatgcctctggtgacatggatttgaagattgctggtaatgaaagtggcatatctgcatttcagatggacattaaggtagttgggataactctacctgtgatggagaaagcactccttcaagctagggaagggagacaacatattctaaatgaaatgttgaaatcttcacctccaccctcaaaagcactatctccacacgctccattaattcatgttatgaaggtcaaacctaacaaggtgaatttaataattggttctggtggaaagacaataaaaagcataattgaggagactggggtagatgctattgatactggagatgatggcacggtaaaaattactgcaagagacctaacaagcttagagaagtcaaaaattataatagctaatcttaccatggttccaaaagtaggagaaatatacagggactgtgagatcaagtcaatagctccatatggtgcttttgttgaaattgctccagggcgtgagggtttatgtcatatcagtgagttaagttcgggctggttggccaaggctgaggatgcttttaaagttggagatcgcatagacgtcaagcttattgagataaacgataagggtcaacttcggctaagctctcgagctttgcttccagacgtggattccgaatccaacataggttcaacaaaagaaaaggtgccacaaaaagatgatgtcataaaaatgacaacaaaaagaccaaggcgcaagaaacagccagagccgtctggagctgaaaatgccacaacaaaggctcttgcgaaaagcgctgctgctccagctggttcaaagggcagtgaagcgtagtaggatgtggacagcttggtgccttaatcagacgattgactggccaagctagggatacatccttcaaccgactatatgatggtcatatggcatgagaaagagttcagacatgagggcacaactgtctaaacaggaatataatggagaagaattggttgatcgacctcgatgttagacaggtagagtgtctggttgatgcgttacacaaggcgtgcgcctatccagcagtaatggtgcccaggactggatcgtcgccatggttagcggaacagatcccgtaaccaccatggaaacttgattgtaatcgccagaagtgttgtatcgttctgtactaactacatattcttgccaatccggccaatgcaaactactgcatgaagtaattagccaaaaaaaatttggctcagcctgggaataaccggaacatggaacaaataatttgacagtcagaggcaatgcaactcctatctcacatttacaagccaaatccaactcctatcagttaactgtcccgaccggcaatacaaaatctaccaaaagagaaacagaaactaggatctggggtagctttccaccgacacatactagtttccatgctagcaaaatctaccaagaaggctgttctcaacactttaacgctcaagtctgagcagcgagatgtctttgtactctgtcaactgttccacgccaactcgttaccgttgagcagcccgctccccaccaattcattagcgatgagatgctccaggtcatcaaattcatggaagggcttggccttcaaagtcgcggcattgcctccagcaggagcagcagcaacagccagattgctgcttaccgacttgaaattgttacttctggctgtgctgttattgatcacactagtaggcccggtatagatggtggcagcaccatttacggccatgcgctgtccctgatctcctgtaccagcactgttggtgttagcacctcctgatgtgataccactgcttatgttagggatatctagaggtggttgctgtggcagtgtgtgccttttagcgttcttaacttcttgaatcagctgatttaaagcatgctgctgatactgtgggctcacgcccaggccccggtgattgttttgcaaccccaagccctggaggttgttgtgctggggcattgggtgctgaaatgac

SEQ ID NO: 67961 - DNA, 3971 bp, Zea Mays
gcgagaaagtgataaggttcgtgggtgcgtcgccactcgccaccctcacgtctcccgagtggactcccgcctccttccttccgtcccttcccggctcaccgcccttcgcctcaccccgcgcctcctccctgtcccccctccagaactgtcccccaccgcctcgagatgctcgcggcccccgccgcgctccacctcctcctcccggcgccgccgctgccgcccccgcactaccaccaccaccacgtcgccttccccgcgccgccgctccacgcctcgctcccgtgctcacgccgcccgcggaggaggccgcccaggcatggggtcgccagggcctccgccgcaatggcggaggaggccagcagctccggaccgaccaagttctccgtgaggatccccgtcggcgaccgcgagatattggtggaaacgggccacattgggaggcaagcgagcgcttctgtaatggtcactgatggcgaaacgattctctactgttctgtctgtctgtcggatactccaaacgacccttctgactttttccctttatcggttcactatcaagagcgcctttcagctgctggaagaactagtggcggtttcttcaaacgagaaggcaagacaaaagaccatgaggttttggtttgcagattgatagacaggcccctacgacctactatgcctaagggtttctactttgaaactcagattctatcctgggtcttcagttatgatggcattcactccccagactgcttggctatcacagctgctggtatagccgtggccctctctgaaattccaaataaacaaacaattgctggagtaagaattggcctaattaacaaccagtttattgttaacccaactactgaacagatggagaattcagagttagatttgatgatggctgggactgatagtgccattttgatgattgagggctactgtgattttctgactgaggagaagctgcttgaagctgtcgaagctgggcaggtggcaattagagaaatctgcaaagcaattgatgttcttgttcagagctgtgggaagaagaaaatggtcgatgctatcagcctaccgccgcctgaactctacaggcatgttgaagatatttctggagatgagttgatgaaggcattacaaataaaaggaaagattcccagaagaaaagctctttcagcattggaagagaaagttataagtatactttctgagcagggctatgtttccaaagatggcttatctggaggcactgaaagtttggctgatattgttgaggatgaggatgaggatgaaattgtagatgacggagaagtagatgaaggcgatgttcacatcaagccggtttcaaggaagccccttcagctatttgcagaagttgatgtgaagctagtcttcaaggaaatttcatctaaatatttacgaaagcgcattgtagagcgaagtgatggacggagtccttgggaacttcggcccatcaattctcaatgtggcttacttccaagagctcatggtagtgctctgttcacgaggggagaaacacagtcactggctgtggtcactttaggtggctatcagatggcacaacgaattgacaaccttgttgatacggaggactcaaaaagcttctatcttcagtactcatttcctccatcatgtgttggcgaagttggtcgaattggagcacctagccggagagagattggacatgggatgcttgcagaaagggcactggagccaattttacctctggaagaggattttccgtacactattcgtgttgagagtactatcactgaaagtaatggttcatccagcatggcttctgtttgtggaggttgtttagcacttcaagatgctggggttcctataaagtttcctgttgctggaattgcaatgggcctggtccttgatacacaagaatttggtggagatggtagcccacttatactttctgatattactggagctgaagatgcctctggtgacatggatttgaagattgctggtaatgaaagtggcatatctgcatttcagatggacattaaggtagttgggataactctacctgtgatggagaaagcactccttcaagctagggaagggagacaacatattctaaatgaaatgttgaaatcttcacctccaccctcaaaagcactatctccacacgctccattaattcatgttatgaaggtcaaacctaacaaggtgaatttaataattggttctggtggaaagacaataaaaagcataattgaggagactggggtagatgctattgatactggagatgatggcacggtaaaaattactgcaagagacctaacaagcttagagaagtcaaaaattataatagctaatcttaccatggttccaaaagtaggagaaatatacagggactgtgagatcaagtcaatagctccatatggtgcttttgttgaaattgctccagggcgtgagggtttatgtcatatcagtgagttaagttcgggctggttggccaaggctgaggatgcttttaaagttggagatcgcatagacgtcaagcttattgagataaacgataagggtcaacttcggctaagctctcgagctttgcttccagacgtggattccgaatccaacataggttcaacaaaagaaaaggtgccacaaaaagatgatgtcataaaaatgacaacaaaaagaccaaggcgcaagaaacagccagagccgtctggagctgaaaatgccacaacaaaggctcttgcgaaaagcgctgctgctccagctggttcaaagggcagtgaagcgtagtaggatgtggacagcttggtgccttaatcagacgattgactggccaagctagggatacatccttcaaccgactatatgatggtcatatggcatgagaaagagttcagacatgagggcacaactgtctaaacaggaatataatggagaagaattggttgatcgacctcgatgttagacaggtagagtgtctggttgatgcgttacacaaggcgtgcgcctatccagcagtaatggtgcccaggactggatcgtcgccatggttagcggaacagatcccgtaaccaccatggaaacttgattgtaatcgccagaagtgttgtatcgttctgtactaactacatattcttgccaatccggccaatgcaaactactgcatgaagtaattagccaaaaaaaatttggctcagcctgggaataaccggaacatggaacaaataatttgacagtcagaggcaatgcaactcctatctcacatttacaagccaaatccaactcctatcagttaactgtcccgaccggcaatacaaaatctaccaaaagagaaacagaaactaggatctggggtagctttccaccgacacatactagtttccatgctagcaaaatctaccaagaaggctgttctcaacactttaacgctcaagtctgagcagcgagatgtctttgtactctgtcaactgttccacgccaactcgttaccgttgagcagcccgctccccaccaattcattagcgatgagatgctccaggtcatcaaattcatggaagggcttggccttcaaagtcgcggcattgcctccagcaggagcagcagcaacagccagattgctgcttaccgacttgaaattgttacttctggctgtgctgttattgatcacactagtaggcccggtatagatggtggcagcaccatttacggccatgcgctgtccctgatctcctgtaccagcactgttggtgttagcacctcctgatgtgataccactgcttatgttagggatatctagaggtggttgctgtggcagtgtgtgccttttagcgttcttaacttcttgaatcagctgatttaaagcatgctgctgatactgtgggctcacgcccaggccccggtgattgttttgcaaccccaagccctggaggttgttgtgctggggcattgggtgctgaaatgac

SEQ ID NO: 67962 - DNA, 3960 bp, Zea Mays
gcgagaaagtgataaggttcgtgggtgcgtcgccactcgccaccctcacgtctcccgagtggactcccgcctccttccttccgtcccttcccggctcaccgcccttcgcctcaccccgcgcctcctccctgtcccccctccagaactgtcccccaccgcctcgagatgctcgcggcccccgccgcgctccacctcctcctcccggcgccgccgctgccgcccccgcactaccaccaccaccacgtcgccttccccgcgccgccgctccacgcctcgctcccgtgctcacgccgcccgcggaggaggccgcccaggcatggggtcgccagggcctccgccgcaatggcggaggaggccagcagctccggaccgaccaagttctccgtgaggatccccgtcggcgaccgcgagatattggtggaaacgggccacattgggaggcaagcgagcgcttctgtaatggtcactgatggcgaaacgattctctactgttctgtctgtctgtcggatactccaaacgacccttctgactttttccctttatcggttcactatcaagagcgcctttcagctgctggaagaactagtggcggtttcttcaaacgagaaggcaagacaaaagaccatgaggttttggtttgcagattgatagacaggcccctacgacctactatgcctaagggtttctactttgaaactcagattctatcctgggtcttcagttatgatggcattcactccccagactgcttggctatcacagctgctggtatagccgtggccctctctgaaattccaaataaacaaacaattgctggagtaagaattggcctaattaacaaccagtttattgttaacccaactactgaacagatggagaattcagagttagatttgatgatggctgggactgatagtgccattttgatgattgagggctactgtgattttctgactgaggagaagctgcttgaagctgtcgaagctgggcaggtggcaattagagaaatctgcaaagcaattgatgttcttgttcagagctgtgggaagaagaaaatggtcgatgctatcagcctaccgccgcctgaactctacaggcatgttgaagatatttctggagatgagttgatgaaggcattacaaataaaaggaaagattcccagaagaaaagctctttcagcattggaagagaaagttataagtatactttctgagcagggctatgtttccaaagatggcttatctggaggcactgaaagtttggctgatattgttgaggatgaggatgaggatgaaattgtagatgacggagaagtagatgaaggcgatgttcacatcaagccggtttcaaggaagccccttcagctatttgcagaagttgatgtgaagctagtcttcaaggaaatttcatctaaatatttacgaaagcgcattgtagagcgaggaaagcgaagtgatggacggagtccttgggaacttcggcccatcaattctcaatgtggcttacttccaagagctcatggtagtgctctgttcacgaggggagaaacacagtcactggctgtggtcactttaggtggctatcagatggcacaacgaattgacaaccttgttgatacggaggactcaaaaagcttctatcttcagtactcatttcctccatcatgtgttggcgaagttggtcgaattggagcacctagccggagagagattggacatgggatgcttgcagaaagggcactggagccaattttacctctggaagaggattttccgtacactattcgtgttgagagtactatcactgaaagtaatggttcatccaggttgtttagcacttcaagatgctggggttcctataaagtttcctgttgctggaattgcaatgggcctggtccttgatacacaagaatttggtggagatggtagcccacttatactttctgatattactggagctgaagatgcctctggtgacatggatttgaagattgctggtaatgaaagtggcatatctgcatttcagatggacattaaggtagttgggataactctacctgtgatggagaaagcactccttcaagctagggaagggagacaacatattctaaatgaaatgttgaaatcttcacctccaccctcaaaagcactatctccacacgctccattaattcatgttatgaaggtcaaacctaacaaggtgaatttaataattggttctggtggaaagacaataaaaagcataattgaggagactggggtagatgctattgatactggagatgatggcacggtaaaaattactgcaagagacctaacaagcttagagaagtcaaaaattataatagctaatcttaccatggttccaaaagtaggagaaatatacagggactgtgagatcaagtcaatagctccatatggtgcttttgttgaaattgctccagggcgtgagggtttatgtcatatcagtgagttaagttcgggctggttggccaaggctgaggatgcttttaaagttggagatcgcatagacgtcaagcttattgagataaacgataagggtcaacttcggctaagctctcgagctttgcttccagacgtggattccgaatccaacataggttcaacaaaagaaaaggtgccacaaaaagatgatgtcataaaaatgacaacaaaaagaccaaggcgcaagaaacagccagagccgtctggagctgaaaatgccacaacaaaggctcttgcgaaaagcgctgctgctccagctggttcaaagggcagtgaagcgtagtaggatgtggacagcttggtgccttaatcagacgattgactggccaagctagggatacatccttcaaccgactatatgatggtcatatggcatgagaaagagttcagacatgagggcacaactgtctaaacaggaatataatggagaagaattggttgatcgacctcgatgttagacaggtagagtgtctggttgatgcgttacacaaggcgtgcgcctatccagcagtaatggtgcccaggactggatcgtcgccatggttagcggaacagatcccgtaaccaccatggaaacttgattgtaatcgccagaagtgttgtatcgttctgtactaactacatattcttgccaatccggccaatgcaaactactgcatgaagtaattagccaaaaaaaatttggctcagcctgggaataaccggaacatggaacaaataatttgacagtcagaggcaatgcaactcctatctcacatttacaagccaaatccaactcctatcagttaactgtcccgaccggcaatacaaaatctaccaaaagagaaacagaaactaggatctggggtagctttccaccgacacatactagtttccatgctagcaaaatctaccaagaaggctgttctcaacactttaacgctcaagtctgagcagcgagatgtctttgtactctgtcaactgttccacgccaactcgttaccgttgagcagcccgctccccaccaattcattagcgatgagatgctccaggtcatcaaattcatggaagggcttggccttcaaagtcgcggcattgcctccagcaggagcagcagcaacagccagattgctgcttaccgacttgaaattgttacttctggctgtgctgttattgatcacactagtaggcccggtatagatggtggcagcaccatttacggccatgcgctgtccctgatctcctgtaccagcactgttggtgttagcacctcctgatgtgataccactgcttatgttagggatatctagaggtggttgctgtggcagtgtgtgccttttagcgttcttaacttcttgaatcagctgatttaaagcatgctgctgatactgtgggctcacgcccaggccccggtgattgttttgcaaccccaagccctggaggttgttgtgctggggcattgggtgctgaaatgac

SEQ ID NO: 67963 - DNA, 3903 bp, Zea Mays
gcgagaaagtgataaggttcgtgggtgcgtcgccactcgccaccctcacgtctcccgagtggactcccgcctccttccttccgtcccttcccggctcaccgcccttcgcctcaccccgcgcctcctccctgtcccccctccagaactgtcccccaccgcctcgagatgctcgcggcccccgccgcgctccacctcctcctcccggcgccgccgctgccgcccccgcactaccaccaccaccacgtcgccttccccgcgccgccgctccacgcctcgctcccgtgctcacgccgcccgcggaggaggccgcccaggcatggggtcgccagggcctccgccgcaatggcggaggaggccagcagctccggaccgaccaagttctccgtgaggatccccgtcggcgaccgcgagatattggtggaaacgggccacattgggaggcaagcgagcgcttctgtaatggtcactgatggcgaaacgattctctactgttctgtctgtctgtcggatactccaaacgacccttctgactttttccctttatcggttcactatcaagagcgcctttcagctgctggaagaactagtggcggtttcttcaaacgagaaggcaagacaaaagaccatgaggttttggtttgcagattgatagacaggcccctacgacctactatgcctaagggtttctactttgaaactcagattctatcctgggtcttcagttatgatggcattcactccccagactgcttggctatcacagctgctggtatagccgtggccctctctgaaattccaaataaacaaacaattgctggagtaagaattggcctaattaacaaccagtttattgttaacccaactactgaacagatggagaattcagagttagatttgatgatggctgggactgatagtgccattttgatgattgaggtggcaattagagaaatctgcaaagcaattgatgttcttgttcagagctgtgggaagaagaaaatggtcgatgctatcagcctaccgccgcctgaactctacaggcatgttgaagatatttctggagatgagttgatgaaggcattacaaataaaaggaaagattcccagaagaaaagctctttcagcattggaagagaaagttataagtatactttctgagcagggctatgtttccaaagatggcttatctggaggcactgaaagtttggctgatattgttgaggatgaggatgaggatgaaattgtagatgacggagaagtagatgaaggcgatgttcacatcaagccggtttcaaggaagccccttcagctatttgcagaagttgatgtgaagctagtcttcaaggaaatttcatctaaatatttacgaaagcgcattgtagagcgaggaaagcgaagtgatggacggagtccttgggaacttcggcccatcaattctcaatgtggcttacttccaagagctcatggtagtgctctgttcacgaggggagaaacacagtcactggctgtggtcactttaggtggctatcagatggcacaacgaattgacaaccttgttgatacggaggactcaaaaagcttctatcttcagtactcatttcctccatcatgtgttggcgaagttggtcgaattggagcacctagccggagagagattggacatgggatgcttgcagaaagggcactggagccaattttacctctggaagaggattttccgtacactattcgtgttgagagtactatcactgaaagtaatggttcatccaggttgtttagcacttcaagatgctggggttcctataaagtttcctgttgctggaattgcaatgggcctggtccttgatacacaagaatttggtggagatggtagcccacttatactttctgatattactggagctgaagatgcctctggtgacatggatttgaagattgctggtaatgaaagtggcatatctgcatttcagatggacattaaggtagttgggataactctacctgtgatggagaaagcactccttcaagctagggaagggagacaacatattctaaatgaaatgttgaaatcttcacctccaccctcaaaagcactatctccacacgctccattaattcatgttatgaaggtcaaacctaacaaggtgaatttaataattggttctggtggaaagacaataaaaagcataattgaggagactggggtagatgctattgatactggagatgatggcacggtaaaaattactgcaagagacctaacaagcttagagaagtcaaaaattataatagctaatcttaccatggttccaaaagtaggagaaatatacagggactgtgagatcaagtcaatagctccatatggtgcttttgttgaaattgctccagggcgtgagggtttatgtcatatcagtgagttaagttcgggctggttggccaaggctgaggatgcttttaaagttggagatcgcatagacgtcaagcttattgagataaacgataagggtcaacttcggctaagctctcgagctttgcttccagacgtggattccgaatccaacataggttcaacaaaagaaaaggtgccacaaaaagatgatgtcataaaaatgacaacaaaaagaccaaggcgcaagaaacagccagagccgtctggagctgaaaatgccacaacaaaggctcttgcgaaaagcgctgctgctccagctggttcaaagggcagtgaagcgtagtaggatgtggacagcttggtgccttaatcagacgattgactggccaagctagggatacatccttcaaccgactatatgatggtcatatggcatgagaaagagttcagacatgagggcacaactgtctaaacaggaatataatggagaagaattggttgatcgacctcgatgttagacaggtagagtgtctggttgatgcgttacacaaggcgtgcgcctatccagcagtaatggtgcccaggactggatcgtcgccatggttagcggaacagatcccgtaaccaccatggaaacttgattgtaatcgccagaagtgttgtatcgttctgtactaactacatattcttgccaatccggccaatgcaaactactgcatgaagtaattagccaaaaaaaatttggctcagcctgggaataaccggaacatggaacaaataatttgacagtcagaggcaatgcaactcctatctcacatttacaagccaaatccaactcctatcagttaactgtcccgaccggcaatacaaaatctaccaaaagagaaacagaaactaggatctggggtagctttccaccgacacatactagtttccatgctagcaaaatctaccaagaaggctgttctcaacactttaacgctcaagtctgagcagcgagatgtctttgtactctgtcaactgttccacgccaactcgttaccgttgagcagcccgctccccaccaattcattagcgatgagatgctccaggtcatcaaattcatggaagggcttggccttcaaagtcgcggcattgcctccagcaggagcagcagcaacagccagattgctgcttaccgacttgaaattgttacttctggctgtgctgttattgatcacactagtaggcccggtatagatggtggcagcaccatttacggccatgcgctgtccctgatctcctgtaccagcactgttggtgttagcacctcctgatgtgataccactgcttatgttagggatatctagaggtggttgctgtggcagtgtgtgccttttagcgttcttaacttcttgaatcagctgatttaaagcatgctgctgatactgtgggctcacgcccaggccccggtgattgttttgcaaccccaagccctggaggttgttgtgctggggcattgggtgctgaaatgac

SEQ ID NO: 67964 - DNA, 358 bp, Zea Mays
cagtactacatttttgggacttactacagtgtcatgtattatgaagttactggacgatagtttcagagtgattaaccaaaaaatgaataaaacaaagtgtggaagctgttcaatatcagatgatgagtatgatgtctattcaaattacttcctgtttgtgtttagtcctagactcctagttgcattcttactctccgttatgaggccacacattaactttaccgatcgattatttcatgtttgcatataacctattttaatgagattattttgcaggcatttgtggagcttggtgaattgttggtagaatctgactgggctgctgctatggaatacttgaagacagtaagcttttcag

SEQ ID NO: 67965 - DNA, 831 bp, Zea Mays
caatttacatgttgatgcttcttacatgtgaagcttgagcaaggccttcaagtgcttaagattttcaaggatcatgtctgcaagacatccatactggatgacttcggcttttatgataatcgtgagaagatgatgcaagagaggaaagccaaacagcagcagtcgctgaaaaaggtcattgatgtgaagctgcccagcgtcaccgacatggagagaagtcctaaaggggagactggatcaacagaactcactggggttgggactgacgtcttgaacaaagagcgtttattaggcaaagcaggagagaaaaatggcgagaaaggaaatgatgtcgccccacaggacctgaaaacacaaactgagaagttggcgggtctaaatggctgttaatatttttcgttagctcaagccgttgacagtggtgtcggggtggaacctaaggctgtggtgggttgtttgaggaaattctgatgtcccattgagcttgtttcctatagttcataggagctagaggcttagctagttgcttgtgtttggtggtagtcatggtctgtgttctggcgtgtcaggtattttaggaatagaaggatgattaactgggttttgcaatgatggatcatgggttttgaggctgtatttttcgtttatttgcctttcctctctggattctagttcctctctctctctctctctagattctggacaagtgtagtgcttattttaagttggttggtttaagaacctgaaatgaacatgggaattctatcaagcatttacaaacttactttcctctgtacaatatgtgaaaaccgtctacttccatactttctg

SEQ ID NO: 67966 - DNA, 2477 bp, Zea Mays
ctccctttctgctgcccagccgccgtccgtccgcgcttcactatccttcattccctcccctgtcagcgacgactgggtaggctaccgccgccgccctacgctaggctccggccaagggcgtgatggcggctgtaggcagcttgaagccggggatggagactcttcatgtgcaggactacaaggacgcgcctccggccaaggccgcggtagagagcctccagccggcgatggagagtctgcatgtgcaggattacaaggacgcgcctccggccaagggcgtggccgccgccgccgtagggagcttgcagccgggggcggagaacctgcaggtgcaggactacaaggacggtaacatgtattatggtgcttacccggcttatgcctatggagcctatggtggctggggggagtacccatacctgagccatgatggagcacagacaccaactgctggtacctatgctgacatgtactatggctatgctccatatggtgttgcaaccatggggcatgatggtcagatttatgggtctcagaattaccagtacccgtcgacatacaccaagcaacagaactctactgccaagctgtcatccaatggtataagtgagaaattgactccagcgccgcaaacggatgtatctactattggtgtggatgaggtgaaaggtttgaaaaattcaaattcggtgctgaagacagaccggaacatgccaggttccaatggttcatatggccggtctagtgtgcgttctggcagctatcagaaccagactagttggtcacactatccatattatagtagtgagatgttctctgacaagcagcaaaagttcaccggcaaccacaattcgacttccaaccctaaaaccaaggggcagtcgaggaatcaaaacacgaggcagtatcctcatctcatgggtttgcaaacaccaacttcatcagtgtactcagctaatggaatttatgggtatgatgggagctatggacccggcctttggtatggatcgcacatgtataattctggattatatggtggatggaattcactgtatgatggaaagtacagaaccagaggaagaggtaacaatgggtattatgtttatggtaatggaagcatagatggctttaatgagctgaaaagagggccaagaagtggtatgtacaaaaaccagctggggcttgaagctactacccaagcaccagcaaaagagcaggatcttttgtttgctaatggttcacatcctgccatgaaggatcagtataatcaggctgactttgcggaaacatactcagacgctaaattcttcattattaaatcttacagtgaagatgatgttcacaagagcgttaagtacaatgtgtgggctagcactcccaatggtaataagaaacttgatgctgcctatcaagaggctaaagaaaaatcaagcgaaactcctgtttttcttcttttctctgtgaatgcaagtggccagtttgtcggccttgctgaaatggtgggtcgtgttgattttgaaaaaacagtagagcattggcaacaggacaaatggactggttgtttccctgtcaagtggcacattgtgaaggatgttccaaacagcttgctgaagcacatcattcttgagaacaatgaaaacaagccagtgacgaacagcagagatacacatgaggtgaagcttgagcaaggccttcaagtgcttaagattttcaaggatcatgtctgcaagacatccatactggatgacttcggcttttatgataatcgtgagaagatgatgcaagagaggaaagccaaacagcagcagtcgctgaaaaaggtcattgatgtgaagctgcccagcgtcaccgacatggagagaagtcctaaaggggagactggatcaacagaactcactggggttgggactgacgtcttgaacaaagagcgtttattaggcaaagcaggagagaaaaatggcgagaaaggaaatgatgtcgccccacaggacctgaaaacacaaactgagaagttggcgggtctaaatggctgttaatatttttcgttagctcaagccgttgacagtggtgtcggggtggaacctaaggctgtggtgggttgtttgaggaaattctgatgtcccattgagcttgtttcctatagttcataggagctagaggcttagctagttgcttgtgtttggtggtagtcatggtctgtgttctggcgtgtcaggtattttaggaatagaaggatgattaactgggttttgcaatgatggatcatgggttttgaggctgtatttttcgtttatttgcctttcctctctggattctagttcctctctctctctctctctagattctggacaagtgtagtgcttattttaagttggttggtttaagaacctgaaatgaacatgggaattctatcaagcatttacaaacttactttcctctgtacaatatgtgaaaaccgtctacttccatactttctg

SEQ ID NO: 67967 - DNA, 2351 bp, Zea Mays
ctccctttctgctgcccagccgccgtccgtccgcgcttcactatccttcattccctcccctgtcagcgacgactgggtaggctaccgccgccgccctacgctaggtgcccatctcttcgccggcgaagagcgcccaccaagctccggccaagggcgtgatggcggctgtaggcagcttgaagccggggatggagactcttcatgtgcaggactacaaggacggtaacatgtattatggtgcttacccggcttatgcctatggagcctatggtggctggggggagtacccatacctgagccatgatggagcacagacaccaactgctggtacctatgctgacatgtactatggctatgctccatatggtgttgcaaccatggggcatgatggtcagatttatgggtctcagaattaccagtacccgtcgacatacaccaagcaacagaactctactgccaagctgtcatccaatggtataagtgagaaattgactccagcgccgcaaacggatgtatctactattggtgtggatgaggtgaaaggtttgaaaaattcaaattcggtgctgaagacagaccggaacatgccaggttccaatggttcatatggccggtctagtgtgcgttctggcagctatcagaaccagactagttggtcacactatccatattatagtagtgagatgttctctgacaagcagcaaaagttcaccggcaaccacaattcgacttccaaccctaaaaccaaggggcagtcgaggaatcaaaacacgaggcagtatcctcatctcatgggtttgcaaacaccaacttcatcagtgtactcagctaatggaatttatgggtatgatgggagctatggacccggcctttggtatggatcgcacatgtataattctggattatatggtggatggaattcactgtatgatggaaagtacagaaccagaggaagaggtaacaatgggtattatgtttatggtaatggaagcatagatggctttaatgagctgaaaagagggccaagaagtggtatgtacaaaaaccagctggggcttgaagctactacccaagcaccagcaaaagagcaggatcttttgtttgctaatggttcacatcctgccatgaaggatcagtataatcaggctgactttgcggaaacatactcagacgctaaattcttcattattaaatcttacagtgaagatgatgttcacaagagcgttaagtacaatgtgtgggctagcactcccaatggtaataagaaacttgatgctgcctatcaagaggctaaagaaaaatcaagcgaaactcctgtttttcttcttttctctgtgaatgcaagtggccagtttgtcggccttgctgaaatggtgggtcgtgttgattttgaaaaaacagtagagcattggcaacaggacaaatggactggttgtttccctgtcaagtggcacattgtgaaggatgttccaaacagcttgctgaagcacatcattcttgagaacaatgaaaacaagccagtgacgaacagcagagatacacatgaggtgaagcttgagcaaggccttcaagtgcttaagattttcaaggatcatgtctgcaagacatccatactggatgacttcggcttttatgataatcgtgagaagatgatgcaagagaggaaagccaaacagcagcagtcgctgaaaaaggtcattgatgtgaagctgcccagcgtcaccgacatggagagaagtcctaaaggggagactggatcaacagaactcactggggttgggactgacgtcttgaacaaagagcgtttattaggcaaagcaggagagaaaaatggcgagaaaggaaatgatgtcgccccacaggacctgaaaacacaaactgagaagttggcgggtctaaatggctgttaatatttttcgttagctcaagccgttgacagtggtgtcggggtggaacctaaggctgtggtgggttgtttgaggaaattctgatgtcccattgagcttgtttcctatagttcataggagctagaggcttagctagttgcttgtgtttggtggtagtcatggtctgtgttctggcgtgtcaggtattttaggaatagaaggatgattaactgggttttgcaatgatggatcatgggttttgaggctgtatttttcgtttatttgcctttcctctctggattctagttcctctctctctctctctctagattctggacaagtgtagtgcttattttaagttggttggtttaagaacctgaaatgaacatgggaattctatcaagcatttacaaacttactttcctctgtacaatatgtgaaaaccgtctacttccatactttctg

SEQ ID NO: 67968 - DNA, 2444 bp, Zea Mays
ctccctttctgctgcccagccgccgtccgtccgcgcttcactatccttcattccctcccctgtcagcgacgactgggtaggctaccgccgccgccctacgctaggtgcccatctcttcgccggcgaagagcgcccaccaagctccggccaagggcgtgatggcggctgtaggcagcttgaagccggggatggagactcttcatgtgcaggactacaaggacgcgcctccggccaaggccgcggtagagagcctccagccggcgatggagagtctgcatgtgcaggattacaaggacgcgcctccggccaagggcgtggccgccgccgccgtagggagcttgcagccgggggcggagaacctgcaggtgcaggactacaaggacggtaacatgtattatggtgcttacccggcttatgcctatggagcctatggtggctggggggagtacccatacctgagccatgatggagcacagacaccaactgctatttatgggtctcagaattaccagtacccgtcgacatacaccaagcaacagaactctactgccaagctgtcatccaatggtataagtgagaaattgactccagcgccgcaaacggatgtatctactattggtgtggatgaggtgaaaggtttgaaaaattcaaattcggtgctgaagacagaccggaacatgccaggttccaatggttcatatggccggtctagtgtgcgttctggcagctatcagaaccagactagttggtcacactatccatattatagtagtgagatgttctctgacaagcagcaaaagttcaccggcaaccacaattcgacttccaaccctaaaaccaaggggcagtcgaggaatcaaaacacgaggcagtatcctcatctcatgggtttgcaaacaccaacttcatcagtgtactcagctaatggaatttatgggtatgatgggagctatggacccggcctttggtatggatcgcacatgtataattctggattatatggtggatggaattcactgtatgatggaaagtacagaaccagaggaagaggtaacaatgggtattatgtttatggtaatggaagcatagatggctttaatgagctgaaaagagggccaagaagtggtatgtacaaaaaccagctggggcttgaagctactacccaagcaccagcaaaagagcaggatcttttgtttgctaatggttcacatcctgccatgaaggatcagtataatcaggctgactttgcggaaacatactcagacgctaaattcttcattattaaatcttacagtgaagatgatgttcacaagagcgttaagtacaatgtgtgggctagcactcccaatggtaataagaaacttgatgctgcctatcaagaggctaaagaaaaatcaagcgaaactcctgtttttcttcttttctctgtgaatgcaagtggccagtttgtcggccttgctgaaatggtgggtcgtgttgattttgaaaaaacagtagagcattggcaacaggacaaatggactggttgtttccctgtcaagtggcacattgtgaaggatgttccaaacagcttgctgaagcacatcattcttgagaacaatgaaaacaagccagtgacgaacagcagagatacacatgaggtgaagcttgagcaaggccttcaagtgcttaagattttcaaggatcatgtctgcaagacatccatactggatgacttcggcttttatgataatcgtgagaagatgatgcaagagaggaaagccaaacagcagcagtcgctgaaaaaggtcattgatgtgaagctgcccagcgtcaccgacatggagagaagtcctaaaggggagactggatcaacagaactcactggggttgggactgacgtcttgaacaaagagcgtttattaggcaaagcaggagagaaaaatggcgagaaaggaaatgatgtcgccccacaggacctgaaaacacaaactgagaagttggcgggtctaaatggctgttaatatttttcgttagctcaagccgttgacagtggtgtcggggtggaacctaaggctgtggtgggttgtttgaggaaattctgatgtcccattgagcttgtttcctatagttcataggagctagaggcttagctagttgcttgtgtttggtggtagtcatggtctgtgttctggcgtgtcaggtattttaggaatagaaggatgattaactgggttttgcaatgatggatcatgggttttgaggctgtatttttcgtttatttgcctttcctctctggattctagttcctctctctctctctctctagattctggacaagtgtagtgcttattttaagttggttggtttaagaacctgaaatgaacatgggaattctatcaagcatttacaaacttactttcctctgtacaatatgtgaaaaccgtctacttccatactttctg

SEQ ID NO: 67969 - DNA, 2252 bp, Zea Mays
ctccctttctgctgcccagccgccgtccgtccgcgcttcactatccttcattccctcccctgtcagcgacgactgggtaggctaccgccgccgccctacgctaggtgcaggactacaaggacggtaacatgtattatggtgcttacccggcttatgcctatggagcctatggtggctggggggagtacccatacctgagccatgatggagcacagacaccaactgctggtacctatgctgacatgtactatggctatgctccatatggtgttgcaaccatggggcatgatggtcagatttatgggtctcagaattaccagtacccgtcgacatacaccaagcaacagaactctactgccaagctgtcatccaatggtataagtgagaaattgactccagcgccgcaaacggatgtatctactattggtgtggatgaggtgaaaggtttgaaaaattcaaattcggtgctgaagacagaccggaacatgccaggttccaatggttcatatggccggtctagtgtgcgttctggcagctatcagaaccagactagttggtcacactatccatattatagtagtgagatgttctctgacaagcagcaaaagttcaccggcaaccacaattcgacttccaaccctaaaaccaaggggcagtcgaggaatcaaaacacgaggcagtatcctcatctcatgggtttgcaaacaccaacttcatcagtgtactcagctaatggaatttatgggtatgatgggagctatggacccggcctttggtatggatcgcacatgtataattctggattatatggtggatggaattcactgtatgatggaaagtacagaaccagaggaagaggtaacaatgggtattatgtttatggtaatggaagcatagatggctttaatgagctgaaaagagggccaagaagtggtatgtacaaaaaccagctggggcttgaagctactacccaagcaccagcaaaagagcaggatcttttgtttgctaatggttcacatcctgccatgaaggatcagtataatcaggctgactttgcggaaacatactcagacgctaaattcttcattattaaatcttacagtgaagatgatgttcacaagagcgttaagtacaatgtgtgggctagcactcccaatggtaataagaaacttgatgctgcctatcaagaggctaaagaaaaatcaagcgaaactcctgtttttcttcttttctctgtgaatgcaagtggccagtttgtcggccttgctgaaatggtgggtcgtgttgattttgaaaaaacagtagagcattggcaacaggacaaatggactggttgtttccctgtcaagtggcacattgtgaaggatgttccaaacagcttgctgaagcacatcattcttgagaacaatgaaaacaagccagtgacgaacagcagagatacacatgaggtgaagcttgagcaaggccttcaagtgcttaagattttcaaggatcatgtctgcaagacatccatactggatgacttcggcttttatgataatcgtgagaagatgatgcaagagaggaaagccaaacagcagcagtcgctgaaaaaggtcattgatgtgaagctgcccagcgtcaccgacatggagagaagtcctaaaggggagactggatcaacagaactcactggggttgggactgacgtcttgaacaaagagcgtttattaggcaaagcaggagagaaaaatggcgagaaaggaaatgatgtcgccccacaggacctgaaaacacaaactgagaagttggcgggtctaaatggctgttaatatttttcgttagctcaagccgttgacagtggtgtcggggtggaacctaaggctgtggtgggttgtttgaggaaattctgatgtcccattgagcttgtttcctatagttcataggagctagaggcttagctagttgcttgtgtttggtggtagtcatggtctgtgttctggcgtgtcaggtattttaggaatagaaggatgattaactgggttttgcaatgatggatcatgggttttgaggctgtatttttcgtttatttgcctttcctctctggattctagttcctctctctctctctctctagattctggacaagtgtagtgcttattttaagttggttggtttaagaacctgaaatgaacatgggaattctatcaagcatttacaaacttactttcctctgtacaatatgtgaaaaccgtctacttccatactttctg

SEQ ID NO: 67970 - DNA, 2442 bp, Zea Mays
ctccctttctgctgcccagccgccgtccgtccgcgcttcactatccttcattccctcccctgtcagcgacgactgggtaggctaccgccgccgccctacgctaggtgcccatctcttcgccggcgaagagcgcccaccaagctccggccaagggcgtgatggcggctgtaggcagcttgaagccggggatggagactcttcatgtgcaggactacaaggacgcgcctccggccaagcaagggcgtggccgccgccgccgtagggagcttgcagccgggggcggagaacctgcaggtgcaggactacaaggacggtaacatgtattatggtgcttacccggcttatgcctatggagcctatggtggctggggggagtacccatacctgagccatgatggagcacagacaccaactgctggtacctatgctgacatgtactatggctatgctccatatggtgttgcaaccatggggcatgatggtcagatttatgggtctcagaattaccagtacccgtcgacatacaccaagcaacagaactctactgccaagctgtcatccaatggtataagtgagaaattgactccagcgccgcaaacggatgtatctactattggtgtggatgaggtgaaaggtttgaaaaattcaaattcggtgctgaagacagaccggaacatgccaggttccaatggttcatatggccggtctagtgtgcgttctggcagctatcagaaccagactagttggtcacactatccatattatagtagtgagatgttctctgacaagcagcaaaagttcaccggcaaccacaattcgacttccaaccctaaaaccaaggggcagtcgaggaatcaaaacacgaggcagtatcctcatctcatgggtttgcaaacaccaacttcatcagtgtactcagctaatggaatttatgggtatgatgggagctatggacccggcctttggtatggatcgcacatgtataattctggattatatggtggatggaattcactgtatgatggaaagtacagaaccagaggaagaggtaacaatgggtattatgtttatggtaatggaagcatagatggctttaatgagctgaaaagagggccaagaagtggtatgtacaaaaaccagctggggcttgaagctactacccaagcaccagcaaaagagcaggatcttttgtttgctaatggttcacatcctgccatgaaggatcagtataatcaggctgactttgcggaaacatactcagacgctaaattcttcattattaaatcttacagtgaagatgatgttcacaagagcgttaagtacaatgtgtgggctagcactcccaatggtaataagaaacttgatgctgcctatcaagaggctaaagaaaaatcaagcgaaactcctgtttttcttcttttctctgtgaatgcaagtggccagtttgtcggccttgctgaaatggtgggtcgtgttgattttgaaaaaacagtagagcattggcaacaggacaaatggactggttgtttccctgtcaagtggcacattgtgaaggatgttccaaacagcttgctgaagcacatcattcttgagaacaatgaaaacaagccagtgacgaacagcagagatacacatgaggtgaagcttgagcaaggccttcaagtgcttaagattttcaaggatcatgtctgcaagacatccatactggatgacttcggcttttatgataatcgtgagaagatgatgcaagagaggaaagccaaacagcagcagtcgctgaaaaaggtcattgatgtgaagctgcccagcgtcaccgacatggagagaagtcctaaaggggagactggatcaacagaactcactggggttgggactgacgtcttgaacaaagagcgtttattaggcaaagcaggagagaaaaatggcgagaaaggaaatgatgtcgccccacaggacctgaaaacacaaactgagaagttggcgggtctaaatggctgttaatatttttcgttagctcaagccgttgacagtggtgtcggggtggaacctaaggctgtggtgggttgtttgaggaaattctgatgtcccattgagcttgtttcctatagttcataggagctagaggcttagctagttgcttgtgtttggtggtagtcatggtctgtgttctggcgtgtcaggtattttaggaatagaaggatgattaactgggttttgcaatgatggatcatgggttttgaggctgtatttttcgtttatttgcctttcctctctggattctagttcctctctctctctctctctagattctggacaagtgtagtgcttattttaagttggttggtttaagaacctgaaatgaacatgggaattctatcaagcatttacaaacttactttcctctgtacaatatgtgaaaaccgtctacttccatactttctg

SEQ ID NO: 67971 - DNA, 477 bp, Zea Mays
ccacgctgccagcggcggcagcgacgacgctgctgcgtgcgcctccatcgagcccacgcgacgtttcttggacaataatagtgttgctgcatccgcctccatccatcccacgtttcctcgaggcgcaggcgccagcgtactcttcgtcgtctgagtctccagattcgctgcatcgtagaaaagactgtgtaagcattccaagctagataggtcatatatcttcaattctgatagtaacaggtccagtagtcaaagattgtgtaagcatcaaagctagatttttcttcaaccctagcatggaaaaaaacttgaatcggacaagcaagtgaaaaagatgggaactagggctatataagtaatgtatattctcgtcgccagcaggaacgacaatgatgttagcatactgtgtcaatgcaccattactaggtttaaatgtgcgatgggactgtgattaaacctgataaaatttcagcttat

SEQ ID NO: 67972 - DNA, 1039 bp, Zea Mays
acaaagagaatgacaagcagaaatgtaaccatccatccacaacatgtggctaaaatcatatacataggatacaaaagaaacccccaacccacctgccaagggacaaatctgaaaaaaaaaagatctgacatgttctaacggggcgaagccacctgcacgctcctattaggccagtgtaactcagtgaaaatcgggcatctgttacaggttattaaaatgcaaactataagcactaagcatctgacatacttgtttaattatttaatatcaaaataagcataacaaacttgatatcatgttcagtcaaaaaatttgaaattatattggttgatatcttcaaactgctaatacacaactcgtgaaaaatggggccaaacataatgaaaaagaaggcgaaagggcctctagcgtaatgattaaggcttccgagtagcatcttcatatcctgggtttgatccccctcgggggctccacccgcttccgggttacatccttcgcgccaccctacggctggtccgttgcagagtgggcgatgacggccactagggttcaggtattttctcggtcgggaccatgtttcggtcttttcttaatataatatcgggagggcagtctttccctccccgaccgagttttttataatgaaaaggaaccttttattggtgtgtataaaattaggatccaaagttaatcatttttttctgaaaacaaagttaatcaaaatcattactttgctttgtattttgtgaagcaagatagtttttcttgatttcatgtacagttttacagcctatgccctatgatagtgtcgcctctccaaataaagataagctagaggaacatccggcaatcagaataagctaagacctttattctagtctgtgaaagttatagttattggattgcaattaactccaatgcaacagccaaagagtaatcgaataagccatgaagataagacacatcatagattaatgccgtaataatttttcatacatacatgaagaaaaacatagcagaatctgactgcggtgttgct

SEQ ID NO: 67973 - DNA, 1316 bp, Zea Mays
ctcactgctgcatggatgatgcctctatatcattgaggaactaattgctaagaggcagcagcttgatgctgtaaatttcgcttatgaggctgggcttcaggagaagttcccaccagttcctcttttgaagtcctacctggaagactctaagaagacatcaaccgctgcttcagataattcaagcactagcagcggccaatcagggagcaatgtgaacaagaaagaacagtctgcactgcgagctgtcatcaagtgtgttgaggatcgtaaactagaagctgagtttccactggagggtcttcggaagcaacttgaagaactagagaaagccaagaccgagaagaagaaggcagcatcaagcgctaccagtggcggcagcggcggccctgcaaccaagcgcatccgtgcgagcactggaggcccaatgcctcctgccaaggcaggtcgtctcactaacaatgcttgcgtgtcttctctcccagctcccaccacattgacccagtctccctcccacgcgtcatacgccaacacctccccgtcccgcacctcatacgccaatacctccccatcccacgcctcatacgccacagtctccccaacccatgcatcatacgccacaccctcccctccccatgcatcatacgccacagcctccccttacccttacgacaggccggttggacacggcgtgtactgcacccggagcccgccggtgatcagggagccatatgtttacccagctgaggaggtagccaccgtcaacgtcggcattcccatggcctactccaccccgcccatgagctaccctgctgccccctacggcggctatggcaacgggatgccagcttacaccaatggaatggctcctgccttccaccaggcttactaccggtaggttcagtcaggaaacgaagaagtcgctgatgaatgacatgacaacaactgatgatgccaacgactcgaaaccccgctcaatggccctgttttgtagcgactgactacaacggtaggttgggtaccccatcttccatgtccttaccaccgctactactagatgtgttgtctttagctcctcgtctcatcttagtccgctaccgtaattttttttactactactaaggaacctggatgtaaattatgtatggtatcagcgagactgtcgtcgcagccttatgtaattctgttcagaacttttgaaaaacgaaaaaaaaagaagaaaccagcatgtaatcctgaagtaccggtctaccggatgtaccgtggacttaattagaagtgtttttttttatagtttacttgtttggtgttgatgtgtg

SEQ ID NO: 67974 - DNA, 2648 bp, Zea Mays
cctagttttgagaagggtgcctttaaaataaggccctcggattctagcgtccctcggggctcggggaggagcggcaggcacaatctccttctggtagcccgtacgcttcttctacaggcccttgcctgcccccctgtcccactgcctccacacaccattgtcatggactcatggtcaccaccaccacaccaccacacttcactcgactccacagcctccagtttatccgtttgctcgacaccattgctattatctcctcgctcgcgtaatccatcgttttccgccgcgatcagttgttcctgatcaatcctgtcgaactactactctactactctgcgtagatcgatcgggtcgatcaggctcgctcggctgaagttcatcggatcagaggctcgggctccggtttctcgcccgcaatgctgaagaaagcgtcagcaggaagagctgcggccgcgacggggcgcggcgatcccgcagcgcccgcctcgcgtcccagtcccacagccaaggtcgccgagggcggcgcctgcagcgccaggccggcctctcggctcctctccacgaggtcagtcccgagcctcttcgcggagtccccgatgacgacgagccccgccgcctccgcgcccgagctgctgtccagggccccgctccgctccggcggtagcccgggcgcggcgggcctggcgggcgtgctggtggcggaggaggccgacgagcgggggtccttgttgaggaacgggcgcagggtgctccgcgggacgcggctccgggtgcagctgccgccgccgccgccgatcgagttcggcgtgaagaacagggaggcccagctggcgctgctctcccccgtgcagcggtcgccggcgcggctggcaaggcggaggagcgaggtggaggaggagctggccggcgaggactacacctgcgtcatcgcccgcgggcccaaccccaggatgacgcacatattcgaggaccgcgtcgtcgagagctcgacctcgacctcgagctcgacctcttgcgatgggtgcaacaaggatgctgctctcttgctggtgctggaaagtcagtgcaccaagagcgtttcagtgtcccgttcgatccgggatagtcatgagcattgggggatcatcatcgtcgttagtggcttccttgtgactgatgacgactagtgaatggtttaggtgccttggaccggttccaccgaggcagaggcagtggtgtaggagtaggacacaagataagatcacggtcatagtttactgtcaaccaaccttgttagtccgacagcgacgcctttgtcagcgaccgcgaccgtagctgctcatcgtctctcttgcgactttgccagtcactcgacccacttcagcaacgtctccgaatttcatagaaatggtccatgaatttcatgggaaccagtttattttcaaagaaaaaaacacaggaaacaggcggtagttcaagcttcagcaccgcccgcctcgtagagcaagagtatctatctgcagcttgggatagcctgtgactgtgaatggcacgcacgctgatttggtggataggtaacacaagaaaacatatatggtagaaattgtcttgctactgatttggtggatagggaacacgaggggagaggatctatgcggaatccctttgctatttaaaattaaatgacaagggaattcctctctcatgaaatcactcgtgatctatatccaccaaatcagtctccaggatgtagcctctcaggttcctttgcaacacacaggaaacaggataaattcccgcgttccaaaataggcctccttttttttgtgtgtggtccatgaaccgtgacatgacactgatacacacaggttgtggccatggatccggggtccccgatctttgttgccagccctgaatttgtctccgtttttttcttttctttccacggggtccctggtgagattgagatggaccgtagatattgtctgttcagtttcctggacgaaatgggctcgaggcgacagcgagttctgcatcgaccaacggaaggcgctgtttggcggcgaacgggctggcggcgagcgggcggtgacaaactgaactctccgtcctgaatcttggcacacccgcgctatatgtgaagcgacgaaccattccgttcttcatctcgtttgaagaaattttgatccgtgctgggaccaatgctatcgggttcagggtgatttgtccctgtgtcttttttggtgattcatctctctaagttttagagctaaggctccaaacaaatgatttacatgttacctttaaacattaagcccaccttaaattaaagttttagagcttttaaagcgagctaaagtgcactaaagcttttagaactctaaaacttagtcctgaggctctaaatttgtcgttaggacatgtataaccttatttaatatgaagtcttttgagcagtctctaaatgactaagtgtaaaaaaatataagagacaaactcttcacgaagaacctgtctcttcacgactttctatacacgttgtcttttaggtgcatttatgatccagagtctcagtgttgtaccacatagtctcttatccgtatcttgtacttaaaaaaacgaactggattctcagggttgtacatgcccttacgactcttcactatagg

SEQ ID NO: 67975 - DNA, 1731 bp, Zea Mays
aaagaatgtgtggatggcctagttttgagaagggtgcctttaaaataaggccctcggattctagcgtccctcggggctcggggaggagcggcaggcacaatctccttctggtagcccgtacgcttcttctacaggcccttgcctgcccccctgtcccactgcctccacacaccattgtcatggactcatggtcaccaccaccacaccaccacacttcactcgactccacagcctccagtttatccgtttgctcgacaccattgctattatctcctcgctcgcgtaatccatcgttttccgccgcgatcagttgttcctgatcaatcctgtcgaactactactctactactctgcgtagatcgatcgggtcgatcaggctcgctcggctgaagttcatcggatcagaggctcgggctccggtttctcgcccgcaatgctgaagaaagcgtcagcaggaagagctgcggccgcgacggggcgcggcgatcccgcagcgcccgcctcgcgtcccagtcccacagccaaggtcgccgagggcggcgcctgcagcgccaggccggcctctcggctcctctccacgaggtcagtcccgagcctcttcgcggagtccccgatgacgacgagccccgccgcctccgcgcccgagctgctgtccagggccccgctccgctccggcggtagcccgggcgcggcgggcctggcgggcgtgctggtggcggaggaggccgacgagcgggggtccttgttgaggaacgggcgcagggtgctccgcgggacgcggctccgggtgcagctgccgccgccgccgccgatcgagttcggcgtgaagaacagggaggcccagctggcgctgctctcccccgtgcagcggtcgccggcgcggctggcaaggcggaggagcgaggtggaggaggagctggccggcgaggactacacctgcgtcatcgcccgcgggcccaaccccaggatgacgcacatattcgaggaccgcgtcgtcgagagctcgacctcgacctcgagctcgacctcttgcgatgggtgcaacaaggatgctgctctcttgctggtgctggaaagaggcgacagcgagttctgcatcgaccaacggaaggcgctgtttggcggcgaacgggctggcggcgagcgggcggtgacaaactgaactctccgtcctgaatcttggcacacccgcgctatatgtgaagcgacgaaccattccgttcttcatctcgtttgaagaaattttgatccgtgctgggaccaatgctatcgggttcagggtgatttgtccctgtgtcttttttggtgattcatctctctaagttttagagctaaggctccaaacaaatgatttacatgttacctttaaacattaagcccaccttaaattaaagttttagagcttttaaagcgagctaaagtgcactaaagcttttagaactctaaaacttagtcctgaggctctaaatttgtcgttaggacatgtataaccttatttaatatgaagtcttttgagcagtctctaaatgactaagtgtaaaaaaatataagagacaaactcttcacgaagaacctgtctcttcacgactttctatacacgttgtcttttaggtgcatttatgatccagagtctcagtgttgtaccacatagtctcttatccgtatcttgtacttaaaaaaacgaactggattctcagggttgtacatgcccttacgactcttcactatagg

SEQ ID NO: 67976 - DNA, 1121 bp, Zea Mays
gtagcccgtacgcttcttctacaggcccttgcctgcccccctgtcccactgcctccacacaccattgtcatggactcatggtcaccaccaccacaccaccacacttcactcgactccacagcctccagtttatccgtttgctcgacaccattgctattatctcctcgctcgcgtaatccatcgttttccgccgcgatcagttgttcctgatcaatcctgtcgaactactactgtatgttcctgatcatttgctttgcctcctcctcctcctgctcctcccttctctgctcgtctctcctccgtggccagctgagctgaccgtttcgtcccacacatcttgctgtttctagctactactctgcgtagatcgatcgggtcgatcaggctcgctcggctgaagttcatcggatcagaggctcgggctccggtttctcgcccgcaatgctgaagaaagcgtcagcaggaagagctgcggccgcgacggggcgcggcgatcccgcagcgcccgcctcgcgtcccagtcccacagccaaggtcgccgagggcggcgcctgcagcgccaggccggcctctcggctcctctccacgaggtcagtcccgagcctcttcgcggagtccccgatgacgacgagccccgccgcctccgcgcccgagctgctgtccagggccccgctccgctccggcggtagcccgggcgcggcgggcctggcgggcgtgctggtggcggaggaggccgacgagcgggggtccttgttgaggaacgggcgcagggtgctccgcgggacgcggctccgggtgcagctgccgccgccgccgccgatcgagttcggcgtgaagaacagggaggcccagctggcgctgctctcccccgtgcagcggtcgccggcgcggctggcaaggcggaggagcgaggtggaggaggagctggccggcgaggactacacctgcgtcatcgcccgcgggcccaaccccaggatgacgcacatattcgaggaccgcgtcgtcgagagctcgacctcgacctcgagctcgacctcttgcgatgggtgcaacaaggatgctgctctcttgctggtgctggaaagctctacatggtgctgtctctgtctcctggatggatt

SEQ ID NO: 67977 - DNA, 1085 bp, Zea Mays
gcgagaacctaacatctgccaacaatccaacatctcgcagtcgcgttcgctgctcctcggtcctcagccctcacacgccgcccgcccgcgacgaagcccgcatagccgccgccgagcgccggagttgccacctaccgcgcgcccatctgccgccgatgctgcgcactcatctgctacccgaggcttggcggcggccactgccccaggaggcaggagcgcgacaccaaagtccgcgcatttccttccaccgagccgcaccaagatccgggatccaaggtggccaagttcgttgcggcggccctgaacttcgatggctgtcctcgtcacggaattcgtcctcagattcacagccatggactacaatgtgcgtgaatgcagactataccactcctgctgattctgtcgccacctcggagcaagcaggtggtgaagctgaggccaccttagaaacaggtggtgaagctgcagccaccttggagcaaacaggtggcgaaaccgaagagccaacaattgtagcacctgctaatgaatatacagagcaggaggctgctcctcagcagaagtgtgcaaagatacacgacttttgcctagggataccttttggtggacttttactctccatgggccttattggatttctcttctggaggagccctgcgagtcttacctttggcgttgcacctggccttgccatattggccctggctgtacttagcctcaatgtctggaggagcgggaagtccagcttaccgttcatactggcgcaagcaggcattgccgctgccgtagcatggaagcacggccaggcgtacaccactacgaggaagctgcttccgtggggattctacgtcgcgctgagtgccgcaatgatctgcttctactcctacgttcttcttgccggagggaatccgcctcctaagaaggcgaaggcgaaggcgaaggctgctgcttgatttgatgttgaaggcattcaccggagcgtctcataattgcactaccttcctctgagagaagcacattctgccacaagaggctcaacatgctattgcaattcgatatgggctgctatgattttccttgtgggt

SEQ ID NO: 67978 - DNA, 2221 bp, Zea Mays
cccatttctacctttccttcctggttcggtttggtatggtttggtttgggggaggaaatagcctgcctgatccaagaacgcccattgcttgagcaagggacggcggcggcggcggcggtggatcatggaggcccagctgttcctcgagcgaagcgagcgcaagcactgccaagaaaagcagagctgaccggccgtcgtcgaagcggagcgccgaacgcgctcgccgagggaggaataatttcgacctagcacgcctgacagaagtgcaagattacaggatcttcgctgcgacgtggaacgtgggtggcaagtcaccacccagggggctaaatctagatgaatggctccatacttctccttctgccgatatctatgtcttagggtttcaagagattgtccctttgaacgcgggaaacgttcttggcactgaagataaccttccagccaagaagtgggtgtcccttatcaggcggacgctgaacaagaatcctggatctagtggctgtggtggtggctaccatacaccctcaccagtcctggatccggttgtcgagttagacgccgacttcgaggggtctgcgagaaggcaggacaacttctcattcttccaccgtcggtcgttccacaatctcagccgtagcttaagaatggacggggacttgatgttcccgcagccaaggctagatcgcaggttcagcgtctgcgatccagtcaacctaggaggcagaccaagcgattttgatggaagtctgcgttgccccggatcacctgatgaggatacaatcgatatggaaatgggtgacagcgtacaagtttcaccattccctcatagctacagtgcatctgcaccttccgaacagaacgatgaccaatcaaacagctccaggtattgcttagttgccagcaaacaaatggtcggcatatttctcacggtctgggtgcgcaatgaaataagagacgacgtcaggaacttgaaagtctcttgcgtgggtagaggattgatgggttatctcggaaacaagggttcgatttcagtgagcatgtgcctgcaccagacgagcttctgcttcgtatgttgccacctgacctcgggggagaaggaaggcgacgagctgcgcaggaactccgacgtcctggagatcctaaggaagaccaggttcccgcgggtccgcggcgccggtgacgtcaggtcacctgagacgatcctcgagcacgatcgggttatatggcttggggatttgaactaccggatcgccctgtcttactgctcggcgaaggctctcgtggaaatgcatagctggaagcagttattggagaaagaccagctgcggatgcaacagagatacggacgagttttccagggctggaaagaagggaggatctacttccctcccacgtacaaatactctttcaactcagaccggtacgccggcgagggcaggcaccctaaggagaagcggaggacgccagcatggtgcgaccgcatcctctggcacggcaacggcctgagccagctgtgctacgtccgcggcgagtcccgcttctccgaccaccggccggtgtatggcatcttcctggcggaggtcggcgtcgtgcgccagcggaggaggaacaacgccgggtacttcggatctagggtcgaggtggaggagctgttgccgcgctctcggagctatagactgagagatgatgaagttttgctgagctgacttatagcatgatataatagaaggtacccctcccccaacagcacccaagagagaatgtgcagacactaactggatgaaaaaaaaggacgctgggcggtattttttgctcaccaagagcaggcaggcaacagcgggacacgcacgacgagtatgtcgccgctcgtcgtcggagacgtagcagcagcaggcatgccgctgactggctatagagtttacccccagctttagccggcccacacttagttattcctcctcctagcaactgcatttgcttcaattttgttttcctcgtttttttggtaggtggaccttgggagtgtcagcaaacacaacatgttttcttcctcttctttttttgatgattcttttcgtttgtaagaaactttgtaaaaacctgctggtgtctgtgctgtgcttgccatgcaagtcgtggaacctttttaagataagctcagcatggctagagagcagtttggttggttgagggggcaaggcattttcactcatttttg

SEQ ID NO: 67979 - DNA, 3574 bp, Zea Mays
ctcttccctccctgggggtttgggcgacaaggccgagagagagagaaaaaaaaaaggtggaggagagacaaggccaaagcaaagcagccagcgcgagcaggggaggtagagagagagagaaaaaaaagagcagcgccacgaacagaacaacaagcctcgcctcactttctctctcctccaccatccctttttttctctctctctactctctccccttgtcgtcctccggccctctccgcattcctctccccctgccacctcgtgtcctactactccaactcctagcacccccaccccacctccccctgtattctctctagtagtagcaactagcaagtgctacggggctacagcctacaagtagtaggccttggtacccagccgacgaatcccggctcccgcgtcgtcctagaggccggctaaagctggcgaggagggtggcggcgcggcggcagctgcactgccggcaggagagagcttctcggcctgcgccgtttgctgctccccactggtcgttggagggctggcggttccgccctctggaaaaaaaaaaaaaatccaatcttggctcggctcggctcgtggcggccggctgcctgatcgggcctcgccccgtggctagttcgatctgagattcgaagaccacccccgggtgaaaacctctccgcctctgaggagtggatcctggattcgagtcttcccgctgcagggagatcgcggcttgaggaggtacggtggtggtggtggcggcgcggcgacagatccccctatgcgccgcctgccgtgccgtgtgctgagcgcggagcaggagctatgagacaatgacggaagaaagcgccaagaagagcaagctttcgtggtccaagtccctcgtcaggaagtggctcaacatccggcccagggcgcaggacttccatgccgatttcgacgccggccaccagggtatggttgatgcatcgctttggccgtcccgacacgacacgagtggtggctgcagcccatttctacctttccttcctggttcggtttggtatggtttggtttgggggaggaaatagcctgcctgatccaagaacgcccattgcttgaggttgaggttatcctcttaataacagtcaacgcccagttgtttctgtagttatccgcattagattcccagtgtcgactcgaactcgatcgatggtagatcagcaaccatgtgaaatgttgctatcagacacttttttccgcccgtagacatctctttgcgcacatcagtttccggtcttgatctcgtgatgcaccaccagccccgtactggtccaccaaccaaacaagggatcccaccaaacaaatatccgccttttttttttgcaacagatcctgcaaaaaccgtctggttgatttgtccgaatcgatttcctgactgaaccgggtagagagatttcaccagagatcacgagcaaacaagggacggcggcggcggcggcggtggatcatggaggcccagctgttcctcgagcgaagcgagcgcaagcactgccaagaaaagcagagctgaccggccgtcgtcgaagcggagcgccgaacgcgctcgccgagggaggaataatttcgacctagcacgcctgacagaagtgcaagattacaggatcttcgctgcgacgtggaacgtgggtggcaagtcaccacccagggggctaaatctagatgaatggctccatacttctccttctgccgatatctatgtcttagggtttcaagagattgtccctttgaacgcgggaaacgttcttggcactgaagataaccttccagccaagaagtgggtgtcccttatcaggcggacgctgaacaagaatcctggatctagtggctgtggtggtggctaccatacaccctcaccagtcctggatccggttgtcgagttagacgccgacttcgaggggtctgcgagaaggcaggacaacttctcattcttccaccgtcggtcgttccacaatctcagccgtagcttaagaatggacggggacttgatgttcccgcagccaaggctagatcgcaggttcagcgtctgcgatccagtcaacctaggaggcagaccaagcgattttgatggaagtctgcgttgccccggatcacctgatgaggatacaatcgatatggaaatgggtgacagcgtacaagtttcaccattccctcatagctacagtgcatctgcaccttccgaacagaacgatgaccaatcaaacagctccaggtattgcttagttgccagcaaacaaatggtcggcatatttctcacggtctgggtgcgcaatgaaataagagacgacgtcaggaacttgaaagtctcttgcgtgggtagaggattgatgggttatctcggaaacaagggttcgatttcagtgagcatgtgcctgcaccagacgagcttctgcttcgtatgttgccacctgacctcgggggagaaggaaggcgacgagctgcgcaggaactccgacgtcctggagatcctaaggaagaccaggttcccgcgggtccgcggcgccggtgacgtcaggtcacctgagacgatcctcgagcacgatcgggttatatggcttggggatttgaactaccggatcgccctgtcttactgctcggcgaaggctctcgtggaaatgcatagctggaagcagttattggagaaagaccagctgcggatgcaacagagatacggacgagttttccagggctggaaagaagggaggatctacttccctcccacgtacaaatactctttcaactcagaccggtacgccggcgagggcaggcaccctaaggagaagcggaggacgccagcatggtgcgaccgcatcctctggcacggcaacggcctgagccagctgtgctacgtccgcggcgagtcccgcttctccgaccaccggccggtgtatggcatcttcctggcggaggtcggcgtcgtgcgccagcggaggaggaacaacgccgggtacttcggatctagggtcgaggtggaggagctgttgccgcgctctcggagctatagactgagagatgatgaagttttgctgagctgacttatagcatgatataatagaaggtacccctcccccaacagcacccaagagagaatgtgcagacactaactggatgaaaaaaaaggacgctgggcggtattttttgctcaccaagagcaggcaggcaacagcgggacacgcacgacgagtatgtcgccgctcgtcgtcggagacgtagcagcagcaggcatgccgctgactggctatagagtttacccccagctttagccggcccacacttagttattcctcctcctagcaactgcatttgcttcaattttgttttcctcgtttttttggtaggtggaccttgggagtgtcagcaaacacaacatgttttcttcctcttctttttttgatgattcttttcgtttgtaagaaactttgtaaaaacctgctggtgtctgtgctgtgcttgccatgcaagtcgtggaacctttttaagataagctcagcatggctagagagcagtttggttggttgagggggcaaggcattttcactcatttttg

SEQ ID NO: 67980 - DNA, 3488 bp, Zea Mays
ctcctcttccctccctgggggtttgggcgacaaggccgagagagagagaaaaaaaaaaggtggaggagagacaaggccaaagcaaagcagccagcgcgagcaggggaggtagagagagagagaaaaaaaagagcagcgccacgaacagaacaacaagcctcgcctcactttctctctcctccaccatccctttttttctctctctctactctctccccttgtcgtcctccggccctctccgcattcctctccccctgccacctcgtgtcctactactccaactcctagcacccccaccccacctccccctgtattctctctagtagtagcaactagcaagtgctacggggctacagcctacaagtagtaggccttggtacccagccgacgaatcccggctcccgcgtcgtcctagaggccggctaaagctggcgaggagggtggcggcgcggcggcagctgcactgccggcaggagagagcttctcggcctgcgccgtttgctgctccccactggtcgttggagggctggcggttccgccctctggaaaaaaaaaaaaaatccaatcttggctcggctcggctcgtggcggccggctgcctgatcgggcctcgccccgtggctagttcgatctgagattcgaagaccacccccgggtgaaaacctctccgcctctgaggagtggatcctggattcgagtcttcccgctgcagggagatcgcggcttgaggaggtacggtggtggtggtggcggcgcggcgacagatccccctatgcgccgcctgccgtgccgtgtgctgagcgcggagcaggagctatgagacaatgacggaagaaagcgccaagaagagcaagctttcgtggtccaagtccctcgtcaggaagtggctcaacatccggcccagggcgcaggacttccatgccgatttcgacgccggccaccaggcaagggacggcggcggcggcggcggtggatcatggaggcccagctgttcctcgagcgaagcgagcgcaagcactgccaagaaaagcagagctgaccggccgtcgtcgaagcggagcgccgaacgcgctcgccgagggaggaataatttcgacctagcacgcctgacagaagtgcaagattacaggatcttcgctgcgacgtggaacgtgggtggcaagtcaccacccagggggctaaatctagatgaatggctccatacttctccttctgccgatatctatgtcttagggtttcaagagattgtccctttgaacgcgggaaacgttcttggcactgaagataaccttccagccaagaagtgggtgtcccttatcaggcggacgctgaacaagaatcctggatctagtggctgtggtggtggctaccatacaccctcaccagtcctggatccggttgtcgagttagacgccgacttcgaggggtctgcgagaaggcaggacaacttctcattcttccaccgtcggtcgttccacaatctcagccgtagcttaagaatggacggggacttgatgttcccgcagccaaggctagatcgcaggttcagcgtctgcgatccagtcaacctaggaggcagaccaagcgattttgatggaagtctgcgttgccccggatcacctgatgaggatacaatcgatatggaaatgggtgacagcgtacaagtttcaccattccctcatagctacagtgcatctgcaccttccgaacagaacgatgaccaatcaaacagctccaggtattgcttagttgccagcaaacaaatggtcggcatatttctcacggtctgggtgcgcaatgaaataagagacgacgtcaggaacttgaaagtctcttgcgtgggtagaggattgatgggttatctcggaaacaagggttcgatttcagtgagcatgtgcctgcaccagacgagcttctgcttcgtatgttgccacctgacctcgggggagaaggaaggcgacgagctgcgcaggaactccgacgtcctggagatcctaaggaagaccaggttcccgcgggtccgcggcgccggtgacgtcaggtcacctgagacgatcctcgagcacgatcgggttatatggcttggggatttgaactaccggatcgccctgtcttactgctcggcgaaggctctcgtggaaatgcatagctggaagcagttattggagaaagaccagctgcggatgcaacagagatacggacgagttttccagggctggaaagaagggaggatctacttccctcccacgtacaaatactctttcaactcagaccggtacgccggcgagggcaggcaccctaaggagaagcggaggacgccagcatggtgcgaccgcatcctctggcacggcaacggcctgagccagctgtgctacgtccgcggcgagtcccgcttctccgaccaccggccggtgtatggcatcttcctggcggaggtcggcgtcgtgcgccagcggaggaggaacaacgccgggtacttcggatctagggtcgaggtggaggagctgttgccgcgctctcggagctatagactgagagatgatgaagttttgctgagctgacttatagcatgatataatagaaggtaagctaacttgtgtgtgtgtgttttttttttttgtgtgtgtcactgataagtagtccccaaatgataccacagcttgcactctctgatctggctgccaaatctcgaggccctgcagagataatatgccctctgcgctttgttgactttgcgttcattttttttcttctgtttccctgttggcaagcgttggctttttactactagtttagtgctctccactgtgcattccagattcagttcagttcagttcagttctctaggcagtcagatgcgagcacgcttaaacaattccgtttcccccggcccctcctccctcggcgatctgtttgccgacttgatgcatatgctcggtgtcggtgacacccggaccctaatggcacggtgtgtttttgtttggcttgcttgatggcaggtacccctcccccaacagcacccaagagagaatgtgcagacactaactggatgaaaaaaaaggacgctgggcggtattttttgctcaccaagagcaggcaggcaacagcgggacacgcacgacgagtatgtcgccgctcgtcgtcggagacgtagcagcagcaggcatgccgctgactggctatagagtttacccccagctttagccggcccacacttagttattcctcctcctagcaactgcatttgcttcaattttgttttcctcgtttttttggtaggtggaccttgggagtgtcagcaaacacaacatgttttcttcctcttctttttttgatgattcttttcgtttgtaagaaactttgtaaaaacctgctggtgtctgtgctgtgcttgccatgcaagtcgtggaacctttttaagataagctcagcatggctagagagcagtttggttggttgagggggcaaggcattttcactcatttttg

SEQ ID NO: 67981 - DNA, 2980 bp, Zea Mays
cggctcttctttttccgtccgtcctcctcttccctccctgggggtttgggcgacaaggccgagagagagagaaaaaaaaaaggtggaggagagacaaggccaaagcaaagcagccagcgcgagcaggggaggtagagagagagagaaaaaaaagagcagcgccacgaacagaacaacaagcctcgcctcactttctctctcctccaccatccctttttttctctctctctactctctccccttgtcgtcctccggccctctccgcattcctctccccctgccacctcgtgtcctactactccaactcctagcacccccaccccacctccccctgtattctctctagtagtagcaactagcaagtgctacggggctacagcctacaagtagtaggccttggtacccagccgacgaatcccggctcccgcgtcgtcctagaggccggctaaagctggcgaggagggtggcggcgcggcggcagctgcactgccggcaggagagagcttctcggcctgcgccgtttgctgctccccactggtcgttggagggctggcggttccgccctctggaaaaaaaaaaaaaatccaatcttggctcggctcggctcgtggcggccggctgcctgatcgggcctcgccccgtggctagttcgatctgagattcgaagaccacccccgggtgaaaacctctccgcctctgaggagtggatcctggattcgagtcttcccgctgcagggagatcgcggcttgaggaggtacggtggtggtggtggcggcgcggcgacagatccccctatgcgccgcctgccgtgccgtgtgctgagcgcggagcaggagctatgagacaatgacggaagaaagcgccaagaagagcaagctttcgtggtccaagtccctcgtcaggaagtggctcaacatccggcccagggcgcaggacttccatgccgatttcgacgccggccaccaggcaagggacggcggcggcggcggcggtggatcatggaggcccagctgttcctcgagcgaagcgagcgcaagcactgccaagaaaagcagagctgaccggccgtcgtcgaagcggagcgccgaacgcgctcgccgagggaggaataatttcgacctagcacgcctgacagaagtgcaagattacaggatcttcgctgcgacgtggaacgtgggtggcaagtcaccacccagggggctaaatctagatgaatggctccatacttctccttctgccgatatctatgtcttagggtttcaagagattgtccctttgaacgcgggaaacgttcttggcactgaagataaccttccagccaagaagtgggtgtcccttatcaggcggacgctgaacaagaatcctggatctagtggctgtggtggtggctaccatacaccctcaccagtcctggatccggttgtcgagttagacgccgacttcgaggggtctgcgagaaggcaggacaacttctcattcttccaccgtcggtcgttccacaatctcagccgtagcttaagaatggacggggacttgatgttcccgcagccaaggctagatcgcaggttcagcgtctgcgatccagtcaacctaggaggcagaccaagcgattttgatggaagtctgcgttgccccggatcacctgatgaggatacaatcgatatggaaatgggtgacagcgtacaagtttcaccattccctcatagctacagtgcatctgcaccttccgaacagaacgatgaccaatcaaacagctccaggtattgcttagttgccagcaaacaaatggtcggcatatttctcacggtctgggtgcgcaatgaaataagagacgacgtcaggaacttgaaagtctcttgcgtgggtagaggattgatgggttatctcggaaacaagggttcgatttcagtgagcatgtgcctgcaccagacgagcttctgcttcgtatgttgccacctgacctcgggggagaaggaaggcgacgagctgcgcaggaactccgacgtcctggagatcctaaggaagaccaggttcccgcgggtccgcggcgccggtgacgtcaggtcacctgagacgatcctcgagcacgatcgggttatatggcttggggatttgaactaccggatcgccctgtcttactgctcggcgaaggctctcgtggaaatgcatagctggaagcagttattggagaaagaccagctgcggatgcaacagagatacggacgagttttccagggctggaaagaagggaggatctacttccctcccacgtacaaatactctttcaactcagaccggtacgccggcgagggcaggcaccctaaggagaagcggaggacgccagcatggtgcgaccgcatcctctggcacggcaacggcctgagccagctgtgctacgtccgcggcgagtcccgcttctccgaccaccggccggtgtatggcatcttcctggcggaggtcggcgtcgtgcgccagcggaggaggaacaacgccgggtacttcggatctagggtcgaggtggaggagctgttgccgcgctctcggagctatagactgagagatgatgaagttttgctgagctgacttatagcatgatataatagaaggtacccctcccccaacagcacccaagagagaatgtgcagacactaactggatgaaaaaaaaggacgctgggcggtattttttgctcaccaagagcaggcaggcaacagcgggacacgcacgacgagtatgtcgccgctcgtcgtcggagacgtagcagcagcaggtggaccttgggagtgtcagcaaacacaacatgttttcttcctcttctttttttgatgattcttttcgtttgtaagaaactttgtaaaaacctgctggtgtctgtgctgtgcttgccatgcaagtcgtggaacctttttaagataagctcagcatggctagagagcagtttggttggttgagggggcaaggcattttcactcatttttg

SEQ ID NO: 67982 - DNA, 1967 bp, Zea Mays
cgacacgagtggtggctgcagcccatttctacctttccttcctggttcggtttggtatggtttggtttgggggaggaaatagcctgcctgatccaagaacgcccattgcttgagcaagggacggcggcggcggcggcggtggatcatggaggcccagctgttcctcgagcgaagcgagcgcaagcactgccaagaaaagcagagctgaccggccgtcgtcgaagcggagcgccgaacgcgctcgccgagggaggaataatttcgacctagcacgcctgacagaagtgcaagattacaggatcttcgctgcgacgtggaacgtgggtggcaagtcaccacccagggggctaaatctagatgaatggctccatacttctccttctgccgatatctatgtcttagggtttcaagagattgtccctttgaacgcgggaaacgttcttggcactgaagataaccttccagccaagaagtgggtgtcccttatcaggcggacgctgaacaagaatcctggatctagtggctgtggtggtggctaccatacaccctcaccagtcctggatccggttgtcgagttagacgccgacttcgaggggtctgcgagaaggcaggacaacttctcattcttccaccgtcggtcgttccacaatctcagccgtagcttaagaatggacggggacttgatgttcccgcagccaaggctagatcgcaggttcagcgtctgcgatccagtcaacctaggaggcagaccaagcgattttgatggaagtctgcgttgccccggatcacctgatgaggatacaatcgatatggaaatgggtgacagcgtacaagtttcaccattccctcatagctacagtgcatctgcaccttccgaacagaacgatgaccaatcaaacagctccaggtattgcttagttgccagcaaacaaatggtcggcatatttctcacggtctgggtgcgcaatgaaataagagacgacgtcaggaacttgaaagtctcttgcgtgggtagaggattgatgggttatctcggaaacaagggttcgatttcagtgagcatgtgcctgcaccagacgagcttctgcttcgtatgttgccacctgacctcgggggagaaggaaggcgacgagctgcgcaggaactccgacgtcctggagatcctaaggaagaccaggttcccgcgggtccgcggcgccggtgacgtcaggtcacctgagacgatcctcgagcacgatcgggttatatggcttggggatttgaactaccggatcgccctgtcttactgctcggcgaaggctctcgtggaaatgcatagctggaagcagttattggagaaagaccagctgcggatgcaacagagatacggacgagttttccagggctggaaagaagggaggatctacttccctcccacgtacaaatactctttcaactcagaccggtacgccggcgagggcaggcaccctaaggagaagcggaggacgccagcatggtgcgaccgcatcctctggcacggcaacggcctgagccagctgtgctacgtccgcggcgagtcccgcttctccgaccaccggccggtgtatggcatcttcctggcggaggtcggcgtcgtgcgccagcggaggaggaacaacgccgggtacttcggatctagggtcgaggtggaggagctgttgccgcgctctcggagctatagactgagagatgatgaagttttgctgagctgacttatagcatgatataatagaagcttgcactctctgatctggctgccaaatctcgaggccctgcagagataatatgccctctgcgctttgttgactttgcgttcattttttttcttctgtttccctgttggcaagcgttggctttttactactagtttagtgctctccactgtgcattccagattcagttcagttcagttcagttctctaggcagtcagatgcgagcacgcttaaac

SEQ ID NO: 67983 - DNA, 3044 bp, Zea Mays
ctcttccctccctgggggtttgggcgacaaggccgagagagagagaaaaaaaaaaggtggaggagagacaaggccaaagcaaagcagccagcgcgagcaggggaggtagagagagagagaaaaaaaagagcagcgccacgaacagaacaacaagcctcgcctcactttctctctcctccaccatccctttttttctctctctctactctctccccttgtcgtcctccggccctctccgcattcctctccccctgccacctcgtgtcctactactccaactcctagcacccccaccccacctccccctgtattctctctagtagtagcaactagcaagtgctacggggctacagcctacaagtagtaggccttggtacccagccgacgaatcccggctcccgcgtcgtcctagaggccggctaaagctggcgaggagggtggcggcgcggcggcagctgcactgccggcaggagagagcttctcggcctgcgccgtttgctgctccccactggtcgttggagggctggcggttccgccctctggaaaaaaaaaaaaaatccaatcttggctcggctcggctcgtggcggccggctgcctgatcgggcctcgccccgtggctagttcgatctgagattcgaagaccacccccgggtgaaaacctctccgcctctgaggagtggatcctggattcgagtcttcccgctgcagggagatcgcggcttgaggaggtacggtggtggtggtggcggcgcggcgacagatccccctatgcgccgcctgccgtgccgtgtgctgagcgcggagcaggagctatgagacaatgacggaagaaagcgccaagaagagcaaggtgtcaccggcggccggttcaatgcctttttttccccctcccctcccttcttctccatttttaagctctatttttctcaggctgtggtagcagctagcagttgccaagcagtaggcgctcgccgttcctttttttcgtgaccccgcagctcatgtctcctcccggctcttctccttgccgtgtgcagctttcgtggtccaagtccctcgtcaggaagtggctcaacatccggcccagggcgcaggacttccatgccgatttcgacgccggccaccaggcaagggacggcggcggcggcggcggtggatcatggaggcccagctgttcctcgagcgaagcgagcgcaagcactgccaagaaaagcagagctgaccggccgtcgtcgaagcggagcgccgaacgcgctcgccgagggaggaataatttcgacctagcacgcctgacagaagtgcaagattacaggatcttcgctgcgacgtggaacgtgggtggcaagtcaccacccagggggctaaatctagatgaatggctccatacttctccttctgccgatatctatgtcttagggtttcaagagattgtccctttgaacgcgggaaacgttcttggcactgaagataaccttccagccaagaagtgggtgtcccttatcaggcggacgctgaacaagaatcctggatctagtggctgtggtggtggctaccatacaccctcaccagtcctggatccggttgtcgagttagacgccgacttcgaggggtctgcgagaaggcaggacaacttctcattcttccaccgtcggtcgttccacaatctcagccgtagcttaagaatggacggggacttgatgttcccgcagccaaggctagatcgcaggttcagcgtctgcgatccagtcaacctaggaggcagaccaagcgattttgatggaagtctgcgttgccccggatcacctgatgaggatacaatcgatatggaaatgggtgacagcgtacaagtttcaccattccctcatagctacagtgcatctgcaccttccgaacagaacgatgaccaatcaaacagctccaggtattgcttagttgccagcaaacaaatggtcggcatatttctcacggtctgggtgcgcaatgaaataagagacgacgtcaggaacttgaaagtctcttgcgtgggtagaggattgatgggttatctcggaaacaagtgagcatgtgcctgcaccagacgagcttctgcttcgtatgttgccacctgacctcgggggagaaggaaggcgacgagctgcgcaggaactccgacgtcctggagatcctaaggaagaccaggttcccgcgggtccgcggcgccggtgacgtcaggtcacctgagacgatcctcgagcacgatcgggttatatggcttggggatttgaactaccggatcgccctgtcttactgctcggcgaaggctctcgtggaaatgcatagctggaagcagttattggagaaagaccagctgcggatgcaacagagatacggacgagttttccagggctggaaagaagggaggatctacttccctcccacgtacaaatactctttcaactcagaccggtacgccggcgagggcaggcaccctaaggagaagcggaggacgccagcatggtgcgaccgcatcctctggcacggcaacggcctgagccagctgtgctacgtccgcggcgagtcccgcttctccgaccaccggccggtgtatggcatcttcctggcggaggtcggcgtcgtgcgccagcggaggaggaacaacgccgggtacttcggatctagggtcgaggtggaggagctgttgccgcgctctcggagctatagactgagagatgatgaagttttgctgagctgacttatagcatgatataatagaaggtaagctaacttgtgtgtgtgtgttttttttttttgtgtgtgtcactgataagtagtccccaaatgataccacagcttgcactctctgatctggctgccaaatctcgaggccctgcagagataatatgccctctgcgctttgttgactttgcgttcattttttttcttctgtttccctgttggcaagcgttggctttttactactagtttagtgctctccactgtgcattccagattcagttcagttcagttcagttctctaggcagtcagatgcgagcacgcttaaac

SEQ ID NO: 67984 - DNA, 758 bp, Zea Mays
cacatcatccttcatcaggaccgttgaagcgtcaaggaaaggaactagaccggagactgcccttaggatgctgcaacaactgtgaacagcagcatctgcaggggaccatgctcaccttctccacccaagcatctttgtattccacaatgtttattatacatgtattagcacaagatcatggcaacgaaacaaatcatgtttcctaacatcggatagcagccgtgcatgccctacaaggaaacaaagatttatgacgccgaaggtcgtaattggacacaaagtatgagcatacctcctggtgtgctgatcggcggcaccggtcggtctggcgtgcgaggcggatcttcttcaagacatacctgtagcaaaacgaggcaggctgagtgacaccatggaaacaaagcaagcaagcatccatccataccttttcctctcagccttgtgcctcaccaggagcgccgagccgaacgaacccttcccaatctgctccagcacctcgtactgctccatccctgtgactgtcaagctcctggctggctcagaaatcacctgcacggtgggcgaagaatgttgtcagagaaattcatcgtgccagtaaatgaaatgtgaccggaacataaaagagaacctcttttttattatttttttatgtaaaaaaaggaaagttcaagtttgcgaatgctggttgtaaacccattgcatggatgagcatttgaacaataaagtcagaacgtgaagggaacgaagcaagaactgat

SEQ ID NO: 67985 - DNA, 798 bp, Zea Mays
aaaatattggtcgaaacatgccacttgataagttattcactatcttttctggctctattttcttcctttttgcaaggcaaggtcattctggagtctgcaattctgacaacagtggtcgtgctcagccttaccgcatacactttctgggccgtgaataggggcaaagacttcagcttcctgggtcctttcctgttcgccgccatcatagtgctgcttgtgttcgcactcatccagatcctgttcccactgggcaagctctcccagatgatctacggcgggctggcgtcgctcatcttcagcgggtacatcgtctacgacacaaacaacatcatcaagcgctacacgtacgaccagtacgtctgggccgcagtctcactgtacctggacgttatcaacctcttcctgtccctgatgaccctcttcagggcagccgactaggcgctctgctctcatcctgtctatctacgagtcggtgcctgaatgctcccgtggttaagctccggtacccagaattccagttccaagaatagagttgtatatagctacccgcgttgcctttctactagtatggtcttattcggcttgactcggttcggtcagagtcttgatacgtagttggatcgcgaacaaatgaaccttgcatgggagtatggagagccgtctgctttatgatcctcatttgcctgcccaccacgttgtatcagctgaaagctgaaaacaacatgtgggctgttgtctgccaagaatagaattgtgaaccactggagaaccgtataaaacgggccacctaccgcctgc

SEQ ID NO: 67986 - DNA, 1257 bp, Zea Mays
ccagcatcatatctattcatcttgctctcctctgtccaaaaaggaggcgccgcgctcctcttcttctacgccgttcactctctctagtctctcccttcccttctccacgcctccgcccccactcgtgagaccctacctagccctagcgccagcaccacccgcccaacctcccggagagagagaggaggaggccttcgccgccgccgttaccgtcggccgaggcgccagaatgttcgggtaccagaagggcctcgacgtcgaggcggggacatcgggcgccgccgccacgggcggcgcgcgccagctctacccggggatgcaggagagccccgagctgcgctgggcgctcatccgcaagatctacgtcattctctccctccagctgctcctcaccgccgtcgtcgccgcagtcgtcgtcaagtgctgtgcccgctgtacttctaccacgagaagcacccagtcaacctgatcctgctcggcctcttcaccgttgccatcagctttgctgtgggcatgacatgtgccttcaccagtggcaaggtcattctggagtctgcaattctgacaacagtggtcgtgctcagccttaccgcatacactttctgggccgtgaataggggcaaagacttcagcttcctgggtcctttcctgttcgccgccatcatagtgctgcttgtgttcgcactcatccagatcctgttcccactgggcaagctctcccagatgatctacggcgggctggcgtcgctcatcttcagcgggtacatcgtctacgacacaaacaacatcatcaagcgctacacgtacgaccagtacgtctgggccgcagtctcactgtacctggacgttatcaacctcttcctgtccctgatgaccctcttcagggcagccgactaggcgctctgctctcatcctgtctatctacgagtcggtgcctgaatgctcccgtggttaagctccggtacccagaattccagttccaagaatagagttgtatatagctacccgcgttgcctttctactagtatggtcttattcggcttgactcggttcggtcagagtcttgatacgtagttggatcgcgaacaaatgaaccttgcatgggagtatggagagccgtctgctttatgatcctcatttgcctgcccaccacgttgtatcagctgaaagctgaaaacaacatgtgggctgttgtctgccaagaatagaattgtgaaccactggagaaccgtataaaacgggccacctaccgcctgc

SEQ ID NO: 67987 - DNA, 2772 bp, Zea Mays
gccagcgaggcagcgaccgcgatcgcgaccctttcctcctccgtctctctcccgccgcgccagttccggtccccgccccccgacgctttatccccatcccccgtcccctcgccttccagaaccttcctttcccgaaatagccaaatccataccctatccccctacccaccattccagagccactgcatctagtaggctgctgagctacccaccctccccgcgctcgtgacggctcacccacccccgccgtggttccgggcaacagggaagaagatcccgccctggtgccaccacgaggtcccagaagctcccgccttcccgctcaaatctctcctatttctggttcccgccgcggaagatcaacttcttgctgtgttcgtcgtttcaggcacccggcggctttgatttcctctccgcccctggcgtctggcgtggtgctctggcccccagtttgtcggctgctttctacctgtacttgcagagctgtaggtgggggtaaacatggtgaggtggtcttgccaggatgacaccttatcatgttccctatccccgtgctagatgcgcgccggccgccgtgtgtgtgtatgccttaacgtcgatgcgtgccttgtactcctgtgtggccgtgtgctaggggcagctgctcgttgctgctcttttacaacggagttttactgacattgtccaacagactattccattccggtgtcagagcagagattttagcatcgttactcggattaggagggtaggatccggctatggactcaacgctgaaccaggtgaaggaggagagccatggggagggaggagatttgatggcaggcacggtggaggccgcggatgggccgtccgcggccgtcgccgcggcaccaaagccgatggagggtctgcatgaccctgggccgccgccgttcctcaccaagacatatgacatggtcgacgactcggacaccgacctgattgtgtcttggagcgccaccaacaacagcttcgtggtgtgggatccgcacgccttcgccacggtgctgctgcccaggcacttcaagcacaacaacttctccagcttcgtccggcagctcaacacctattacatgacaggtccttgaaacagtagaaaaggatgagtattgatttattaaagaagaaagataacaaattgaatgaagaagtaactgaaaacaatgcaaactgaaactgtgcaaaagttaactggaacgtatcctaaagagggtttcaggaaggtggatcctgatcggtgggaattcgcgaatgagggctttttacggggacagagacacctcctgaagaacatcaggcgtcgaaaacctcctgctcagaatgccacaaaccagcagtccattgggccttaccttgaggtgggacattttggatatgatgcagagattgacatgttgaagagagacaagcagttactgatggcagaagtggtgaagctaaggcaggagcagcagaacacaaaggcaaatctcaaagcgatggaggataggctacaagggactgaacagaagcagcagcagatgatggcgttcttggcacgtgtcatgcggaatcctgaattcttgaagcacctggtttcccagaatgagatgaggaaggagcttcaagatgctatttcaaagaaaagaagacggcgcatcgaccaagggcctgaagctgatgacttgggggctagtagcagcttggagcaaggttcaccggtcctgtttaatgcccaggacccagttgaattccttgtcgacggaatcccagctgacctcgagagcccagctttcgatggccacggcctgattgggccacatgatattgatattgatattgatattggcagtacctctgagcagcagcaagacatgccccaggaggatctgaatgacaacttctgggagcagttgctgaacgaaggacttggcgaggagaacgatagccctgtaatcgaggatgatatgaatgtgctgtctgagaagatgggttatctcaactcagatggcccaacatctagcaattagtcttggcttcgttgctgttttgttatttccatcttaccagaacccgcagctcctgaattgtgttcactgtgtcagcaagactaggcaattctgcttccgttgctcggtttccatgcccttctgaattcctcgccaatggtagggcttgcttccatgagaattggctggcattcgccatggtgtcaagggagaactgctaggtgcatctgatgtgatctgactagtgattgctgcttgccactggagtggctgttttaggcgacgccagcgatctgttggttgttttacgaccctgcccgtcaggaattcagtctgtagttatgtacagtgacagcgactcagcaagtagtactgatggttatacatgtttctgtcagtggttgtgtgcaaactgtttgtctaatttcatgcggtggaagctttgtagtgttgcggttctgaagtactactggatttcagttcgaattaagtactatactggatttctgttcgaagatctgggatttttttattcacctcaataaagacgacggaaaattcaagaaatggctctcgcattgctgctttatttggtctgcgaaattcggaagataaattcgtgattatagaaatgagattaaatggtttgttttgggaaaaacattgttgtagacacaaacacacaacatacccggattataatatgtctatattgtataatgtaagttatttaaactaatatttagttcaaactaagttaaag

SEQ ID NO: 67988 - DNA, 3797 bp, Zea Mays
gccagcgaggcagcgaccgcgatcgcgaccctttcctcctccgtctctctcccgccgcgccagttccggtccccgccccccgacgctttatccccatcccccgtcccctcgccttccagaaccttcctttcccgaaatagccaaatccataccctatccccctacccaccattccagagccactgcatctagtaggctgctgagctacccaccctccccgcgctcgtgacggctcacccacccccgccgtggttccgggcaacagggaagaagatcccgccctggtgccaccacgaggcacccggcggctttgatttcctctccgcccctggcgtctggcgtggtgctctggcccccagtttgtcggctgctttctacctgtacttgcagagctgtaggtgggggtaaacatggtgaggtggtcttgccaggatgacaccttatcatgttccctatccccgtgctagatgcgcgccggccgccgtgtgtgtgtatgccttaacgtcgatgcgtgccttgtactcctgtgtggccgtgtgctaggggcagctgctcgttgctgctcttttacaacggagttttactgacattgtccaacagactattccattccggtgtcagagcagagattttagcatcgttactcggattaggagggtaggatccggctatggactcaacgctgaaccaggtgaaggaggagagccatggggagggaggagatttgatggcaggcacggtggaggccgcggatgggccgtccgcggccgtcgccgcggcaccaaagccgatggagggtctgcatgaccctgggccgccgccgttcctcaccaagacatatgacatggtcgacgactcggacaccgacctgattgtgtcttggagcgccaccaacaacagcttcgtggtgtgggatccgcacgccttcgccacggtgctgctgcccaggcacttcaagcacaacaacttctccagcttcgtccggcagctcaacacctatgtaagtgtttgtttgcccattacagttcagcatggaatggttcatgatgctgaggtgttaacagggttgaatgttcagctcccaaacacaacactgttgactattttgcaagtagttggtgcaatcctcgaaattgccttgttatgttttgtggtcagcattggaacagcaaagtggcacatataggcattgaagtttgctgtgcactatctaactattctgattgggttgtgagaacctcctctcttgtttttggtgataagaacatttgtaaacatatacgtgctgtttggtttggtcctttttgtccgttatcgattcacagagtaaatcgattgtgttgttttgtgtttggttagaacagtttgtgttgattcacagaactatcagcgctatccattcccagagctatagcagtgagtgatcgtggcggcatgtgactccatccccgttaccgttcagggtgctgaaccaaacagcaccatatataattaattaaacaaataagtttaattgacagcgtattcaggcatgaatgtataatggaagttaatactacagttgcatattacatagtctttgtgtacaagcacatagaaaccccagacaagttgattttagttatcatgaggaatgtgcttcgccacatctgctcatgttgtccttaaaggaaggaaatgaagaagataaccttgttggcattttggaaaatattactgctgtgtttttagcaaacaaccatctataaaggataatatatttttgaattgtcattttccttaagctattcaacagcagcatcacccttcgtgtgctgtacttctctgttttgatgccagggctccttttcttgaattaatagcagctggaatacttctgaatgcccactctttggagctatttataatgatgtgcatagttgaatagtaacatcttaggtcatgtgtcactgtcagatgctaaacttcatgctgttcttgcactttgtgttgttcctctcatggattcttctctctcaatgaagtcgatatttctggagcgaaacaatatttttgcaataatgatctctaattttttatccttcattgttttcttattttcttttgaatgaggcagtacatgacaggtccttgaaacagtagaaaaggatgagtattgatttattaaagaagaaagataacaaattgaatgaagaagtaactgaaaacaatgcaaactgaaactgtgcaaaagttaactggaacgtatcctaaagagggtttcaggaaggtggatcctgatcggtgggaattcgcgaatgagggctttttacggggacagagacacctcctgaagaacatcaggcgtcgaaaacctcctgctcagaatgccacaaaccagcagtccattgggccttaccttgaggtgggacattttggatatgatgcagagattgacatgttgaagagagacaagcagttactgatggcagaagtggtgaagctaaggcaggagcagcagaacacaaaggcaaatctcaaagcgatggaggataggctacaagggactgaacagaagcagcagcagatgatggcgttcttggcacgtgtcatgcggaatcctgaattcttgaagcacctggtttcccagaatgagatgaggaaggagcttcaagatgctatttcaaagaaaagaagacggcgcatcgaccaagggcctgaagctgatgacttgggggctagtagcagcttggagcaaggttcaccggtcctgtttaatgcccaggacccagttgaattccttgtcgacggaatcccagctgacctcgagagcccagctttcgatggccacggcctgattgggccacatgatattgatattgatattgatattggcagtacctctgagcagcagcaagacatgccccaggaggatctgaatgacaacttctgggagcagttgctgaacgaaggacttggcgaggagaacgatagccctgtaatcgaggatgatatgaatgtgctgtctgagaagatgggttatctcaactcagatggcccaacatctagcaattagtcttggcttcgttgctgttttgttatttccatcttaccagaacccgcagctcctgaattgtgttcactgtgtcagcaagactaggcaattctgcttccgttgctcggtttccatgcccttctgaattcctcgccaatggtagggcttgcttccatgagaattggctggcattcgccatggtgtcaagggagaactgctaggtgcatctgatgtgatctgactagtgattgctgcttgccactggagtggctgttttaggcgacgccagcgatctgttggttgttttacgaccctgcccgtcaggaattcagtctgtagttatgtacagtgacagcgactcagcaagtagtactgatggttatacatgtttctgtcagtggttgtgtgcaaactgtttgtctaatttcatgcggtggaagctttgtagtgttgcggttctgaagtactactggatttcagttcgaattaagtactatactggatttctgttcgaagatctgggatttttttattcacctcaataaagacgacggaaaattcaagaaatggctctcgcattgctgctttatttggtctgcgaaattcggaagataaattcgtgattatagaaatgagattaaatggtttgttttgggaaaaacattgttgtagacacaaacacacaacatacccggattataatatgtctatattgtataatgtaagttatttaaactaatatttagttcaaactaagttaaag

SEQ ID NO: 67989 - DNA, 459 bp, Zea Mays
tcgcgtcctcctccttcgttccgttcctagctcgctcgcgtctctctctctctctccgagctccgagctccgaatgttgattggttggtgtgtcctctagtagctgaagctgccagcatgatctgaggtgtccacagcatatatatggaagcagctagcgatcagatcatgctgtgcagtttcatctgctcgtggacgcacacgagatgctgtgcctagctgggacgtggttgattagttcaaggggttttgcatgcggtggtcgatctgatttgatacaaagctgctgggaggatatatattcagtcgacaagagtggatacctctgaccatgcattatattgggcagcaacaatggattaattcaaggagttttttctttctttctttccaacaatctcaccatgaattgaagaaattcaatacagttatacaccacacatacacttccaatctatc

SEQ ID NO: 67990 - DNA, 716 bp, Zea Mays
gtcctcctccttcgttccgttcctagctcgctcgcgtctctctctctctctccgagctccgagctccgaatgttgattggttggtgtgtcctctagtagctgaagctgccagcatgatctgaggtgtccacagcatatatatggaagcagctagcgatcagatcatgctgtgcagtttcatctgctcgtggacgcacacgagatgctgtgcctagctgggacgtggttgattagttcaaggggtatgtatagcttaatttctcgatcggtaacggattcttcattccttattgattctctctctatatagtttcttgttgttcagtgagggggggaatgcatggacagcgcgctatctatatcctttccactttcgattccccttcttcaattaattctttccttttgcaatgtcgttgttgagtggccggccgatgcatcactacggctagctatagcttccacatccatacttctcatgcttcttgcccatatggtttgcaggttttgcatgcggtggtcgatctgatttgatacaaagctgctgggaggatatatattcagtcgacaagagtggatacctctgaccatgcattatattgggcagcaacaatggattaattcaaggagttttttctttctttctttccaacaatctcaccatgaattgaagaaattcaatacagttatacaccacacatacacttccaatctat

SEQ ID NO: 67991 - DNA, 928 bp, Zea Mays
ggggatggatgccaagctgttttatatatgcaggggagaagtctataaagccagaactgatagtacaagtggagcctattgaggacccttatggcccatccataactgatgagaagttggatgccattattgtcagtaaggagacattaaatggtggactggctgtaaataggaaaagagaagagaaagggttcccactgttgaaggttgaggttgttgatctcctttccggcggtgtggagggggaaaaattgagttcttctgctttaaggaaacttgaggcagaacaagctcaacaaagtgaaacaaaatctggtagccttgaagcttcttagggaggaaattgaatactttgatctggttagctgaatgcacaaatacgggggtgatctgctccaagctcagtgtgaacaaaaaatatgatcagagctgacagtttggttacctttctagaggaataatcttcgaacactggcccatggccctgtaacagtattgctctaaccttctaaaatcaacctggcaacatagactctcccctactaaccaaatttacaaattttgtattggcaatgccatctgaatgttaaaaggaaatcttcttgggtttgtataaatatctacaattgtgacaaagctacaaacgaatatggttccccttcgcaagaacccatgcaatgtagcttgtcattataatctttgttctcttgaaacatattgtataattatgtgtatatacgcattggttgatcagagactttgggttctccattaatgtagaatcaggaaactgaagataacctgtaagggtacagcttttttttgttaggtggtcaagaaccctgttgtttcgaataattagtaaatttaacctagtgtgttaatctcttactaaatctaaaaagatacccactgtggagataattct

SEQ ID NO: 67992 - DNA, 1173 bp, Zea Mays
gggaaccatgtacaacaaaaaaaaatctgtgtgcatcgagtcattgtactgatctacagctacgacgagtaaaacaagaagccgtacctgtacggtcttctctatagagggagcaattggagagagagagaaagaacagcgaaaaatggtcgatgccggcgacataacggccggagggccgccgcgcgctcacgaggaggagcaagcgggaactccggcatacggttcggtggtcctcggcggcacttttgaccgcctccacgacggccaccgccgccttctcaagtctataaagccagaactgatagtacaagtggagcctattgaggacccttatggcccatccataactgatgagaagttggatgccattattgtcagtaaggagacattaaatggtggactggctgtaaataggaaaagagaagagaaagggttcccactgttgaaggttgaggttgttgatctcctttccggcggtgtggagggggaaaaattgagttcttctgctttaaggaaacttgaggcagaacaagctcaacaaagtgaaacaaaatctggtagccttgaagcttcttagggaggaaattgaatactttgatctggttagctgaatgcacaaatacgggggtgatctgctccaagctcagtgtgaacaaaaaatatgatcagagctgacagtttggttacctttctagaggaataatcttcgaacactggcccatggccctgtaacagtattgctctaaccttctaaaatcaacctggcaacatagactctcccctactaaccaaatttacaaattttgtattggcaatgccatctgaatgttaaaaggaaatcttcttgggtttgtataaatatctacaattgtgacaaagctacaaacgaatatggttccccttcgcaagaacccatgcaatgtagcttgtcattataatctttgttctcttgaaacatattgtataattatgtgtatatacgcattggttgatcagagactttgggttctccattaatgtagaatcaggaaactgaagataacctgtaagggtacagcttttttttgttaggtggtcaagaaccctgttgtttcgaataattagtaaatttaacctagtgtgttaatctcttactaaatctaaaaagatacccactgtggagataattct

SEQ ID NO: 67993 - DNA, 1238 bp, Zea Mays
acctcgggaaccatgtacaacaaaaaaaaatctgtgtgcatcgagtcattgtactgatctacagctacgacgagtaaaacaagaagccgtacctgtacggtcttctctatagagggagcaattggagagagagagaaagaacagcgaaaaatggtcgatgccggcgacataacggccggagggccgccgcgcgctcacgaggaggagcaagcgggaactccggcatacggttcggtggtcctcggcggcacttttgaccgcctccacgacggccaccgccgccttctcaagtatgcggagcttattgagcccgttgacaagcgcatcaagggtgtggaggattacatcaagtctataaagccagaactgatagtacaagtggagcctattgaggacccttatggcccatccataactgatgagaagttggatgccattattgtcagtaaggagacattaaatggtggactggctgtaaataggaaaagagaagagaaagggttcccactgttgaaggttgaggttgttgatctcctttccggcggtgtggagggggaaaaattgagttcttctgctttaaggaaacttgaggcagaacaagctcaacaaagtgaaacaaaatctggtagccttgaagcttcttagggaggaaattgaatactttgatctggttagctgaatgcacaaatacgggggtgatctgctccaagctcagtgtgaacaaaaaatatgatcagagctgacagtttggttacctttctagaggaataatcttcgaacactggcccatggccctgtaacagtattgctctaaccttctaaaatcaacctggcaacatagactctcccctactaaccaaatttacaaattttgtattggcaatgccatctgaatgttaaaaggaaatcttcttgggtttgtataaatatctacaattgtgacaaagctacaaacgaatatggttccccttcgcaagaacccatgcaatgtagcttgtcattataatctttgttctcttgaaacatattgtataattatgtgtatatacgcattggttgatcagagactttgggttctccattaatgtagaatcaggaaactgaagataacctgtaagggtacagcttttttttgttaggtggtcaagaaccctgttgtttcgaataattagtaaatttaacctagtgtgttaatctcttactaaatctaaaaagatacccactgtggagataattct

SEQ ID NO: 67994 - DNA, 1481 bp, Zea Mays
aatatacagaacgagccagcactccattttctcatacggttggcccggaattaggcgcctcgattgcttgctagccgccagattagtctttcgctaccctaaggtcattgaactgaatgatccaatctgatttgctgactgctcctctcatcactcaaaatttgtgatggaacaggaccatcaagcctatgaagaggctgatcactacgctaagaggaaagcagccaatatttgtgcttccactggtgctagaactgtcaagagaaaactagaagcaagtaggattccacccaatgatttggttagaagaacaggcaaagaacagaaagtacccgcttatgaagttcgtcagttaaccaagaatgagttgcctctgaaggtgtctgctaggaatgccatcaatagcgatcacttccataggcctttaagtagcagatgcaatgatcttaccaagaacatttctgagataaggccagtttgcagagctcttcctttgcctgagaaacctttgtgcatcagagaagaggacgagtgctcagtggctagttgcagcgcaaattactcagagtacagtaccagtgataacaaacaatcagtcggaaccggcagttgtttcgctgacgatgttatgtattcatgccaacgcagacaggagaccaagaatgcctatggatctggtttgtttctgaatgtccatgagctggagctgcaagcataccaatcaaccgtcagagctttccatgctgcaggacccctgacatgggagcaagagtcactcctgacaaacctgcgcctctcgctcaacatctcgaatgaggagcacttgcttcaatttctgtgcagtggatgaataccactttatgagaaagaggtcgctgaaacagacagtgcactgaagtctgaaaaccaggtgcttgggtgcctttcttctctcccgtcaggccatcatattgaaggcatgtctgggttttatgattcattgatcatggtgacggataagaccgggtacgccatcaaataacctagggaccttaaaatgtgttcatgccctcttgaagttcaaattctgtttatatatattagatgtccccaagggaccctattcttcattttaactgaaaagttatgtaaattttttcttttaatcaaactgcaattgtgtttgtcaattgttcagccaacatctgttcttgtaacttggaacctgtatctctgcagtaagacaccggtacaggaattcaaatgagacactgaaacttcaaagatgctggaaatttgtccgtatttgacttttgttccggaacttttgatgaggctgtattttgtactccatatagttactggtttactgtcgaacggcttaagaaagctaaacagatggaaagggaaactattgttttacggcgactagccaacttattgttttttctcgaacacgcaggagaactgcgcatcattatattgaaagagagaaatgtccg

SEQ ID NO: 67995 - DNA, 1731 bp, Zea Mays
aatatacagaacgagccagcactccattttctcatacggttggcccggaattaggcgcctcgattgcttgctagccgccagattagtctttcgctaccctaagatcggtcggaagaagaacagttcaatctcggttcatcagaagaccatcaagcctatgaagaggctgatcactacgctaagaggaaagcagccaatatttgtgcttccactggtgctagaactgtcaagagaaaactagaagcaagtaggattccacccaatgatttggttagaagaacaggcaaagaacagaaagtacccgcttatgaagttcgtcagttaaccaagaatgagttgcctctgaaggtgtctgctaggaatgccatcaatagcgatcacttccataggcctttaagtagcagatgcaatgatcttaccaagaacatttctgagataaggccagtttgcagagctcttcctttgcctgagaaacctttgtgcatcagagaagaggacgagtgctcagtggctagttgcagcgcaaattactcagagtacagtaccagtgataacaaacaatcagtcggaaccggcagttgtttcgctgacgatgttatgtattcatgccaacgcagacaggagaccaagaatgcctatggatctggtttgtttctgaatgtccatgagctggagctgcaagcataccaatcaaccgtcagagctttccatgctgcaggacccctgacatgggagcaagagtcactcctgacaaacctgcgcctctcgctcaacatctcgaatgaggagcacttgcttcagttgaggcatctcctatctctttgataattttcaaaaactaatgtgccttttttatatctgtggattacctccaacccgtagagatctttgcatgcttgtagcgtatgtttcccaccttgactgttgtatataaagaagagttcagagaaatccacttatagctgttgtacttcaccagaactttgttgctaggagtaaatgtcttgcatttttttagtgtttttacaattcaaggaaatgtgaagctatcttcgaaatatatttgtcatgctgataatcaaggttgaaatatcagttcctttaaatgaagctgaagcatcaattctagttactgatctcgctcattgtatctctttcttcgctttggtatcgttctgtatgtttgtagctgaaatgtttcgccattaataggtcctgattaagatctatctttaatactcctagttttgcattggtgctgctgatgtttaaacctcatgctgtgaacacacagatttctgtgcagtggatgaataccactttatgagaaagaggtcgctgaaacagacagtgcactgaagtctgaaaaccaggtgcttgggtgcctttcttctctcccgtcaggccatcatattgaaggcatgtctgggttttatgattcattgatcatggtgacggataagaccggtaagacaccggtacaggaattcaaatgagacactgaaacttcaaagatgctggaaatttgtccgtatttgacttttgttccggaacttttgatgaggctgtattttgtactccatatagttactggtttactgtcgaacggcttaagaaagctaaacagatggaaagggaaactattgttttacggcgactagccaacttattgttttttctcgaacacgcaggagaactgcgcatcattatattgaaagagagaaatgtccg

SEQ ID NO: 67996 - DNA, 1243 bp, Zea Mays
aatatacagaacgagccagcactccattttctcatacggttggcccggaattaggcgcctcgattgcttgctagccgccagattagtctttcgctaccctaagatcggtcggaagaagaacagttcaatctcggttcatcagaagaccatcaagcctatgaagaggctgatcactacgctaagaggaaagcagccaatatttgtgcttccactggtgctagaactgtcaagagaaaactagaagcaagtaggattccacccaatgatttggttagaagaacaggcaaagaacagaaagtacccgcttatgaagttcgtcagttaaccaagaatgagttgcctctgaaggtgtctgctaggaatgccatcaatagcgatcacttccataggcctttaagtagcagatgcaatgatcttaccaagaacatttctgagataaggccagtttgcagagctcttcctttgcctgagaaacctttgtgcatcagagaagaggacgagtgctcagtggctagttgcagcgcaaattactcagagtacagtaccagtgataacaaacaatcagtcggaaccggcagttgtttcgctgacgatgttatgtattcatgccaacgcagacaggagaccaagaatgcctatggatctggtttgtttctgaatgtccatgagctggagctgcaagcataccaatcaaccgtcagagctttccatgctgcaggacccctgacatgggagcaagagtcactcctgacaaacctgcgcctctcgctcaacatctcgaatgaggagcacttgcttcagttgagatttctgtgcagtggatgaataccactttatgagaaagaggtcgctgaaacagacagtgcactgaagtctgaaaaccaggtgcttgggtgcctttcttctctcccgtcaggccatcatattgaaggcatgtctgggttttatgattcattgatcatggtgacggataagaccggtaagacaccggtacaggaattcaaatgagacactgaaacttcaaagatgctggaaatttgtccgtatttgacttttgttccggaacttttgatgaggctgtattttgtactccatatagttactggtttactgtcgaacggcttaagaaagctaaacagatggaaagggaaactattgttttacggcgactagccaacttattgttttttctcgaacacgcaggagaactgcgcatcattatattgaaagagagaaatgtccg

SEQ ID NO: 67997 - DNA, 2080 bp, Zea Mays
gaagaaacggccaatatacagaacgagccagcactccattttctcatacggttggcccggaattaggcgcctcgattgcttgctagccgccagattagtctttcgctaccctaagatcggtcggaagaagaacagttcaatctcggttcatcagaagtgaaactgcttagatcagatttcgtggattccttcacttcaaagtttgcatgtcattgaactgaatgatccaatctgatttgctgactgctcctctcatcactcaaaatttgtgatggaacaggaccatcaagcctatgaagaggctgatcactacgctaagaggaaagcagccaatatttgtgcttccactggtgctagaactgtcaagagaaaactagaagcaagtaggattccacccaatgatttggttagaagaacaggcaaagaacagaaagtacccgcttatgaagttcgtcagttaaccaagaatgagttgcctctgaaggtgtctgctaggaatgccatcaatagcgatcacttccataggcctttaagtagcagatgcaatgatcttaccaagaacatttctgagataaggccagtttgcagagctcttcctttgcctgagaaacctttgtgcatcagagaagaggacgagtgctcagtggctagttgcagcgcaaattactcagagtacagtaccagtgataacaaacaatcagtcggaaccggcagttgtttcgctgacgatgttatgtattcatgccaacgcagacaggagaccaagaatgcctatggatctggtttgtttctgaatgtccatgagctggagctgcaagcataccaatcaaccgtcagagctttccatgctgcaggacccctgacatgggagcaagagtcactcctgacaaacctgcgcctctcgctcaacatctcgaatgaggagcacttgcttcagttgaggcatctcctatctctttgataattttcaaaaactaatgtgccttttttatatctgtggattacctccaacccgtagagatctttgcatgcttgtagcgtatgtttcccaccttgactgttgtatataaagaagagttcagagaaatccacttatagctgttgtacttcaccagaactttgttgctaggagtaaatgtcttgcatttttttagtgtttttacaattcaaggaaatgtgaagctatcttcgaaatatatttgtcatgctgataatcaaggttgaaatatcagttcctttaaatgaagctgaagcatcaattctagttactgatctcgctcattgtatctctttcttcgctttggtatcgttctgtatgtttgtagctgaaatgtttcgccattaataggtcctgattaagatctatctttaatactcctagttttgcattggtgctgctgatgtttaaacctcatgctgtgaacacacagatttctgtgcagtggatgaataccactttatgagaaagaggtcgctgaaacagacagtgcactgaagtctgaaaaccaggtgcttgggtgcctttcttctctcccgtcaggccatcatattgaaggcatgtctgggttttatgattcattgatcatggtgacggataagaccgggtacgccatcaaataacctagggaccttaaaatgtgttcatgccctcttgaagttcaaattctgtttatatatattagatgtccccaagggaccctattcttcattttaactgaaaagttatgtaaattttttcttttaatcaaactgcaattgtgtttgtcaattgttcagccaacatctgttcttgtaacttggaacctgtatctctgcagtaagacaccggtacaggaattcaaatgagacactgaaacttcaaagatgctggaaatttgtccgtatttgacttttgttccggaacttttgatgaggctgtattttgtactccatatagttactggtttactgtcgaacggcttaagaaagctaaacagatggaaagggaaactattgttttacggcgactagccaacttattgttttttctcgaacacgcaggagaactgcgcatcattatattgaaagagagaaatgtccg

SEQ ID NO: 67998 - DNA, 2028 bp, Zea Mays
gaagaaacggccaatatacagaacgagccagcactccattttctcatacggttggcccggaattaggcgcctcgattgcttgctagccgccagattagtctttcgctaccctaagatcggtcggaagaagaacagttcaatctcggttcatcagaagtcattgaactgaatgatccaatctgatttgctgactgctcctctcatcactcaaaatttgtgatggaacaggaccatcaagcctatgaagaggctgatcactacgctaagaggaaagcagccaatatttgtgcttccactggtgctagaactgtcaagagaaaactagaagcaagtaggattccacccaatgatttggttagaagaacaggcaaagaacagaaagtacccgcttatgaagttcgtcagttaaccaagaatgagttgcctctgaaggtgtctgctaggaatgccatcaatagcgatcacttccataggcctttaagtagcagatgcaatgatcttaccaagaacatttctgagataaggccagtttgcagagctcttcctttgcctgagaaacctttgtgcatcagagaagaggacgagtgctcagtggctagttgcagcgcaaattactcagagtacagtaccagtgataacaaacaatcagtcggaaccggcagttgtttcgctgacgatgttatgtattcatgccaacgcagacaggagaccaagaatgcctatggatctggtttgtttctgaatgtccatgagctggagctgcaagcataccaatcaaccgtcagagctttccatgctgcaggacccctgacatgggagcaagagtcactcctgacaaacctgcgcctctcgctcaacatctcgaatgaggagcacttgcttcagttgaggcatctcctatctctttgataattttcaaaaactaatgtgccttttttatatctgtggattacctccaacccgtagagatctttgcatgcttgtagcgtatgtttcccaccttgactgttgtatataaagaagagttcagagaaatccacttatagctgttgtacttcaccagaactttgttgctaggagtaaatgtcttgcatttttttagtgtttttacaattcaaggaaatgtgaagctatcttcgaaatatatttgtcatgctgataatcaaggttgaaatatcagttcctttaaatgaagctgaagcatcaattctagttactgatctcgctcattgtatctctttcttcgctttggtatcgttctgtatgtttgtagctgaaatgtttcgccattaataggtcctgattaagatctatctttaatactcctagttttgcattggtgctgctgatgtttaaacctcatgctgtgaacacacagatttctgtgcagtggatgaataccactttatgagaaagaggtcgctgaaacagacagtgcactgaagtctgaaaaccaggtgcttgggtgcctttcttctctcccgtcaggccatcatattgaaggcatgtctgggttttatgattcattgatcatggtgacggataagaccgggtacgccatcaaataacctagggaccttaaaatgtgttcatgccctcttgaagttcaaattctgtttatatatattagatgtccccaagggaccctattcttcattttaactgaaaagttatgtaaattttttcttttaatcaaactgcaattgtgtttgtcaattgttcagccaacatctgttcttgtaacttggaacctgtatctctgcagtaagacaccggtacaggaattcaaatgagacactgaaacttcaaagatgctggaaatttgtccgtatttgacttttgttccggaacttttgatgaggctgtattttgtactccatatagttactggtttactgtcgaacggcttaagaaagctaaacagatggaaagggaaactattgttttacggcgactagccaacttattgttttttctcgaacacgcaggagaactgcgcatcattatattgaaagagagaaatgtccg

SEQ ID NO: 67999 - DNA, 1373 bp, Zea Mays
gaagaaacggccaatatacagaacgagccagcactccattttctcatacggttggcccggaattaggcgcctcgattgcttgctagccgccagattagtctttcgctaccctaagatcggtcggaagaagaacagttcaatctcggttcatcagaagtgaaactgcttagatcagatttcgtggattccttcacttcaaagtttgcatgtcattgaactgaatgatccaatctgatttgctgactgctcctctcatcactcaaaatttgtgatggaacaggaccatcaagcctatgaagaggctgatcactacgctaagaggaaagcagccaatatttgtgcttccactggtgctagaactgtcaagagaaaactagaagcaagtaggattccacccaatgatttggttagaagaacaggcaaagaacagaaagtacccgcttatgaagttcgtcagttaaccaagaatgagttgcctctgaaggtgtctgctaggaatgccatcaatagcgatcacttccataggcctttaagtagcagatgcaatgatcttaccaagaacatttctgagataaggccagtttgcagagctcttcctttgcctgagaaacctttgtgcatcagagaagaggacgagtgctcagtggctagttgcagcgcaaattactcagagtacagtaccagtgataacaaacaatcagtcggaaccggcagttgtttcgctgacgatgttatgtattcatgccaacgcagacaggagaccaagaatgcctatggatctggtttgtttctgaatgtccatgagctggagctgcaagcataccaatcaaccgtcagagctttccatgctgcaggacccctgacatgggagcaagagtcactcctgacaaacctgcgcctctcgctcaacatctcgaatgaggagcacttgcttcaatttctgtgcagtggatgaataccactttatgagaaagaggtcgctgaaacagacagtgcactgaagtctgaaaaccaggtgcttgggtgcctttcttctctcccgtcaggccatcatattgaaggcatgtctgggttttatgattcattgatcatggtgacggataagaccggtaagacaccggtacaggaattcaaatgagacactgaaacttcaaagatgctggaaatttgtccgtatttgacttttgttccggaacttttgatgaggctgtattttgtactccatatagttactggtttactgtcgaacggcttaagaaagctaaacagatggaaagggaaactattgttttacggcgactagccaacttattgttttttctcgaacacgcaggagaactgcgcatcattatattgaaagagagaaatgtccg

SEQ ID NO: 68000 - DNA, 1309 bp, Zea Mays
aagaaccggaagaaacggccaatatacagaacgagccagcactccattttctcatacggttggcccggaattaggcgcctcgattgcttgctagccgccagattagtctttcgctaccctaagatcggtcggaagaagaacagttcaatctcggttcatcagaagtgaaactgcttagatcagatttcgtggattccttcacttcaaagtttgcatgaccatcaagcctatgaagaggctgatcactacgctaagaggaaagcagccaatatttgtgcttccactggtgctagaactgtcaagagaaaactagaagcaagtaggattccacccaatgatttggttagaagaacaggcaaagaacagaaagtacccgcttatgaagttcgtcagttaaccaagaatgagttgcctctgaaggtgtctgctaggaatgccatcaatagcgatcacttccataggcctttaagtagcagatgcaatgatcttaccaagaacatttctgagataaggccagtttgcagagctcttcctttgcctgagaaacctttgtgcatcagagaagaggacgagtgctcagtggctagttgcagcgcaaattactcagagtacagtaccagtgataacaaacaatcagtcggaaccggcagttgtttcgctgacgatgttatgtattcatgccaacgcagacaggagaccaagaatgcctatggatctggtttgtttctgaatgtccatgagctggagctgcaagcataccaatcaaccgtcagagctttccatgctgcaggacccctgacatgggagcaagagtcactcctgacaaacctgcgcctctcgctcaacatctcgaatgaggagcacttgcttcaatttctgtgcagtggatgaataccactttatgagaaagaggtcgctgaaacagacagtgcactgaagtctgaaaaccaggtgcttgggtgcctttcttctctcccgtcaggccatcatattgaaggcatgtctgggttttatgattcattgatcatggtgacggataagaccggtaagacaccggtacaggaattcaaatgagacactgaaacttcaaagatgctggaaatttgtccgtatttgacttttgttccggaacttttgatgaggctgtattttgtactccatatagttactggtttactgtcgaacggcttaagaaagctaaacagatggaaagggaaactattgttttacggcgactagccaacttattgttttttctcgaacacgcaggagaactgcgcatcattatattgaaagagagaaatgtccg

SEQ ID NO: 68001 - DNA, 1824 bp, Zea Mays
caagaaccggaagaaacggccaatatacagaacgagccagcactccattttctcatacggttggcccggaattaggcgcctcgattgcttgctagccgccagattagtctttcgctaccctaagatcggtcggaagaagaacagttcaatctcggttcatcagaagtcattgaactgaatgatccaatctgatttgctgactgctcctctcatcactcaaaatttgtgatggaacaggaccatcaagcctatgaagaggctgatcactacgctaagaggaaagcagccaatatttgtgcttccactggtgctagaactgtcaagagaaaactagaagcaagtaggattccacccaatgatttggttagaagaacaggcaaagaacagaaagtacccgcttatgaagttcgtcagttaaccaagaatgagttgcctctgaaggtgtctgctaggaatgccatcaatagcgatcacttccataggcctttaagtagcagatgcaatgatcttaccaagaacatttctgagataaggccagtttgcagagctcttcctttgcctgagaaacctttgtgcatcagagaagaggacgagtgctcagtggctagttgcagcgcaaattactcagagtacagtaccagtgataacaaacaatcagtcggaaccggcagttgtttcgctgacgatgttatgtattcatgccaacgcagacaggagaccaagaatgcctatggatctggtttgtttctgaatgtccatgagctggagctgcaagcataccaatcaaccgtcagagctttccatgctgcaggacccctgacatgggagcaagagtcactcctgacaaacctgcgcctctcgctcaacatctcgaatgaggagcacttgcttcagttgaggcatctcctatctctttgataattttcaaaaactaatgtgccttttttatatctgtggattacctccaacccgtagagatctttgcatgcttgtagcgtatgtttcccaccttgactgttgtatataaagaagagttcagagaaatccacttatagctgttgtacttcaccagaactttgttgctaggagtaaatgtcttgcatttttttagtgtttttacaattcaaggaaatgtgaagctatcttcgaaatatatttgtcatgctgataatcaaggttgaaatatcagttcctttaaatgaagctgaagcatcaattctagttactgatctcgctcattgtatctctttcttcgctttggtatcgttctgtatgtttgtagctgaaatgtttcgccattaataggtcctgattaagatctatctttaatactcctagttttgcattggtgctgctgatgtttaaacctcatgctgtgaacacacagatttctgtgcagtggatgaataccactttatgagaaagaggtcgctgaaacagacagtgcactgaagtctgaaaaccaggtgcttgggtgcctttcttctctcccgtcaggccatcatattgaaggcatgtctgggttttatgattcattgatcatggtgacggataagaccggtaagacaccggtacaggaattcaaatgagacactgaaacttcaaagatgctggaaatttgtccgtatttgacttttgttccggaacttttgatgaggctgtattttgtactccatatagttactggtttactgtcgaacggcttaagaaagctaaacagatggaaagggaaactattgttttacggcgactagccaacttattgttttttctcgaacacgcaggagaactgcgcatcattatattgaaagagagaaatgtccg

SEQ ID NO: 68002 - DNA, 2625 bp, Zea Mays
gaaagcaagaaccggaagaaacggccaatatacagaacgagccagcactccattttctcatacggttggcccggaattaggcgcctcgattgcttgctagccgccagattagtctttcgctaccctaagatcggtcggaagaagaacagttcaatctcggttcatcagaagtgaaactgcttagatcagatttcgtggattccttcacttcaaagtttgcatgttgcaagtggtttgaatttttcaagaacaaaagtttccaacctgtatggattatcttctgtttctggcccatcaggggaattgctcctgcttcagcctcttagattgacgtcagagcaggaggcgatttcgctaaagtggttttagttatcctgtttagataatttggtcacatctaataacatgcaggggattgaatctttacccccaagcctgcttcacatataagccctgatttccttgtactatgtagaaattcttagttgattcacctatttttaggctcatttattttaatattttttcctacatgactgtttgatacccgctcagcactcaacctaaaaggctcaagttctcatttttttcattttctcctggtatatctttgacagtaagacaagtagttttaagaatgcatctcagagtgagggacaagatcttgcttctaatgccactgaatctttttcagtcacatttaccaaacatttcttggttcatgttggcaaccttgaatgttggacatggacactatgaactctgccttcatttatttgctcaccagattataggactctgccttcagctcttttctgtgtttctcatccaatttttatgcataatgctatctttgtgtcacactatgaaatgattttttttctctaatgaaacgaatatgtttcatgcccaattaatagaagttaggaattcggaaacagataatggacaaagtgtggataaatatttaagcttttttgcattatatggtttggtttggtcttgtgaaagcattaacacttgttgaaaattgaatattcccttatcttcaacttattataaactgaacatttactatagaaattttgcgctacaataagtgagtgatggtgaatcaggggtacctctcaccatgagcatttgcttgacttcagtatctggcataacaatctctgcactatcccgtcattaccagttttttccctttctttgagaaagtatttcatcggtatcattccctttttcaggtcattgaactgaatgatccaatctgatttgctgactgctcctctcatcactcaaaatttgtgatggaacaggaccatcaagcctatgaagaggctgatcactacgctaagaggaaagcagccaatatttgtgcttccactggtgctagaactgtcaagagaaaactagaagcaagtaggattccacccaatgatttggttagaagaacaggcaaagaacagaaagtacccgcttatgaagttcgtcagttaaccaagaatgagttgcctctgaaggtgtctgctaggaatgccatcaatagcgatcacttccataggcctttaagtagcagatgcaatgatcttaccaagaacatttctgagataaggccagtttgcagagctcttcctttgcctgagaaacctttgtgcatcagagaagaggacgagtgctcagtggctagttgcagcgcaaattactcagagtacagtaccagtgataacaaacaatcagtcggaaccggcagttgtttcgctgacgatgttatgtattcatgccaacgcagacaggagaccaagaatgcctatggatctggtttgtttctgaatgtccatgagctggagctgcaagcataccaatcaaccgtcagagctttccatgctgcaggacccctgacatgggagcaagagtcactcctgacaaacctgcgcctctcgctcaacatctcgaatgaggagcacttgcttcaatttctgtgcagtggatgaataccactttatgagaaagaggtcgctgaaacagacagtgcactgaagtctgaaaaccaggtgcttgggtgcctttcttctctcccgtcaggccatcatattgaaggcatgtctgggttttatgattcattgatcatggtgacggataagaccgggtacgccatcaaataacctagggaccttaaaatgtgttcatgccctcttgaagttcaaattctgtttatatatattagatgtccccaagggaccctattcttcattttaactgaaaagttatgtaaattttttcttttaatcaaactgcaattgtgtttgtcaattgttcagccaacatctgttcttgtaacttggaacctgtatctctgcagtaagacaccggtacaggaattcaaatgagacactgaaacttcaaagatgctggaaatttgtccgtatttgacttttgttccggaacttttgatgaggctgtattttgtactccatatagttactggtttactgtcgaacggcttaagaaagctaaacagatggaaagggaaactattgttttacggcgactagccaacttattgttttttctcgaacacgcaggagaactgcgcatcattatattgaaagagagaaatgtccg

SEQ ID NO: 68003 - DNA, 1881 bp, Zea Mays
gaaagcaagaaccggaagaaacggccaatatacagaacgagccagcactccattttctcatacggttggcccggaattaggcgcctcgattgcttgctagccgccagattagtctttcgctaccctaagatcggtcggaagaagaacagttcaatctcggttcatcagaagtgaaactgcttagatcagatttcgtggattccttcacttcaaagtttgcatgtcattgaactgaatgatccaatctgatttgctgactgctcctctcatcactcaaaatttgtgatggaacaggaccatcaagcctatgaagaggctgatcactacgctaagaggaaagcagccaatatttgtgcttccactggtgctagaactgtcaagagaaaactagaagcaagtaggattccacccaatgatttggttagaagaacaggcaaagaacagaaagtacccgcttatgaagttcgtcagttaaccaagaatgagttgcctctgaaggtgtctgctaggaatgccatcaatagcgatcacttccataggcctttaagtagcagatgcaatgatcttaccaagaacatttctgagataaggccagtttgcagagctcttcctttgcctgagaaacctttgtgcatcagagaagaggacgagtgctcagtggctagttgcagcgcaaattactcagagtacagtaccagtgataacaaacaatcagtcggaaccggcagttgtttcgctgacgatgttatgtattcatgccaacgcagacaggagaccaagaatgcctatggatctggtttgtttctgaatgtccatgagctggagctgcaagcataccaatcaaccgtcagagctttccatgctgcaggacccctgacatgggagcaagagtcactcctgacaaacctgcgcctctcgctcaacatctcgaatgaggagcacttgcttcagttgaggcatctcctatctctttgataattttcaaaaactaatgtgccttttttatatctgtggattacctccaacccgtagagatctttgcatgcttgtagcgtatgtttcccaccttgactgttgtatataaagaagagttcagagaaatccacttatagctgttgtacttcaccagaactttgttgctaggagtaaatgtcttgcatttttttagtgtttttacaattcaaggaaatgtgaagctatcttcgaaatatatttgtcatgctgataatcaaggttgaaatatcagttcctttaaatgaagctgaagcatcaattctagttactgatctcgctcattgtatctctttcttcgctttggtatcgttctgtatgtttgtagctgaaatgtttcgccattaataggtcctgattaagatctatctttaatactcctagttttgcattggtgctgctgatgtttaaacctcatgctgtgaacacacagatttctgtgcagtggatgaataccactttatgagaaagaggtcgctgaaacagacagtgcactgaagtctgaaaaccaggtgcttgggtgcctttcttctctcccgtcaggccatcatattgaaggcatgtctgggttttatgattcattgatcatggtgacggataagaccggtaagacaccggtacaggaattcaaatgagacactgaaacttcaaagatgctggaaatttgtccgtatttgacttttgttccggaacttttgatgaggctgtattttgtactccatatagttactggtttactgtcgaacggcttaagaaagctaaacagatggaaagggaaactattgttttacggcgactagccaacttattgttttttctcgaacacgcaggagaactgcgcatcattatattgaaagagagaaatgtccg

SEQ ID NO: 68004 - DNA, 1482 bp, Zea Mays
aaacaggaaagcaagaaccggaagaaacggccaatatacagaacgagccagcactccattttctcatacggttggcccggaattaggcgcctcgattgcttgctagccgccagattagtctttcgctaccctaagatcggtcggaagaagaacagttcaatctcggttcatcagaagaccatcaagcctatgaagaggctgatcactacgctaagaggaaagcagccaatatttgtgcttccactggtgctagaactgtcaagagaaaactagaagcaagtaggattccacccaatgatttggttagaagaacaggcaaagaacagaaagtacccgcttatgaagttcgtcagttaaccaagaatgagttgcctctgaaggtgtctgctaggaatgccatcaatagcgatcacttccataggcctttaagtagcagatgcaatgatcttaccaagaacatttctgagataaggccagtttgcagagctcttcctttgcctgagaaacctttgtgcatcagagaagaggacgagtgctcagtggctagttgcagcgcaaattactcagagtacagtaccagtgataacaaacaatcagtcggaaccggcagttgtttcgctgacgatgttatgtattcatgccaacgcagacaggagaccaagaatgcctatggatctggtttgtttctgaatgtccatgagctggagctgcaagcataccaatcaaccgtcagagctttccatgctgcaggacccctgacatgggagcaagagtcactcctgacaaacctgcgcctctcgctcaacatctcgaatgaggagcacttgcttcaatttctgtgcagtggatgaataccactttatgagaaagaggtcgctgaaacagacagtgcactgaagtctgaaaaccaggtgcttgggtgcctttcttctctcccgtcaggccatcatattgaaggcatgtctgggttttatgattcattgatcatggtgacggataagaccgggtacgccatcaaataacctagggaccttaaaatgtgttcatgccctcttgaagttcaaattctgtttatatatattagatgtccccaagggaccctattcttcattttaactgaaaagttatgtaaattttttcttttaatcaaactgcaattgtgtttgtcaattgttcagccaacatctgttcttgtaacttggaacctgtatctctgcagtaagacaccggtacaggaattcaaatgagacactgaaacttcaaagatgctggaaatttgtccgtatttgacttttgttccggaacttttgatgaggctgtattttgtactccatatagttactggtttactgtcgaacggcttaagaaagctaaacagatggaaagggaaactattgttttacggcgactagccaacttattgttttttctcgaacacgcaggagaactgcgcatcattatattgaaagagagaaatgtccg

SEQ ID NO: 68005 - DNA, 1612 bp, Zea Mays
aaacaggaaagcaagaaccggaagaaacggccaatatacagaacgagccagcactccattttctcatacggttggcccggaattaggcgcctcgattgcttgctagccgccagattagtctttcgctaccctaagatcggtcggaagaagaacagttcaatctcggttcatcagaagtgaaactgcttagatcagatttcgtggattccttcacttcaaagtttgcatgtcattgaactgaatgatccaatctgatttgctgactgctcctctcatcactcaaaatttgtgatggaacaggaccatcaagcctatgaagaggctgatcactacgctaagaggaaagcagccaatatttgtgcttccactggtgctagaactgtcaagagaaaactagaagcaagtaggattccacccaatgatttggttagaagaacaggcaaagaacagaaagtacccgcttatgaagttcgtcagttaaccaagaatgagttgcctctgaaggtgtctgctaggaatgccatcaatagcgatcacttccataggcctttaagtagcagatgcaatgatcttaccaagaacatttctgagataaggccagtttgcagagctcttcctttgcctgagaaacctttgtgcatcagagaagaggacgagtgctcagtggctagttgcagcgcaaattactcagagtacagtaccagtgataacaaacaatcagtcggaaccggcagttgtttcgctgacgatgttatgtattcatgccaacgcagacaggagaccaagaatgcctatggatctggtttgtttctgaatgtccatgagctggagctgcaagcataccaatcaaccgtcagagctttccatgctgcaggacccctgacatgggagcaagagtcactcctgacaaacctgcgcctctcgctcaacatctcgaatgaggagcacttgcttcagttgagatttctgtgcagtggatgaataccactttatgagaaagaggtcgctgaaacagacagtgcactgaagtctgaaaaccaggtgcttgggtgcctttcttctctcccgtcaggccatcatattgaaggcatgtctgggttttatgattcattgatcatggtgacggataagaccgggtacgccatcaaataacctagggaccttaaaatgtgttcatgccctcttgaagttcaaattctgtttatatatattagatgtccccaagggaccctattcttcattttaactgaaaagttatgtaaattttttcttttaatcaaactgcaattgtgtttgtcaattgttcagccaacatctgttcttgtaacttggaacctgtatctctgcagtaagacaccggtacaggaattcaaatgagacactgaaacttcaaagatgctggaaatttgtccgtatttgacttttgttccggaacttttgatgaggctgtattttgtactccatatagttactggtttactgtcgaacggcttaagaaagctaaacagatggaaagggaaactattgttttacggcgactagccaacttattgttttttctcgaacacgcaggagaactgcgcatcattatattgaaagagagaaatgtccg

SEQ ID NO: 68006 - DNA, 2140 bp, Zea Mays
aaacactttactcttttttctgtggtacatatggtgattaatcaaatgtattttctttaaaaaaaggaccttaaaactaaattaaaaacgaaattcccatgacaaacgcaagaaacaggaaagcaagaaccggaagaaacggccaatatacagaacgagccagcactccattttctcatacggttggcccggaattaggcgcctcgattgcttgctagccgccagattagtctttcgctaccctaagatcggtcggaagaagaacagttcaatctcggttcatcagaagtgaaactgcttagatcagatttcgtggattccttcacttcaaagtttgcatgaccatcaagcctatgaagaggctgatcactacgctaagaggaaagcagccaatatttgtgcttccactggtgctagaactgtcaagagaaaactagaagcaagtaggattccacccaatgatttggttagaagaacaggcaaagaacagaaagtacccgcttatgaagttcgtcagttaaccaagaatgagttgcctctgaaggtgtctgctaggaatgccatcaatagcgatcacttccataggcctttaagtagcagatgcaatgatcttaccaagaacatttctgagataaggccagtttgcagagctcttcctttgcctgagaaacctttgtgcatcagagaagaggacgagtgctcagtggctagttgcagcgcaaattactcagagtacagtaccagtgataacaaacaatcagtcggaaccggcagttgtttcgctgacgatgttatgtattcatgccaacgcagacaggagaccaagaatgcctatggatctggtttgtttctgaatgtccatgagctggagctgcaagcataccaatcaaccgtcagagctttccatgctgcaggacccctgacatgggagcaagagtcactcctgacaaacctgcgcctctcgctcaacatctcgaatgaggagcacttgcttcagttgaggcatctcctatctctttgataattttcaaaaactaatgtgccttttttatatctgtggattacctccaacccgtagagatctttgcatgcttgtagcgtatgtttcccaccttgactgttgtatataaagaagagttcagagaaatccacttatagctgttgtacttcaccagaactttgttgctaggagtaaatgtcttgcatttttttagtgtttttacaattcaaggaaatgtgaagctatcttcgaaatatatttgtcatgctgataatcaaggttgaaatatcagttcctttaaatgaagctgaagcatcaattctagttactgatctcgctcattgtatctctttcttcgctttggtatcgttctgtatgtttgtagctgaaatgtttcgccattaataggtcctgattaagatctatctttaatactcctagttttgcattggtgctgctgatgtttaaacctcatgctgtgaacacacagatttctgtgcagtggatgaataccactttatgagaaagaggtcgctgaaacagacagtgcactgaagtctgaaaaccaggtgcttgggtgcctttcttctctcccgtcaggccatcatattgaaggcatgtctgggttttatgattcattgatcatggtgacggataagaccgggtacgccatcaaataacctagggaccttaaaatgtgttcatgccctcttgaagttcaaattctgtttatatatattagatgtccccaagggaccctattcttcattttaactgaaaagttatgtaaattttttcttttaatcaaactgcaattgtgtttgtcaattgttcagccaacatctgttcttgtaacttggaacctgtatctctgcagtaagacaccggtacaggaattcaaatgagacactgaaacttcaaagatgctggaaatttgtccgtatttgacttttgttccggaacttttgatgaggctgtattttgtactccatatagttactggtttactgtcgaacggcttaagaaagctaaacagatggaaagggaaactattgttttacggcgactagccaacttattgttttttctcgaacacgcaggagaactgcgcatcattatattgaaagagagaaatgtccg

SEQ ID NO: 68007 - DNA, 722 bp, Zea Mays
cttccttcacacatctccctctcgcgctctctcctccatcccccagagatccaccttcccctgctcgcctccgctcacctgcgtgctccggcaacagccgctttcggacttcggtttccctccaccggcgctccaaagaacgttgacgaatatacagatcagctgaccaagaatgaattatcatcaccaccaaaaaagatgaagcacacccaggttagcaaaagcatgccagattctacatattcaaagaatgacaacatttagtccatcatgaaatatatcaaggtatcatgctccatcacttttggtcctgagacttttatgtacatattaaccttatgtttagaccttcctaaaacggtgtctatgcaagaaaagctaggtcacttttgatcagtaaactgttatttgcaccttgcacacatagaaaaggctccatcacttttggtcacaagacttttatgtacatattaacctgatgttgaagcctttctagaactatgtgtgtatgcaagaaaaactatgtcacttctggtcagtagacttttatgtatatatgactccaccgttggagcctttttacaactatgtttgcatatgtaaactctgcatatacactattactggacactcaattatgctagtttaatgtaacttgccacttattgtaatctaaatttgtattactactgccattgcgctattggtataaaaaaagacaa

SEQ ID NO: 68008 - DNA, 5462 bp, Zea Mays
ataagctggcctgtttttttttgtctttgccatctagtattgctgaacaacccatcgataacgcatggtatagaacaatagatcagttttgctctcatatgcaagtgactgatctagcagtactgataattgttcaatgtagccaacaaatgtagtggtctgcttaatgtggactagttgtcggatcaaatgttcatgttggacgcacccaaaatgctccagaatcaaaatgactgaattcaaaccaattacagaacttaatgcgagaagccataaactgcaacaaaaatccacatgtgaggatctacatttgaataattaaggtggtgttttggtacgatgtttgtaacgcgacctgaatacagataggcaaggctacacctgtttgtttgcgtagagctgttacacgcaatcgaatgcaatgcctgtacaaactgataccgccccttttgatcgttttactctcccacggctcctctccccacgttaccagcctcgtccaaacaaatggtgctttctatttgattactttagcggagattgtgggagcatcaaactcagagcattccattggtcaggggtgggattgggcgaagaggaggcatgcggttgagtatttcattctttgttctactctcaaagtagattcaagcagtgtatgtatctggttattacgggtctatttgggagggctccctccacatcaatgagtcgttttgccaaacaatatgttaagataacactagctcaagaggacaagagccgaagtcatttttacagccatgccgaggcctacatgggtcgtagatcaatatttcacccactctgcgactgccaagtggacatcgggcttcagcttcattgagcctagcagcagcatcctgctgcacttccgcgtcatcaccggcaagggcgatccataggacttgtacccacaagcagtgtaagtaatcataatctgcaggtatccaattccatctcaaattctgcagcacattacatcctacaaatgtaaaataaaactagtagttaattcacttttaacgttggcagtttttacgggtaccgttcagtggtttgttcaaaaaatagcaataccatgaaaatactaggctacaatattttgaaacgcctaagaaccaagaagtctttctggtctgatttgctgttaccattttcctgaaaaaaaaaatatggccaatgcggtatcagactcaaaagtggttatactctgtttggcctcagaattctttgcagtgtgacagcatggctcgcgccaatcagccccgaaagatggtgtttttgattgctgagtttcgtcacaggccactgtcaaagtatttcagatcaatttttttacgatgcagcatacagacgcatgaataaaagcgtggaaatgcaaaagaaaatctgcgggctggaatggggacgtcagaattgcagagttggcagcatggctcgtatcgagccaatcagtcccgaaagatggtgtgttttgattgtgtttttcatcacagtcctcatcagagctcgcaacagaagagagaaataaattcttaaggacgacaaaaaagaggaaaacatcgtctctctgaacaaaactgcacaaagaggagcaaaggggagaaaaggaagagacactcaagaaacaaaccaaccaagatgcttcatgaaactacaagaaagaacgctgaaacagcaaagggcacgggacgtctgcagaagcggcggcggccgtaaagaccaaaccctagctagcggccaggtgacatgatatcgtcgaaaggatggggaggtggcctgtttataaaggagctggggtgtagtcccagccgttggattacttcctgagaacgatgtgcccgatgagggtttccatgttgtgtgtggccaaatttcagcccagtgcgatacgatacgatacggcctatgacgtttttttttcaaatggaaacaggagagtatgccggcccataccaaaagaacagcccaagcagttagtctggtgctatgcatccactcgcctgaactgaacgtggtccctctcctctgtcctccgcgatggtggtccccagctcggcaaatgttgtccccggggcggcagcgccggcggcctgaagcgcgacgactaggacggcagcggcaatctttagcgctgtcggcggcgggatactcgctgcgcgccacgcgctgacatggacgagcccccgtgcccgcccccgcggcccgcgctcaactccgccgccgcgacgtcatggccggagctgctcgcgccgttcgacctctcccgcctccgcgccacgctgtcctcgcacccgctcaccccgcgccgcctggcccgcctcctcgcgctcccgctcgcgccggccacctccctgctcctcctcgactggtacgcgtcgtcccacccggcgctctcgctctcgtccctcccgctccgccccatcctcgcggcagccgaccccgaccgcgcgctcgcgctcctcgactccctgccggcctcccgcctgcccccgctccgcgagtccctcctgctcccgctgctccgctccctgccacccggccgcgcgctccacctgctcgaccagatgccccgccgcttcgccgtctccccctccttccgctcctacaacgtcgtcctctccacgctcgccagggccgactgccacgccgacgccctgctcctgtaccgccggatgctcagggaccgcgtgccgcccaccaccttcaccttcggtgtcgccgcgcgcgcgctctgccgcctcggccgcgccggcgacgcgctcgcgctgctccgcgggatggcgcgccacggatgcgtgcctgatgcggttctctaccagactgtcatccacgccctggtcgcgcagggcggggtcgccgaggccgcgatgctcctcgacgagatgttactcatggggtgtgcggcggacgtgaacaccttcaacgacctggtgctcgggctgtgcgggctcgggcgcgtgcgagaggcagccaggctggtggacaggatgatgacgcagggatgcatgccaagtgtggtgacatatgggttcctcctgcaagggctgtgccgaacaaggcaggcggacgaggcgtgcgccatgctcgggaggttgccggaggtgaacgtggtgatgcttaacacggtgatccgtggatgtctgacggaggggaagctggccagggcaacagagttgtatgagatgatgggttcaaaaggatgcccgcctgatgtgcacacatacagtattttgatgcatggcctttgcaagcttgggagatttggttcagcagtgcggatgcttgatgagatggaggagaagggttgtgcaccaaatatcgtgacctactctaccttgctgcattcattttgcaggaatggcatgtgggatgacgcaagagcaatgctggatcagatgttagccaagggctttagtatgaactcccaaggatacaatggtatcatatatgccttatgcaaggatggcaagcttgatcaagcgacaaggcttgtccaagagatgaagagtcaggggtgcaagcctgatatttgcacgtacaatacaatgatttatcatctgtgcaacaatgacctgatggaggaggcagaacatattttcagaaacttaattgaagagggtgttgttgccaatggaataacttataatactctcattcatgcacttctgcgcaacggaaggtggcaggagggcctaaggcttgcaagtgaaatgctacttcatggttgccagctagatgttattagctacaatggcctgattaaagccctctgcaaagaggggaatgttgatcggagtatggcgttgcttgaggaaatggtgacaaagggaattaagccaaataatttctcgtataacatgctgatcaatgaactctgcaaggcgggaaaggtacgtgatgcactggagctctcaaaggagatgctgaatcaaggactgacacctgacattgtgacttacaatacactcataaatgggttatgcaaagtgggatggacacatgctgctttaaatcttttagagaagctacccaacgaaaatgtgcatcctgacattgtgacatacaacattctcattagttggcactgcaaagtcagattgcttgatgatgccgctatgcttctagacaaagcaataagtggaggaatagttcctaatgagcgaacgtggggaatgatggtgcaaaattttgtcagacagacagtcaatctcgagggttactaaaaggatttattgtatatgttgtatgtcatatcagttttgggactccgcagctcgatatgcttttagatcaatatgggcacatcttaacttccagcatactgcctgccgtgcatgtcgtcatgtcgatctggactgttggagccctttttctcttaggttactgattaaccaccaaagcaaatagccattgacagaattcaaccagagtcttggctgaaaattcttgaatgggaatggaagatctctggtagcacagtggtcatgttgtgagtgatatataatggacctttctactgttccagctgcacatcctacctgcagtagtgaaccaccctaagtggcagtgaactatcaagtaagtagttgaatatacctatgaagcatggaccagagtctccctggggtggttggcactagtcgtgaacttgcgatgctgctgtctgtggtcagcgtttccacggcacttaagggtcaacatttaaggaacactccgtcgtgctgaacccaagcactttgattgatggaatgctgaaaaaaaaagcatgcgtgtggcccatgaaagcatggcaaggcctcccagaggttgagaacgtgtctccagaaactctgtatcatcttggtacactgatcgatcttggttgaatctaatcttctgttaccgaaaaattctgcggctgtcgggctcgaatctgtagacggctctggcaaggaggagtcccgttgctggtttggataattttctgttgggcgatcgatgaatgctgtctgctgccgcctgttgagtgcttgtggagtagcaccgtggtgtgggaaaggccgaggcaagtacctgggtggtagtagcacggccatggtgtgcgtgcctgcgtgcgctacacccacgccgctggccccacggctggctgatggcacggaccgtataccttgttgtctcggtcaaaatggatgtactaccaccaccgctcgtgcgcactgctactgtgctacctgttccccgtcccccgatgcttctccagtggtccatctgctgctccgcttaccaggtggaaaaaatcactggtggtaaaacaataagggcacaacaaacgatggactcaagaatataagaaatacatagggtatgatgataatgtgtaaaccattcatttttacacaaacagttacgatgattttttttttaaaaaaaacaacatttctattatacattaacttttc

SEQ ID NO: 68009 - DNA, 951 bp, Zea Mays
ctttcttgactaacaatactgttcagattcacgggcgaggcaggcgacggcgggggggcgccgcagcagcagcagcagcagcacgtgtgggagaagtggtcgacggacggcacggagaagcaggtggcgaagctgatggaggaggacatcggggcggcaatgcagttcctccagtccaaggcgctgtgcatgatgccggtctcgctcgcgatggcgatctacgacacccagcaccccctggacggccacggccactcgctgaagcccgagcccaacgcgtcatcctagtacagtaacgtcgtccttagcgtgccttccaattccaacacccaccccccttctccctaaaaagtactgttaggcgccgatattatccggaagaaaaaaagaagtgtatgatataccgagcgtgcgtttccagtgtgctgacccgtgggataggaaaggaccgaaaattgttggtatatgatgattatgtagcctcctgtttgcctgttctgtttcaaatcaaagcaatgctcatgcatccaggtttcaatgtgcctatgagtgcaagtgatgggcagcagagagtctggcactgctctcatgctgcctgtttccctttgggcggtgtagtgcactggccatagacttgggtgggtggtggtagggccgcccgccggtcgccccttttggtagtgggtgtttggaccaatggaaagaggctgctgatgtatgtgctggtaattctgagcgagcaaacggttgacgaaatctgaaagaatgtggtggtggtggtggtgggtggtgatagcttgtctttttattttattttaaaaaaaatagagtgggagcggaggtctgggtcaatggaggcccgagcgtgcgatgatcggctgggcgctagtggggagcgtgctcctccgggtcttggcttttctgcctacaagtcgccgtcttgataagaac

SEQ ID NO: 68010 - DNA, 1396 bp, Zea Mays
cgtgcttctctcgggtgtgaactagattagcggatgtaaatgggcgtgtttaagggcatgtttggtttcactcagataagcattatcagctaaactttagttatcttgaaaccaaacagtctcgacaatgatagataaactttagctagagctcatattttattatctcatcatcttctgaactccagctaatggccgctaatactgggtgattgactcgtataccatgattttcacctgtcctggacatagtcccgcgatattaaaaaagctaaggagagagagaattgcagaaaggatgagggcattgcaggaattagtccccaacacaaacaagacagatagggcagccatgctagatgagatccttgattatgtgaagtttcttaggcttcaagtaaaggttctgagtatgagcagactgggcggtgctggcgcggttgcgcagctggttgctgatattccactctcagttaagggcgaggcaggcgacggcgggggggcgccgcagcagcagcagcagcagcacgtgtgggagaagtggtcgacggacggcacggagaagcaggtggcgaagctgatggaggaggacatcggggcggcaatgcagttcctccagtccaaggcgctgtgcatgatgccggtctcgctcgcgatggcgatctacgacacccagcaccccctggacggccacggccactcgctgaagcccgagcccaacgcgtcatcctagtacagtaacgtcgtccttagcgtgccttccaattccaacacccaccccccttctccctaaaaagtactgttaggcgccgatattatccggaagaaaaaaagaagtgtatgatataccgagcgtgcgtttccagtgtgctgacccgtgggataggaaaggaccgaaaattgttggtatatgatgattatgtagcctcctgtttgcctgttctgtttcaaatcaaagcaatgctcatgcatccaggtttcaatgtgcctatgagtgcaagtgatgggcagcagagagtctggcactgctctcatgctgcctgtttccctttgggcggtgtagtgcactggccatagacttgggtgggtggtggtagggccgcccgccggtcgccccttttggtagtgggtgtttggaccaatggaaagaggctgctgatgtatgtgctggtaattctgagcgagcaaacggttgacgaaatctgaaagaatgtggtggtggtggtggtgggtggtgatagcttgtctttttattttattttaaaaaaaatagagtgggagcggaggtctgggtcaatggaggcccgagcgtgcgatgatcggctgggcgctagtggggagcgtgctcctccgggtcttggcttttctgcctacaagtcgccgtcttgataagaac

SEQ ID NO: 68011 - DNA, 1219 bp, Zea Mays
atttaggtcgcgctttcgtaatctcattgcagacgcttgcgcaatctgcggttgatgtagccagtagtgcctgtagtggcccacgagatttcagctaaggagagagagaattgcagaaaggatgagggcattgcaggaattagtccccaacacaaacaagacagatagggcagccatgctagatgagatccttgattatgtgaagtttcttaggcttcaagtaaaggttctgagtatgagcagactgggcggtgctggcgcggttgcgcagctggttgctgatattccactctcagttaagggcgaggcaggcgacggcgggggggcgccgcagcagcagcagcagcagcacgtgtgggagaagtggtcgacggacggcacggagaagcaggtggcgaagctgatggaggaggacatcggggcggcaatgcagttcctccagtccaaggcgctgtgcatgatgccggtctcgctcgcgatggcgatctacgacacccagcaccccctggacggccacggccactcgctgaagcccgagcccaacgcgtcatcctagtacagtaacgtcgtccttagcgtgccttccaattccaacacccaccccccttctccctaaaaagtactgttaggcgccgatattatccggaagaaaaaaagaagtgtatgatataccgagcgtgcgtttccagtgtgctgacccgtgggataggaaaggaccgaaaattgttggtatatgatgattatgtagcctcctgtttgcctgttctgtttcaaatcaaagcaatgctcatgcatccaggtttcaatgtgcctatgagtgcaagtgatgggcagcagagagtctggcactgctctcatgctgcctgtttccctttgggcggtgtagtgcactggccatagacttgggtgggtggtggtagggccgcccgccggtcgccccttttggtagtgggtgtttggaccaatggaaagaggctgctgatgtatgtgctggtaattctgagcgagcaaacggttgacgaaatctgaaagaatgtggtggtggtggtggtgggtggtgatagcttgtctttttattttattttaaaaaaaatagagtgggagcggaggtctgggtcaatggaggcccgagcgtgcgatgatcggctgggcgctagtggggagcgtgctcctccgggtcttggcttttctgcctacaagtcgccgtcttgataagaac

SEQ ID NO: 68012 - DNA, 1868 bp, Zea Mays
tcaccgggccgtcccactgccccagcccagacagacgttacggcagccgaacgcggtccgcgaggcccagttccgtactgtttgtatctcaggagtgtatggcccacataactcacggcccatagctcttcgcctctttccccttcccctgcctctactaaagaaacgcccgacggcagcctccgcttcctcctacagcttcacacttccccagcagagcaggcaaaccgctcccagtcccagtctctcacctgaggtgactggcgtctcttgtcgcaagccgccagaagcttcggcccctgacgcgtgggggccccgtccgcccccgcccccgtccccacgttgccggccatggcggggcagccaccgccgtccggggcctccgaggacgacttcctcgagcacttcttcgccttcccctccgcggcctccgccggcgctgccgggggccacgcgggcgccggtgttggcggggaccaccccttccccctcgccctcagcctcgacgccgccgccgaggccaagccggaccgtgatcccgtgcagctcgccggcctcttcccgccggtgttcgctggcgccggcggcgtgcaccagccgcacctccgcggcccaccgcctccgcagatgttccaggcgcagccgaagccgggcgagggaggcatggcgccgcagccgccagccccgcggcccaaggtgcgcgcgcggcgggggcaggccaccgatccccacagtattgcggagaggctaaggagagagagaattgcagaaaggatgagggcattgcaggaattagtccccaacacaaacaagatagggcagccatgctagatgagatccttgattatgtgaagtttcttaggcttcaagtaaaggttctgagtatgagcagactgggcggtgctggcgcggttgcgcagctggttgctgatattccactctcagttaagggcgaggcaggcgacggcgggggggcgccgcagcagcagcagcagcagcacgtgtgggagaagtggtcgacggacggcacggagaagcaggtggcgaagctgatggaggaggacatcggggcggcaatgcagttcctccagtccaaggcgctgtgcatgatgccggtctcgctcgcgatggcgatctacgacacccagcaccccctggacggccacggccactcgctgaagcccgagcccaacgcgtcatcctagtacagtaacgtcgtccttagcgtgccttccaattccaacacccaccccccttctccctaaaaagtactgttaggcgccgatattatccggaagaaaaaaagaagtgtatgatataccgagcgtgcgtttccagtgtgctgacccgtgggataggaaaggaccgaaaattgttggtatatgatgattatgtagcctcctgtttgcctgttctgtttcaaatcaaagcaatgctcatgcatccaggtttcaatgtgcctatgagtgcaagtgatgggcagcagagagtctggcactgctctcatgctgcctgtttccctttgggcggtgtagtgcactggccatagacttgggtgggtggtggtagggccgcccgccggtcgccccttttggtagtgggtgtttggaccaatggaaagaggctgctgatgtatgtgctggtaattctgagcgagcaaacggttgacgaaatctgaaagaatgtggtggtggtggtggtgggtggtgatagcttgtctttttattttattttaaaaaaaatagagtgggagcggaggtctgggtcaatggaggcccgagcgtgcgatgatcggctgggcgctagtggggagcgtgctcctccgggtcttggcttttctgcctacaagtcgccgtcttgataagaac

SEQ ID NO: 68013 - DNA, 1932 bp, Zea Mays
ccaaaccacgcccgctccccacgcgatggccgctcatcccgtcgacgcgcccaccgcagttcacacccgcgccccggctcccccgcctcaccgcgcggctctgccaacactctatgagttcgatgatctcgagagcatcattgataggacactaaagcgcgattttgacaccgaggaagcactctggttgcttaagataggtcttgtgtgcatcccggatagccctaagatcaagccctccatgtcaatggttgccaagatgctacaaggtgagtgtgctgtgagtgacaggatcatgaggcctggcctgatcacagacgtcatggacctgaaagtcaggatggtagagccgattcagttcaacttgacatcatgctcgagcactgccgcaccggaccttgtcaggtccatttggaggcccaggatgtcaaaatcaagaacatgagaagcactttgagcattttacacctaatatgagcaaagcacgaaatgaatctgcatttcctcaggatgaaattgactcacatagagagcatttttataatgaactaacctcagattcaattgcttcaaagaagccaaaaataaggaagagagaaaataacaattctgtttcaagttctgctcccaacattcctaatactcaaggtggtggaggatttctgtggaaaaccgaaattcctgaagatggaaattgcggtgactggttgtcaatcccacttggtgatgttaaggttctcgtgaatgaaattacatctgttcgatccaaaaggatattgcatgaggttcctatggatacagttacaaggttattggatgtgattgatcgtcagattcgatattctcaaggtttgtcgatagatgtgaaagaaaattcagcatgaacaaggtcgaggcattgtacaggttgttcaagaagattggcaacaccttcattgatgatgggctgattaacaaggctctttcaaatggcaagcccactgttgttgagttttatgcaaactggtatgaagtctgcagggaactagctctagatatctacaaagctgaacaacaatacaagtctgcagggaactagactctgagaaccatgttgctgatgcggagagcattgtagccaagggcataagagatggtgcaattgatgccaccatagatcaagcaaatggctggatggtatggaaggaaactggtgatgtctactctacaaatgagccatagatcatacaaatgagcccttgatgccacccaggattgggtccgccccctatctttcagtattcattggtttctatgattctgctcccttgtgttgctactgtttgtataggttttgcagagcctgcgatttatgtgagttaacatatcgatcttgaattcacatcacgggaagacacgtggtatgggagttgggcgcaagctcaagagccaccgcaggaaccagaggtgggctgacaaagcatacaaaaagccacttgggcaatgagtggaaaaaaccttttgctggatcatctcacgctaagggcatcattctggagaaaattggtattgaggccaagcagccaaattcggccatccgtaagtgtgcccgtgttcagctggtgaaggatggaaagaagattgctgcctttgtgccgaatgatggttgcctaaactacatcgaggagaatgatgaggtgttgattgttggatttggtcgtaactcgtaagggtcatgctgtgggagacattcctggtgtcaggttcaaggttgttaaggtttctggtgtgtcgctacttgcactcttcaaggagaagaagccaaggtcagtttggaagaaacattctcctttattcacaaactatgttgattttctgaccaagtgtccttccatacagatccatagaaaatatagtacaggtggcagcacggagaagacgtttgaaagataa

SEQ ID NO: 68014 - DNA, 2322 bp, Zea Mays
ccccgcgcatcccgcagcgctcagcttcccgaaaacctatcgcgtcgtagccgccatcaggcctccgcacaatcccctgcctgctcgccacgcagccttggcgccgtgaccgccgcctctgctccctaactccgccccgtgacgcccccagcccccaaaccacgcccgctccccacgcgatggccgctcatcccgtcgacgcgcccaccgcagttcacacccgcgccccggctcccccgcctcaccgcgcggctctgccaacactctatgagttcgatgatctcgagagcatcattgataggacactaaagcgcgattttgacaccgaggaagcactctggttgcttaagataggtcttgtgtgcatcccggatagccctaagatcaagccctccatgtcaatggttgccaagatgctacaaggtgagtgtgctgtgagtgacaggatcatgaggcctggcctgatcacagacgtcatggacctgaaagtcaggatggtagagccgattcagttcaacttgacatcatgctcgagcactgccgcaccggaccttgtcaggtccatttggaggcccaggatgtcaaaatcaagaacatgagaagcactttgagcattttacacctaatatgagcaaagcacgaaatgaatctgcatttcctcaggatgaaattgactcacatagagagcatttttataatgaactaacctcagattcaattgcttcaaagaagccaaaaataaggaagagagaaaataacaattctgtttcaagttctgctcccaacattcctaatactcaaggtggtggaggatttctgtggaaaaccgaaattcctgaagatggaaattgcggtgactggttgtcaatcccacttggtgatgttaaggttctcgtgaatgaaattacatctgttcgatccaaaaggatattgcatgaggttcctatggatacagttacaaggttattggatgtgattgatcgtcagattcgatattctcaagtcagcatgaacaaggtcgaggcattgtacaggttgttcaagaagattggcaacaccttcattgatgatgggctgattaacaaggctctttcaaatggcaagcccactgttgttgagttttatgcaaactggtatgaagtctgcagggaactagctctagatatctacaaagctgaacaacaatacaagtctgcagggaactagactctgagaaccatgttgctgatgcggagagcattgtagccaagggcataagagatggtgcaattgatgccaccatagatcaagcaaatggctggatggtatggaaggaaactggtgatgtctactctacaaatgagccatagatcatacaaatgagcccttgatgccacccaggattgggtccgccccctatctttcagtattcattggtttctatgattctgctcccttgtgttgctactgtttgtataggttttgcagagcctgcgatttatgtgagttaacatatcgatcttgaattcacatcacgggaagacacgtggtatgggagttgggcgcaagctcaagagccaccgcaggaaccagaggtgggctgacaaagcatacaaaaagccacttgggcaatgagtggaaaaaaccttttgctggatcatctcacgctaagggcatcattctggagaaaattggtattgaggccaagcagccaaattcggccatccgtaagtgtgcccgtgttcagctggtgaaggatggaaagaagattgctgcctttgtgccgaatgatggttgcctaaactacatcgaggagaatgatgaggtgttgattgttggatttggtcgtaactcgtaagggtcatgctgtgggagacattcctggtgtcaggttcaaggttgttaaggtttctggtgtgtcgctacttgcactcttcaaggagaagaagccaaggtcttagatcactttcggtagtcaagaatggtgtaaactgcccaaggctctgttgtcaaagttaaagttttgctagcaacagagctgttaattctaagttgtacctttttgttaacattgacagttatgttacagtgtaaactgcccaaggctctgttgtcaaagttaaagttctgctagcaacagagctgttaattctgagctgtacctttttgttaacattgatagctctgttacacgacattattatttccttatgaaggtcagtttggaagaaacattctcctttattcacaaactatgttgattttctgaccaagtgtccttccatacagatccatagaaaatatagtacaggtggcagcacggagaagacgtttgaaagataa

SEQ ID NO: 68015 - DNA, 3913 bp, Zea Mays
agcatcaccatgcccccgcccgaccccgcgcatcccgcagcgctcagcttcccgaaaacctatcgcgtcgtagccgccatcaggcctccgcacaatcccctgcctgctcgccacgcagccttggcgccgtgaccgccgcctctgctccctaactccgccccgtgacgcccccagcccccaaaccacgcccgctccccacgcgatggccgctcatcccgtcgacgcgcccaccgcagttcacacccgcgccccggctcccccgcctcaccgcgcggctctgccagtgatcgtcgattcgcctcgccgcgctgtctgagagaaggaaagaggagctcaggacagcagcggctggcgcgaggtgcccggaggcagacgtgacgacgacgaggcctttgtagatctcagcaggcacggctcgcctccgcgtgggcaagctctgaggcggcgtcccttcccttctcgtcggcttccattctccaccgcgctcactccatttttcgtcgtgatcccttcctctccatgggcttccatgaaccctagagctcgcccgtccatggagtacgtgctcaccatcagcggatccccaggtcgtacctactaaacactagctcgtatggtcctgatcccccaggttctaccctaatccgcagcagccttcgcctcgggctcacctcccgctccatctcctctgtttcctcctcgcgctctgcagcggcgtctcgatccccgaggtcgtcgccttcttcaaccacattgccccttccgttgccaattagctccccgatttctactactcttgaccggcattaatttggcgctactatctaccttgatttactagcaagacattaacctttgtaatagttttggaactgggtaacgtgaatttgggtgtcaaaattcagattctgaagttgctcatttcctggaaacaatatttgttcgtttttatttttttaattatcacaaccactatgatctgctccctctgttacagagtttaagatgttttttccttaagtcaaactatgtattaccagaaaactaagcaaattggcaatcaaactaactaattagtgaggggtaagttagtctaattgtcagactccttatttggttctaaaattgcttagatgtcttgtatttcaggatggatggagtgtttttttgttgtagttatctattctatctgatgagcgtttctttctataatagagaccatgtttctttctataatagagaatatgatgagcgttttgactattggaacttcatatgctaccttttttagtgtcatttctatctttgcatattttcaaattacatgtcatcctacagtagtggatgcttcatcataactgatcagttaaattatctaaaacaagtagctaaatataattaatagtaaaaattacagatttaagggttataagtaacatgtatttggtgttagttttttacacatgtgaaagctatttgcttcagtacatagatctctgcagatgataaagtaatactaggcttgatagtattgtccatcatttgcttcagtatatagatctttgcttcagtacatatctctcacttcctatccaagtgtttgctcccagttctatagcactctgcagatgatttgcttcaatacttagtggctattttttctactacactggttaaagaaaaacagagaaaagaaaatctgcatgtgtattatagttaacctatcatatatatatgaaagtgtaagttgttgccttgaaaaacttgagatgcactcaaataacgcaagcagagagtatttactcaatctaaataatgaaataaatttacttagtttgatggttcacataacacaacaaccaaataaacaatttaaattagtcagttttttgtcattctaaataatgaaatagttattattaataccatgggatattcttattttgtgaaggcatctaccagaataggaaaaggttattattaataccaaggttgctagcttcgaaatacctgaagtgctactgctatcagttcttagactttggtttaaatcatctaaattttttctgttgttctgtcaggtctagacactctatgagttcgatgatctcgagagcatcattgataggacactaaagcgcgattttgacaccgaggaagcactctggttgcttaagataggtcttgtgtgcatcccggatagccctaagatcaagccctccatgtcaatggttgccaagatgctacaaggtgagtgtgctgtgagtgacaggatcatgaggcctggcctgatcacagacgtcatggacctgaaagtcaggatggtagagccgattcagttcaacttgacatcatgctcgagcactgccgcaccggaccttgtcaggtccatttggaggcccaggatgtcaaaatcaagaacatgagaagcactttgagcattttacacctaatatgagcaaagcacgaaatgaatctgcatttcctcaggatgaaattgactcacatagagagcatttttataatgaactaacctcagattcaattgcttcaaagaagccaaaaataaggaagagagaaaataacaattctgtttcaagttctgctcccaacattcctaatactcaaggtggtggaggatttctgtggaaaaccgaaattcctgaagatggaaattgcggtgactggttgtcaatcccacttggtgatgttaaggttctcgtgaatgaaattacatctgttcgatccaaaaggatattgcatgaggttcctatggatacagttacaaggttattggatgtgattgatcgtcagattcgatattctcaaggtttgtcgatagatgtgaaagaaaattcagcatgaacaaggtcgaggcattgtacaggttgttcaagaagattggcaacaccttcattgatgatgggctgattaacaaggctctttcaaatggcaagcccactgttgttgagttttatgcaaactggtatgaagtctgcagggaactagctctagatatctacaaagctgaacaacaatacaagtctgcagggaactagactctgagaaccatgttgctgatgcggagagcattgtagccaagggcataagagatggtgcaattgatgccaccatagatcaagcaaatggctggatggtatggaaggaaactggtgatgtctactctacaaatgagccatagatcatacaaatgagcccttgatgccacccaggattgggtccgccccctatctttcagtattcattggtttctatgattctgctcccttgtgttgctactgtttgtataggttttgcagagcctgcgatttatgtgagttaacatatcgatcttgaattcacatcacgggaagacacgtggtatgggagttgggcgcaagctcaagagccaccgcaggaaccagaggtgggctgacaaagcatacaaaaagccacttgggcaatgagtggaaaaaaccttttgctggatcatctcacgctaagggcatcattctggagaaaattggtattgaggccaagcagccaaattcggccatccgtaagtgtgcccgtgttcagctggtgaaggatggaaagaagattgctgcctttgtgccgaatgatggttgcctaaactacatcgaggagaatgatgaggtgttgattgttggatttggtcgtaactcgtaagggtcatgctgtgggagacattcctggtgtcaggttcaaggttgttaaggtttctggtgtgtcgctacttgcactcttcaaggagaagaagccaaggtcagtttggaagaaacattctcctttattcacaaactatgttgattttctgaccaagtgtccttccatacagatccatagaaaatatagtacaggtggcagcacggagaagacgtttgaaagataa

SEQ ID NO: 68016 - DNA, 2622 bp, Zea Mays
ccacagcatcaccatgcccccgcccgaccccgcgcatcccgcagcgctcagcttcccgaaaacctatcgcgtcgtagccgccatcaggcctccgcacaatcccctgcctgctcgccacgcagccttggcgccgtgaccgccgcctctgctccctaactccgccccgtgacgcccccagcccccaaaccacgcccgctccccacgcgatggccgctcatcccgtcgacgcgcccaccgcagttcacacccgcgccccggctcccccgcctcaccgcgcggctctgccagtgatcgtcgattcgcctcgccgcgctgtctgagagaaggaaagaggagctcaggacagcagcggctggcgcgaggtgcccggaggcagacgtgacgacgacgaggcctttgtagatctcagcaggcacggctcgcctccgcgtgggcaagctctgaggcggcgtcccttcccttctcgtcggcttccattctccaccgcgctcactccatttttcgtcgtgatcccttcctctccatgggcttccatgaaccctagagctcgcccgtccatggagtacgtgctcaccatcagcggatccccaggtcgtacctactaaacactagctcgtatggtcctgatcccccaggttctaccctaatccgcagcagccttcgcctcgggctcacctcccgctccatctcctctgtttcctcctcgcgctctgcagcggcgtctcgatccccgaggtctagacactctatgagttcgatgatctcgagagcatcattgataggacactaaagcgcgattttgacaccgaggaagcactctggttgcttaagataggtcttgtgtgcatcccggatagccctaagatcaagccctccatgtcaatggttgccaagatgctacaaggtccatttggaggcccaggatgtcaaaatcaagaacatgagaagcactttgagcattttacacctaatatgagcaaagcacgaaatgaatctgcatttcctcaggatgaaattgactcacatagagagcatttttataatgaactaacctcagattcaattgcttcaaagaagccaaaaataaggaagagagaaaataacaattctgtttcaagttctgctcccaacattcctaatactcaaggtggtggaggatttctgtggaaaaccgaaattcctgaagatggaaattgcggtgactggttgtcaatcccacttggtgatgttaaggttctcgtgaatgaaattacatctgttcgatccaaaaggatattgcatgaggttcctatggatacagttacaaggttattggatgtgattgatcgtcagattcgatattctcaaggtttgtcgatagatgtgaaagaaaattcagcatgaacaaggtcgaggcattgtacaggttgttcaagaagattggcaacaccttcattgatgatgggctgattaacaaggctctttcaaatggcaagcccactgttgttgagttttatgcaaactggtatgaagtctgcagggaactagctctagatatctacaaagctgaacaacaatacaagtctgcagggaactagactctgagaaccatgttgctgatgcggagagcattgtagccaagggcataagagatggtgcaattgatgccaccatagatcaagcaaatggctggatggtatggaaggaaactggtgatgtctactctacaaatgagccatagatcatacaaatgagcccttgatgccacccaggattggggttttgcagagcctgcgatttatgtgagttaacatatcgatcttgaattcacatcacgggaagacacgtggtatgggagttgggcgcaagctcaagagccaccgcaggaaccagaggtgggctgacaaagcatacaaaaagccacttgggcaatgagtggaaaaaaccttttgctggatcatctcacgctaagggcatcattctggagaaaattggtattgaggccaagcagccaaattcggccatccgtaagtgtgcccgtgttcagctggtgaaggatggaaagaagattgctgcctttgtgccgaatgatggttgcctaaactacatcgaggagaatgatgaggtgttgattgttggatttggtcgtaactcgtaagggtcatgctgtgggagacattcctggtgtcaggttcaaggttgttaaggtttctggtgtgtcgctacttgcactcttcaaggagaagaagccaaggtcttagatcactttcggtagtcaagaatggtgtaaactgcccaaggctctgttgtcaaagttaaagttttgctagcaacagagctgttaattctaagttgtacctttttgttaacattgacagttatgttacagtgtaaactgcccaaggctctgttgtcaaagttaaagttctgctagcaacagagctgttaattctgagctgtacctttttgttaacattgatagctctgttacacgacattattatttccttatgaaggtcagtttggaagaaacattctcctttattcacaaactatgttgattttctgaccaagtgtccttccatacagatccatagaaaatatagtacaggtggcagcacggagaagacgtttgaaagataa

SEQ ID NO: 68017 - DNA, 4478 bp, Zea Mays
gtccacagcatcaccatgcccccgcccgaccccgcgcatcccgcagcgctcagcttcccgaaaacctatcgcgtcgtagccgccatcaggcctccgcacaatcccctgcctgctcgccacgcagccttggcgccgtgaccgccgcctctgctccctaactccgccccgtgacgcccccagcccccaaaccacgcccgctccccacgcgatggccgctcatcccgtcgacgcgcccaccgcagttcacacccgcgccccggctcccccgcctcaccgcgcggctctgccagtgatcgtcgattcgcctcgccgcgctgtctgagagaaggaaagaggagctcaggacagcagcggctggcgcgaggtgcccggaggcagacgtgacgacgacgaggcctttgtagatctcagcaggcacggctcgcctccgcgtgggcaagctctgaggcggcgtcccttcccttctcgtcggcttccattctccaccgcgctcactccatttttcgtcgtgatcccttcctctccatgggcttccatgaaccctagagctcgcccgtccatggagtacgtgctcaccatcagcggatccccaggtcgtacctactaaacactagctcgtatggtcctgatcccccaggttctaccctaatccgcagcagccttcgcctcgggctcacctcccgctccatctcctctgtttcctcctcgcgctctgcagcggcgtctcgatccccgaggtcgtcgccttcttcaaccacattgccccttccgttgccaattagctccccgatttctactactcttgaccggcattaatttggcgctactatctaccttgatttactagcaagacattaacctttgtaatagttttggaactgggtaacgtgaatttgggtgtcaaaattcagattctgaagttgctcatttcctggaaacaatatttgttcgtttttatttttttaattatcacaaccactatgatctgctccctctgttacagagtttaagatgttttttccttaagtcaaactatgtattaccagaaaactaagcaaattggcaatcaaactaactaattagtgaggggtaagttagtctaattgtcagactccttatttggttctaaaattgcttagatgtcttgtatttcaggatggatggagtgtttttttgttgtagttatctattctatctgatgagcgtttctttctataatagagaccatgtttctttctataatagagaatatgatgagcgttttgactattggaacttcatatgctaccttttttagtgtcatttctatctttgcatattttcaaattacatgtcatcctacagtagtggatgcttcatcataactgatcagttaaattatctaaaacaagtagctaaatataattaatagtaaaaattacagatttaagggttataagtaacatgtatttggtgttagttttttacacatgtgaaagctatttgcttcagtacatagatctctgcagatgataaagtaatactaggcttgatagtattgtccatcatttgcttcagtatatagatctttgcttcagtacatatctctcacttcctatccaagtgtttgctcccagttctatagcactctgcagatgatttgcttcaatacttagtggctattttttctactacactggttaaagaaaaacagagaaaagaaaatctgcatgtgtattatagttaacctatcatatatatatgaaagtgtaagttgttgccttgaaaaacttgagatgcactcaaataacgcaagcagagagtatttactcaatctaaataatgaaataaatttacttagtttgatggttcacataacacaacaaccaaataaacaatttaaattagtcagttttttgtcattctaaataatgaaatagttattattaataccatgggatattcttattttgtgaaggcatctaccagaataggaaaaggttattattaataccaaggttgctagcttcgaaatacctgaagtgctactgctatcagttcttagactttggtttaaatcatctaaattttttctgttgttctgtcaggtctagacactctatgagttcgatgatctcgagagcatcattgataggacactaaagcgcgattttgacaccgaggaagcactctggttgcttaagataggtcttgtgtgcatcccggatagccctaagatcaagccctccatgtcaatggttgccaagatgctacaaggtgagtgtgctgtgagtgacaggatcatgaggcctggcctgatcacagacgtcatggacctgaaagtcaggatggtagagccgattcagttcaacttgacatcatgctcgagcactgccgcaccggaccttgtcaggtccatttggaggcccaggatgtcaaaatcaagaacatgagaagcactttgagcattttacacctaatatgagcaaagcacgaaatgaatctgcatttcctcaggatgaaattgactcacatagagagcatttttataatgaactaacctcagattcaattgcttcaaagaagccaaaaataaggaagagagaaaataacaattctgtttcaagttctgctcccaacattcctaatactcaaggtggtggaggatttctgtggaaaaccgaaattcctgaagatggaaattgcggtgactggttgtcaatcccacttggtgatgttaaggttctcgtgaatgaaattacatctgttcgatccaaaaggatattgcatgaggttcctatggatacagttacaaggttattggatgtgattgatcgtcagattcgatattctcaaggtttgtcgatagatgtgaaagaaaatgtgagttacttaccatgtcatagtagtttacatgattattcgtgttttgtagccaggattaacctcactacaatgctctagcagtctactactctacttgcctttcttcgattaattttcctaaagtgaaatcgtgtgatagttgttcgttcggttagcagaaaattataggagttacagctcagttggttgtagaagtccggtagccttgcacaatgtttagaagaagccataatattgagcagatgacggtcaaaaatagcactggattaagaagctgttttttggctcacactaataactttgtttgtgattttggtcatcattttcctgcctggttgggttgcatctgcttgtcattcttgcagtcagcatgaacaaggtcgaggcattgtacaggttgttcaagaagattggcaacaccttcattgatgatgggctgattaacaaggctctttcaaatggcaagcccactgttgttgagttttatgcaaactggtatgaagtctgcagggaactagctctagatatctacaaagctgaacaacaatacaagtctgcagggaactagactctgagaaccatgttgctgatgcggagagcattgtagccaagggcataagagatggtgcaattgatgccaccatagatcaagcaaatggctggatggtatggaaggaaactggtgatgtctactctacaaatgagccatagatcatacaaatgagcccttgatgccacccaggattggggttttgcagagcctgcgatttatgtgagttaacatatcgatcttgaattcacatcacgggaagacacgtggtatgggagttgggcgcaagctcaagagccaccgcaggaaccagaggtgggctgacaaagcatacaaaaagccacttgggcaatgagtggaaaaaaccttttgctggatcatctcacgctaagggcatcattctggagaaaattggtattgaggccaagcagccaaattcggccatccgtaagtgtgcccgtgttcagctggtgaaggatggaaagaagattgctgcctttgtgccgaatgatggttgcctaaactacatcgaggagaatgatgaggtgttgattgttggatttggtcgtaactcgtaagggtcatgctgtgggagacattcctggtgtcaggttcaaggttgttaaggtttctggtgtgtcgctacttgcactcttcaaggagaagaagccaaggtcttagatcactttcggtagtcaagaatggtgtaaactgcccaaggctctgttgtcaaagttaaagttttgctagcaacagagctgttaattctaagttgtacctttttgttaacattgacagttatgttacagtgtaaactgcccaaggctctgttgtcaaagttaaagttctgctagcaacagagctgttaattctgagctgtacctttttgttaacattgatagctctgttacacgacattattatttccttatgaaggtcagtttggaagaaacattctcctttattcacaaactatgttgattttctgaccaagtgtccttccatacagatccatagaaaatatagtacaggtggcagcacggagaagacgtttgaaagataa

SEQ ID NO: 68018 - DNA, 4079 bp, Zea Mays
agggcgtccacagcatcaccatgcccccgcccgaccccgcgcatcccgcagcgctcagcttcccgaaaacctatcgcgtcgtagccgccatcaggcctccgcacaatcccctgcctgctcgccacgcagccttggcgccgtgaccgccgcctctgctccctaactccgccccgtgacgcccccagcccccaaaccacgcccgctccccacgcgatggccgctcatcccgtcgacgcgcccaccgcagttcacacccgcgccccggctcccccgcctcaccgcgcggctctgccagtgatcgtcgattcgcctcgccgcgctgtctgagagaaggaaagaggagctcaggacagcagcggctggcgcgaggtgcccggaggcagacgtgacgacgacgaggcctttgtagatctcagcaggcacggctcgcctccgcgtgggcaagctctgaggcggcgtcccttcccttctcgtcggcttccattctccaccgcgctcactccatttttcgtcgtgatcccttcctctccatgggcttccatgaaccctagagctcgcccgtccatggagtacgtgctcaccatcagcggatccccaggtcgtacctactaaacactagctcgtatggtcctgatcccccaggttctaccctaatccgcagcagccttcgcctcgggctcacctcccgctccatctcctctgtttcctcctcgcgctctgcagcggcgtctcgatccccgaggtcgtcgccttcttcaaccacattgccccttccgttgccaattagctccccgatttctactactcttgaccggcattaatttggcgctactatctaccttgatttactagcaagacattaacctttgtaatagttttggaactgggtaacgtgaatttgggtgtcaaaattcagattctgaagttgctcatttcctggaaacaatatttgttcgtttttatttttttaattatcacaaccactatgatctgctccctctgttacagagtttaagatgttttttccttaagtcaaactatgtattaccagaaaactaagcaaattggcaatcaaactaactaattagtgaggggtaagttagtctaattgtcagactccttatttggttctaaaattgcttagatgtcttgtatttcaggatggatggagtgtttttttgttgtagttatctattctatctgatgagcgtttctttctataatagagaccatgtttctttctataatagagaatatgatgagcgttttgactattggaacttcatatgctaccttttttagtgtcatttctatctttgcatattttcaaattacatgtcatcctacagtagtggatgcttcatcataactgatcagttaaattatctaaaacaagtagctaaatataattaatagtaaaaattacagatttaagggttataagtaacatgtatttggtgttagttttttacacatgtgaaagctatttgcttcagtacatagatctctgcagatgataaagtaatactaggcttgatagtattgtccatcatttgcttcagtatatagatctttgcttcagtacatatctctcacttcctatccaagtgtttgctcccagttctatagcactctgcagatgatttgcttcaatacttagtggctattttttctactacactggttaaagaaaaacagagaaaagaaaatctgcatgtgtattatagttaacctatcatatatatatgaaagtgtaagttgttgccttgaaaaacttgagatgcactcaaataacgcaagcagagagtatttactcaatctaaataatgaaataaatttacttagtttgatggttcacataacacaacaaccaaataaacaatttaaattagtcagttttttgtcattctaaataatgaaatagttattattaataccatgggatattcttattttgtgaaggcatctaccagaataggaaaaggttattattaataccaaggttgctagcttcgaaatacctgaagtgctactgctatcagttcttagactttggtttaaatcatctaaattttttctgttgttctgtcaggtctagacactctatgagttcgatgatctcgagagcatcattgataggacactaaagcgcgattttgacaccgaggaagcactctggttgcttaagataggtcttgtgtgcatcccggatagccctaagatcaagccctccatgtcaatggttgccaagatgctacaaggtgagtgtgctgtgagtgacaggatcatgaggcctggcctgatcacagacgtcatggacctgaaagtcaggatggtagagccgattcagttcaacttgacatcatgctcgagcactgccgcaccggaccttgtcaggtccatttggaggcccaggatgtcaaaatcaagaacatgagaagcactttgagcattttacacctaatatgagcaaagcacgaaatgaatctgcatttcctcaggatgaaattgactcacatagagagcatttttataatgaactaacctcagattcaattgcttcaaagaagccaaaaataaggaagagagaaaataacaattctgtttcaagttctgctcccaacattcctaatactcaaggtggtggaggatttctgtggaaaaccgaaattcctgaagatggaaattgcggtgactggttgtcaatcccacttggtgatgttaaggttctcgtgaatgaaattacatctgttcgatccaaaaggatattgcatgaggttcctatggatacagttacaaggttattggatgtgattgatcgtcagattcgatattctcaagtcagcatgaacaaggtcgaggcattgtacaggttgttcaagaagattggcaacaccttcattgatgatgggctgattaacaaggctctttcaaatggcaagcccactgttgttgagttttatgcaaactggtatgaagtctgcagggaactagctctagatatctacaaagctgaacaacaatacaagtctgcagggaactagactctgagaaccatgttgctgatgcggagagcattgtagccaagggcataagagatggtgcaattgatgccaccatagatcaagcaaatggctggatggtatggaaggaaactggtgatgtctactctacaaatgagccatagatcatacaaatgagcccttgatgccacccaggattggagcctgcgatttatgtgagttaacatatcgatcttgaattcacatcacgggaagacacgtggtatgggagttgggcgcaagctcaagagccaccgcaggaaccagaggtgggctgacaaagcatacaaaaagccacttgggcaatgagtggaaaaaaccttttgctggatcatctcacgctaagggcatcattctggagaaaattggtattgaggccaagcagccaaattcggccatccgtaagtgtgcccgtgttcagctggtgaaggatggaaagaagattgctgcctttgtgccgaatgatggttgcctaaactacatcgaggagaatgatgaggtgttgattgttggatttggtcgtaactcgtaagggtcatgctgtgggagacattcctggtgtcaggttcaaggttgttaaggtttctggtgtgtcgctacttgcactcttcaaggagaagaagccaaggtcttagatcactttcggtagtcaagaatggtgtaaactgcccaaggctctgttgtcaaagttaaagttttgctagcaacagagctgttaattctaagttgtacctttttgttaacattgacagttatgttacagtgtaaactgcccaaggctctgttgtcaaagttaaagttctgctagcaacagagctgttaattctgagctgtacctttttgttaacattgatagctctgttacacgacattattatttccttatgaaggtcagtttggaagaaacattctcctttattcacaaactatgttgattttctgaccaagtgtccttccatacagatccatagaaaatatagtacaggtggcagcacggagaagacgtttgaaagataa

SEQ ID NO: 68019 - DNA, 2629 bp, Zea Mays
cttaagggtggtgcgagggcgtccacagcatcaccatgcccccgcccgaccccgcgcatcccgcagcgctcagcttcccgaaaacctatcgcgtcgtagccgccatcaggcctccgcacaatcccctgcctgctcgccacgcagccttggcgccgtgaccgccgcctctgctccctaactccgccccgtgacgcccccagcccccaaaccacgcccgctccccacgcgatggccgctcatcccgtcgacgcgcccaccgcagttcacacccgcgccccggctcccccgcctcaccgcgcggctctgccaacactctatgagttcgatgatctcgagagcatcattgataggacactaaagcgcgattttgacaccgaggaagcactctggttgcttaagataggtcttgtgtgcatcccggatagccctaagatcaagccctccatgtcaatggttgccaagatgctacaaggtccatttggaggcccaggatgtcaaaatcaagaacatgagaagcactttgagcattttacacctaatatgagcaaagcacgaaatgaatctgcatttcctcaggatgaaattgactcacatagagagcatttttataatgaactaacctcagattcaattgcttcaaagaagccaaaaataaggaagagagaaaataacaattctgtttcaagttctgctcccaacattcctaatactcaaggtggtggaggatttctgtggaaaaccgaaattcctgaagatggaaattgcggtgactggttgtcaatcccacttggtgatgttaaggttctcgtgaatgaaattacatctgttcgatccaaaaggatattgcatgaggttcctatggatacagttacaaggttattggatgtgattgatcgtcagattcgatattctcaaggtttgtcgatagatgtgaaagaaaatgtgagttacttaccatgtcatagtagtttacatgattattcgtgttttgtagccaggattaacctcactacaatgctctagcagtctactactctacttgcctttcttcgattaattttcctaaagtgaaatcgtgtgatagttgttcgttcggttagcagaaaattataggagttacagctcagttggttgtagaagtccggtagccttgcacaatgtttagaagaagccataatattgagcagatgacggtcaaaaatagcactggattaagaagctgttttttggctcacactaataactttgtttgtgattttggtcatcattttcctgcctggttgggttgcatctgcttgtcattcttgcagtcagcatgaacaaggtcgaggcattgtacaggttgttcaagaagattggcaacaccttcattgatgatgggctgattaacaaggctctttcaaatggcaagcccactgttgttgagttttatgcaaactggtatgaagtctgcagggaactagctctagatatctacaaagctgaacaacaatacaagtctgcagggaactagactctgagaaccatgttgctgatgcggagagcattgtagccaagggcataagagatggtgcaattgatgccaccatagatcaagcaaatggctggatggtatggaaggaaactggtgatgtctactctacaaatgagccatagatcatacaaatgagcccttgatgccacccaggattgggtccgccccctatctttcagtattcattggtttctatgattctgctcccttgtgttgctactgtttgtataggttttgcagagcctgcgatttatgtgagttaacatatcgatcttgaattcacatcacgggaagacacgtggtatgggagttgggcgcaagctcaagagccaccgcaggaaccagaggtgggctgacaaagcatacaaaaagccacttgggcaatgagtggaaaaaaccttttgctggatcatctcacgctaagggcatcattctggagaaaattggtattgaggccaagcagccaaattcggccatccgtaagtgtgcccgtgttcagctggtgaaggatggaaagaagattgctgcctttgtgccgaatgatggttgcctaaactacatcgaggagaatgatgaggtgttgattgttggatttggtcgtaactcgtaagggtcatgctgtgggagacattcctggtgtcaggttcaaggttgttaaggtttctggtgtgtcgctacttgcactcttcaaggagaagaagccaaggtcttagatcactttcggtagtcaagaatggtgtaaactgcccaaggctctgttgtcaaagttaaagttttgctagcaacagagctgttaattctaagttgtacctttttgttaacattgacagttatgttacagtgtaaactgcccaaggctctgttgtcaaagttaaagttctgctagcaacagagctgttaattctgagctgtacctttttgttaacattgatagctctgttacacgacattattatttccttatgaaggtcagtttggaagaaacattctcctttattcacaaactatgttgattttctgaccaagtgtccttccatacagatccatagaaaatatagtacaggtggcagcacggagaagacgtttgaaagataa

SEQ ID NO: 68020 - DNA, 4017 bp, Zea Mays
cttccttatataacaaatgtgcacatatatctctactaatccttaagggtggtgcgagggcgtccacagcatcaccatgcccccgcccgaccccgcgcatcccgcagcgctcagcttcccgaaaacctatcgcgtcgtagccgccatcaggcctccgcacaatcccctgcctgctcgccacgcagccttggcgccgtgaccgccgcctctgctccctaactccgccccgtgacgcccccagcccccaaaccacgcccgctccccacgcgatggccgctcatcccgtcgacgcgcccaccgcagttcacacccgcgccccggctcccccgcctcaccgcgcggctctgccagtgatcgtcgattcgcctcgccgcgctgtctgagagaaggaaagaggagctcaggacagcagcggctggcgcgaggtgcccggaggcagacgtgacgacgacgaggcctttgtagatctcagcaggcacggctcgcctccgcgtgggcaagctctgaggcggcgtcccttcccttctcgtcggcttccattctccaccgcgctcactccatttttcgtcgtgatcccttcctctccatgggcttccatgaaccctagagctcgcccgtccatggagtacgtgctcaccatcagcggatccccaggtcgtacctactaaacactagctcgtatggtcctgatcccccaggttctaccctaatccgcagcagccttcgcctcgggctcacctcccgctccatctcctctgtttcctcctcgcgctctgcagcggcgtctcgatccccgaggtcgtcgccttcttcaaccacattgccccttccgttgccaattagctccccgatttctactactcttgaccggcattaatttggcgctactatctaccttgatttactagcaagacattaacctttgtaatagttttggaactgggtaacgtgaatttgggtgtcaaaattcagattctgaagttgctcatttcctggaaacaatatttgttcgtttttatttttttaattatcacaaccactatgatctgctccctctgttacagagtttaagatgttttttccttaagtcaaactatgtattaccagaaaactaagcaaattggcaatcaaactaactaattagtgaggggtaagttagtctaattgtcagactccttatttggttctaaaattgcttagatgtcttgtatttcaggatggatggagtgtttttttgttgtagttatctattctatctgatgagcgtttctttctataatagagaccatgtttctttctataatagagaatatgatgagcgttttgactattggaacttcatatgctaccttttttagtgtcatttctatctttgcatattttcaaattacatgtcatcctacagtagtggatgcttcatcataactgatcagttaaattatctaaaacaagtagctaaatataattaatagtaaaaattacagatttaagggttataagtaacatgtatttggtgttagttttttacacatgtgaaagctatttgcttcagtacatagatctctgcagatgataaagtaatactaggcttgatagtattgtccatcatttgcttcagtatatagatctttgcttcagtacatatctctcacttcctatccaagtgtttgctcccagttctatagcactctgcagatgatttgcttcaatacttagtggctattttttctactacactggttaaagaaaaacagagaaaagaaaatctgcatgtgtattatagttaacctatcatatatatatgaaagtgtaagttgttgccttgaaaaacttgagatgcactcaaataacgcaagcagagagtatttactcaatctaaataatgaaataaatttacttagtttgatggttcacataacacaacaaccaaataaacaatttaaattagtcagttttttgtcattctaaataatgaaatagttattattaataccatgggatattcttattttgtgaaggcatctaccagaataggaaaaggttattattaataccaaggttgctagcttcgaaatacctgaagtgctactgctatcagttcttagactttggtttaaatcatctaaattttttctgttgttctgtcaggtctagacactctatgagttcgatgatctcgagagcatcattgataggacactaaagcgcgattttgacaccgaggaagcactctggttgcttaagataggtcttgtgtgcatcccggatagccctaagatcaagccctccatgtcaatggttgccaagatgctacaaggtgagtgtgctgtgagtgacaggatcatgaggcctggcctgatcacagacgtcatggacctgaaagtcaggatggtagagccgattcagttcaacttgacatcatgctcgagcactgccgcaccggaccttgtcaggtccatttggaggcccaggatgtcaaaatcaagaacatgagaagcactttgagcattttacacctaatatgagcaaagcacgaaatgaatctgcatttcctcaggatgaaattgactcacatagagagcatttttatgtaagttagataccaccagtttcttatagatgccagttctttgtgctaaggcctaaggggctttctgttgtagaatgaactaacctcagattcaattgcttcaaagaagccaaaaataaggaagagagaaaataacaattctgtttcaagttctgctcccaacattcctaatactcaaggtggtggaggatttctgtggaaaaccgaaattcctgaagatggaaattgcggtgactggttgtcaatcccacttggtgatgttaaggttctcgtgaatgaaattacatctgttcgatccaaaaggatattgcatgaggttcctatggatacagttacaaggttattggatgtgattgatcgtcagattcgatattctcaagtcagcatgaacaaggtcgaggcattgtacaggttgttcaagaagattggcaacaccttcattgatgatgggctgattaacaaggctctttcaaatggcaagcccactgttgttgagttttatgcaaactggtatgaagtctgcagggaactagctctagatatctacaaagctgaacaacaatacaagtctgcagggaactagactctgagaaccatgttgctgatgcggagagcattgtagccaagggcataagagatggtgcaattgatgccaccatagatcaagcaaatggctggatggtatggaaggaaactggtgatgtctactctacaaatgagccatagatcatacaaatgagcccttgatgccacccaggattgggtccgccccctatctttcagtattcattggtttctatgattctgctcccttgtgttgctactgtttgtataagcctgcgatttatgtgagttaacatatcgatcttgaattcacatcacgggaagacacgtggtatgggagttgggcgcaagctcaagagccaccgcaggaaccagaggtgggctgacaaagcatacaaaaagccacttgggcaatgagtggaaaaaaccttttgctggatcatctcacgctaagggcatcattctggagaaaattggtattgaggccaagcagccaaattcggccatccgtaagtgtgcccgtgttcagctggtgaaggatggaaagaagattgctgcctttgtgccgaatgatggttgcctaaactacatcgaggagaatgatgaggtgttgattgttggatttggtcgtaactcgtaagggtcatgctgtgggagacattcctggtgtcaggttcaaggttgttaaggtttctggtgtgtcgctacttgcactcttcaaggagaagaagccaaggtcagtttggaagaaacattctcctttattcacaaactatgttgattttctgaccaagtgtccttccatacagatccatagaaaatatagtacaggtggcagcacggagaagacgtttgaaagataa

SEQ ID NO: 68021 - DNA, 3879 bp, Zea Mays
agcatcaccatgcccccgcccgaccccgcgcatcccgcagcgctcagcttcccgaaaacctatcgcgtcgtagccgccatcaggcctccgcacaatcccctgcctgctcgccacgcagccttggcgccgtgaccgccgcctctgctccctaactccgccccgtgacgcccccagcccccaaaccacgcccgctccccacgcgatggccgctcatcccgtcgacgcgcccaccgcagttcacacccgcgccccggctcccccgcctcaccgcgcggctctgccagtgatcgtcgattcgcctcgccgcgctgtctgagagaaggaaagaggagctcaggacagcagcggctggcgcgaggtgcccggaggcagacgtgacgacgacgaggcctttgtagatctcagcaggcacggctcgcctccgcgtgggcaagctctgaggcggcgtcccttcccttctcgtcggcttccattctccaccgcgctcactccatttttcgtcgtgatcccttcctctccatgggcttccatgaaccctagagctcgcccgtccatggagtacgtgctcaccatcagcggatccccaggtcgtacctactaaacactagctcgtatggtcctgatcccccaggttctaccctaatccgcagcagccttcgcctcgggctcacctcccgctccatctcctctgtttcctcctcgcgctctgcagcggcgtctcgatccccgaggtcgtcgccttcttcaaccacattgccccttccgttgccaattagctccccgatttctactactcttgaccggcattaatttggcgctactatctaccttgatttactagcaagacattaacctttgtaatagttttggaactgggtaacgtgaatttgggtgtcaaaattcagattctgaagttgctcatttcctggaaacaatatttgttcgtttttatttttttaattatcacaaccactatgatctgctccctctgttacagagtttaagatgttttttccttaagtcaaactatgtattaccagaaaactaagcaaattggcaatcaaactaactaattagtgaggggtaagttagtctaattgtcagactccttatttggttctaaaattgcttagatgtcttgtatttcaggatggatggagtgtttttttgttgtagttatctattctatctgatgagcgtttctttctataatagagaccatgtttctttctataatagagaatatgatgagcgttttgactattggaacttcatatgctaccttttttagtgtcatttctatctttgcatattttcaaattacatgtcatcctacagtagtggatgcttcatcataactgatcagttaaattatctaaaacaagtagctaaatataattaatagtaaaaattacagatttaagggttataagtaacatgtatttggtgttagttttttacacatgtgaaagctatttgcttcagtacatagatctctgcagatgataaagtaatactaggcttgatagtattgtccatcatttgcttcagtatatagatctttgcttcagtacatatctctcacttcctatccaagtgtttgctcccagttctatagcactctgcagatgatttgcttcaatacttagtggctattttttctactacactggttaaagaaaaacagagaaaagaaaatctgcatgtgtattatagttaacctatcatatatatatgaaagtgtaagttgttgccttgaaaaacttgagatgcactcaaataacgcaagcagagagtatttactcaatctaaataatgaaataaatttacttagtttgatggttcacataacacaacaaccaaataaacaatttaaattagtcagttttttgtcattctaaataatgaaatagttattattaataccatgggatattcttattttgtgaaggcatctaccagaataggaaaaggttattattaataccaaggttgctagcttcgaaatacctgaagtgctactgctatcagttcttagactttggtttaaatcatctaaattttttctgttgttctgtcaggtctagacactctatgagttcgatgatctcgagagcatcattgataggacactaaagcgcgattttgacaccgaggaagcactctggttgcttaagataggtcttgtgtgcatcccggatagccctaagatcaagccctccatgtcaatggttgccaagatgctacaaggtccatttggaggcccaggatgtcaaaatcaagaacatgagaagcactttgagcattttacacctaatatgagcaaagcacgaaatgaatctgcatttcctcaggatgaaattgactcacatagagagcatttttataatgaactaacctcagattcaattgcttcaaagaagccaaaaataaggaagagagaaaataacaattctgtttcaagttctgctcccaacattcctaatactcaaggtggtggaggatttctgtggaaaaccgaaattcctgaagatggaaattgcggtgactggttgtcaatcccacttggtgatgttaaggttctcgtgaatgaaattacatctgttcgatccaaaaggatattgcatgaggttcctatggatacagttacaaggttattggatgtgattgatcgtcagattcgatattctcaagtcagcatgaacaaggtcgaggcattgtacaggttgttcaagaagattggcaacaccttcattgatgatgggctgattaacaaggctctttcaaatggcaagcccactgttgttgagttttatgcaaactggtatgaagtctgcagggaactagctctagatatctacaaagctgaacaacaatacaagtctgcagggaactagactctgagaaccatgttgctgatgcggagagcattgtagccaagggcataagagatggtgcaattgatgccaccatagatcaagcaaatggctggatggtatggaaggaaactggtgatgtctactctacaaatgagccatagatcatacaaatgagcccttgatgccacccaggattgggtccgccccctatctttcagtattcattggtttctatgattctgctcccttgtgttgctactgtttgtataagcctgcgatttatgtgagttaacatatcgatcttgaattcacatcacgggaagacacgtggtatgggagttgggcgcaagctcaagagccaccgcaggaaccagaggtgggctgacaaagcatacaaaaagccacttgggcaatgagtggaaaaaaccttttgctggatcatctcacgctaagggcatcattctggagaaaattggtattgaggccaagcagccaaattcggccatccgtaagtgtgcccgtgttcagctggtgaaggatggaaagaagattgctgcctttgtgccgaatgatggttgcctaaactacatcgaggagaatgatgaggtgttgattgttggatttggtcgtaactcgtaagggtcatgctgtgggagacattcctggtgtcaggttcaaggttgttaaggtttctggtgtgtcgctacttgcactcttcaaggagaagaagccaaggtcttagatcactttcggtagtcaagaatggtgtaaactgcccaaggctctgttgtcaaagttaaagttttgctagcaacagagctgttaattctaagttgtacctttttgttaacattgacagttatgttacagtgtaaactgcccaaggctctgttgtcaaagttaaagttctgctagcaacagagctgttaattctgagctgtacctttttgttaacattgatagctctgttacacgacattattatttccttatgaaggtc

SEQ ID NO: 68022 - DNA, 3762 bp, Zea Mays
agcatcaccatgcccccgcccgaccccgcgcatcccgcagcgctcagcttcccgaaaacctatcgcgtcgtagccgccatcaggcctccgcacaatcccctgcctgctcgccacgcagccttggcgccgtgaccgccgcctctgctccctaactccgccccgtgacgcccccagcccccaaaccacgcccgctccccacgcgatggccgctcatcccgtcgacgcgcccaccgcagttcacacccgcgccccggctcccccgcctcaccgcgcggctctgccagtgatcgtcgattcgcctcgccgcgctgtctgagagaaggaaagaggagctcaggacagcagcggctggcgcgaggtgcccggaggcagacgtgacgacgacgaggcctttgtagatctcagcaggcacggctcgcctccgcgtgggcaagctctgaggcggcgtcccttcccttctcgtcggcttccattctccaccgcgctcactccatttttcgtcgtgatcccttcctctccatgggcttccatgaaccctagagctcgcccgtccatggagtacgtgctcaccatcagcggatccccaggtcgtacctactaaacactagctcgtatggtcctgatcccccaggttctaccctaatccgcagcagccttcgcctcgggctcacctcccgctccatctcctctgtttcctcctcgcgctctgcagcggcgtctcgatccccgaggtcgtcgccttcttcaaccacattgccccttccgttgccaattagctccccgatttctactactcttgaccggcattaatttggcgctactatctaccttgatttactagcaagacattaacctttgtaatagttttggaactgggtaacgtgaatttgggtgtcaaaattcagattctgaagttgctcatttcctggaaacaatatttgttcgtttttatttttttaattatcacaaccactatgatctgctccctctgttacagagtttaagatgttttttccttaagtcaaactatgtattaccagaaaactaagcaaattggcaatcaaactaactaattagtgaggggtaagttagtctaattgtcagactccttatttggttctaaaattgcttagatgtcttgtatttcaggatggatggagtgtttttttgttgtagttatctattctatctgatgagcgtttctttctataatagagaccatgtttctttctataatagagaatatgatgagcgttttgactattggaacttcatatgctaccttttttagtgtcatttctatctttgcatattttcaaattacatgtcatcctacagtagtggatgcttcatcataactgatcagttaaattatctaaaacaagtagctaaatataattaatagtaaaaattacagatttaagggttataagtaacatgtatttggtgttagttttttacacatgtgaaagctatttgcttcagtacatagatctctgcagatgataaagtaatactaggcttgatagtattgtccatcatttgcttcagtatatagatctttgcttcagtacatatctctcacttcctatccaagtgtttgctcccagttctatagcactctgcagatgatttgcttcaatacttagtggctattttttctactacactggttaaagaaaaacagagaaaagaaaatctgcatgtgtattatagttaacctatcatatatatatgaaagtgtaagttgttgccttgaaaaacttgagatgcactcaaataacgcaagcagagagtatttactcaatctaaataatgaaataaatttacttagtttgatggttcacataacacaacaaccaaataaacaatttaaattagtcagttttttgtcattctaaataatgaaatagttattattaataccatgggatattcttattttgtgaaggcatctaccagaataggaaaaggttattattaataccaaggttgctagcttcgaaatacctgaagtgctactgctatcagttcttagactttggtttaaatcatctaaattttttctgttgttctgtcaggtctagacactctatgagttcgatgatctcgagagcatcattgataggacactaaagcgcgattttgacaccgaggaagcactctggttgcttaagataggtcttgtgtgcatcccggatagccctaagatcaagccctccatgtcaatggttgccaagatgctacaaggtccatttggaggcccaggatgtcaaaatcaagaacatgagaagcactttgagcattttacacctaatatgagcaaagcacgaaatgaatctgcatttcctcaggatgaaattgactcacatagagagcatttttataatgaactaacctcagattcaattgcttcaaagaagccaaaaataaggaagagagaaaataacaattctgtttcaagttctgctcccaacattcctaatactcaaggtggtggaggatttctgtggaaaaccgaaattcctgaagatggaaattgcggtgactggttgtcaatcccacttggtgatgttaaggttctcgtgaatgaaattacatctgttcgatccaaaaggatattgcatgaggttcctatggatacagttacaaggttattggatgtgattgatcgtcagattcgatattctcaaggtttgtcgatagatgtgaaagaaaattcagcatgaacaaggtcgaggcattgtacaggttgttcaagaagattggcaacaccttcattgatgatgggctgattaacaaggctctttcaaatggcaagcccactgttgttgagttttatgcaaactggtatgaagtctgcagggaactagctctagatatctacaaagctgaacaacaatacaagtctgcagggaactagactctgagaaccatgttgctgatgcggagagcattgtagccaagggcataagagatggtgcaattgatgccaccatagatcaagcaaatggctggatgggttttgcagagcctgcgatttatgtgagttaacatatcgatcttgaattcacatcacgggaagacacgtggtatgggagttgggcgcaagctcaagagccaccgcaggaaccagaggtgggctgacaaagcatacaaaaagccacttgggcaatgagtggaaaaaaccttttgctggatcatctcacgctaagggcatcattctggagaaaattggtattgaggccaagcagccaaattcggccatccgtaagtgtgcccgtgttcagctggtgaaggatggaaagaagattgctgcctttgtgccgaatgatggttgcctaaactacatcgaggagaatgatgaggtgttgattgttggatttggtcgtaactcgtaagggtcatgctgtgggagacattcctggtgtcaggttcaaggttgttaaggtttctggtgtgtcgctacttgcactcttcaaggagaagaagccaaggtcttagatcactttcggtagtcaagaatggtgtaaactgcccaaggctctgttgtcaaagttaaagttttgctagcaacagagctgttaattctaagttgtacctttttgttaacattgacagttatgttacagtgtaaactgcccaaggctctgttgtcaaagttaaagttctgctagcaacagagctgttaattctgagctgtacctttttgttaacattgatagctctgttacacgacattattatttccttatgaaggtc

SEQ ID NO: 68023 - DNA, 1221 bp, Zea Mays
gggaacaataatttacctattactcgatcttgatttcagggaattggaacatggaagagcatacaaccaggctctgatgtcagatattttggagaaaagcgaggaactcgctacgctcacatattattctaacctgcttgagtcagagaagacatatctagaaaaccaagtcgaccatcttaacgaggagttgaagtgtactaggaaagagcatgcagcatatgtccgtaaggtcttggacgcagcaagagccatccctaacgacttggagccgatcaactcggcaactccgatgctctgccgagatcgcggtgcacgtcggggatctgttagccagccacaggctggccatggctaacggccagcccccacaggcagctgatccttaagagtttggacctaatcttatttctgatagccctttaggacttctttgactgaacctgtgggcggtgttgagcgacttcccagctcgctgtccaggtggtgataattggcgttttattttgtctagcttcaggtgatgttttggactgtttcttcctcaggttgcagcagtacagtatagtgtcgcttccttctgttcagttgtagcttgcttcttagaaggtggtcggttcgtccgttctgttgtgtactctgctccgttgggcgtatcaagataaatgtaaattccattctgcttgaacctgatgcaacacaaggtccgatgtggaatcaggattctcctttatgagacctgtgaagataaaaatatcttagttttggaagctcaaaagaaagactggcagctttgtttcataagatggttacatgaatagctgagaagtggaatgaggtcttagtaaaaaggagcttcaagatctcgtgcaggagggcgcaaagttgttgatgaaagctgcttgtgctaagctgggaaatggagatgaagaccgcgatgaagatgatgacgaggaaagggatcgtcagcatgaataaggaaaacatgtcttgcctgggtgtccctctgtcctgtatctcaagtggatttgcattttgtcaaaactagtgtgttagctcgtttgtgatttgtgattttaggtcattgctgatcttggttcttgtttgttcctgggtcctgaatcaggcctgcatgcctagctggaaaactgttgttagtccagtaggtctcgttttgcggtgatcatgttcatctgcatgtttctctgattcctgggttgc

SEQ ID NO: 68024 - DNA, 1538 bp, Zea Mays
  misc_feature (1537)..(1538): n is a, c, g, or t
ggccagcaaaccccctctgtaccctccgggcaatcgggcatgaatccacccatccgcgatgctacatggagctcagcaagcctcggcgtcgtcgaccgcaggcccgcgccccaagagcactgctatcctgcagtctgatcagccacctcgcgccgccgccgcgcgggaggggggccgcggcggcacgggtccggagtcgcttgtgcgcggctcggtcgtcgcgccgtgcgtcagctgcggcatctgcggcggactcctccgtgacgccaccgccttcaccgagtgcctacacgccttttgcaggaaatgcatatatgacaaggttgcgaaagacaacataaagtgttgcccgaagtgtggcatttttatgggaaatccgttggagaagctcaggtcttgtctgcttctctccccattctgcgtagttgtgcttaactagctggttgataggtggtggtagctacttagcgtttaatgggtttctgtagcagtcaaactaacttggcttaattacattttctctacctattaactttatctgaagtgctgtgtgtaaaatagataactaatcatgatatactgatgacaatattttgttttcatgagcccgtggcaatagccaacgatctacttgtccacttgaactatttttccaactagatgattaacatatagcactcagcttgaaattcctttcaacttttcatggtaagagcacaaccttacatgttgctcttaatatttgatagacctgatcatagcctggaacacatcaggccactgatatttcctgctaagaggcgcaaggttgtcaccatgaagaagaggaaggaaagggtgtcctctgaatcaacccttccttcagtggtgggtaccactgcagaagaaagcactgcactgatacctgctgcttcagaaagtaaggcacaaaaggatcttactcctgtcggaagagatgctttgtcacgaattaggggtcgagactttgactcagcatgtggtcttactgaggatactggagccttgattgtatggcaagcaccacctattctagaggagacggctgcccacaatcagttagactccaagcaggacccagatagtttcaggcctccggcgacctctgatattgagtaccagcgacaaggaccaactgcacaaatgaccaatatttcgtttatggttgggaactcatcccatgcaaggccgactgaccaggatgatgaaaacatgagaggagatattctcacattgatcaatgagagcaatgcaagaatcatggaaatgtatgatgcccacatcagcaaactgaaggcagggaacataaaactaatagagcaactggaaaatgaaagagcagctgcacttgagaggacaagaatccttgaagagaggctccagcaagagttggaaaacgaaaggacagttgctgctgagaggacaagacttcttgaaaagaagctccaaagagaactggaacatgaacgagaagctgctattgagagaacaagagttcttgacgagagactccaaagann

SEQ ID NO: 68025 - DNA, 1245 bp, Zea Mays
  misc_feature (1244)..(1245): n is a, c, g, or t
aactttaaatatacatatacagatatattgaaccggcgcttcgaaggggcgtctagcctcctaggccagcaaaccccctctgtaccctccgggcaatcgggcatgaatccacccatccgcgatgctacatggagctcagcaagcctcggcgtcgtcgaccgcaggcccgcgccccaagagcactgctatcctgcagtctgatcagccacctcgcgccgccgccgcgcgggaggggggccgcggcggcacgggtccggagtcgcttgtgcgcggctcggtcgtcgcgccgtgcgtcagctgcggcatctgcggcggactcctccgtgacgccaccgccttcaccgagtgcctacacgccttttgcaggaaatgcatatatgacaaggttgcgaaagacaacataaagtgttgcccgaagtgtggcatttttatgggaaatccgttggagaagctcagacctgatcatagcctggaacacatcaggccactgatatttcctgctaagaggcgcaaggttgtcaccatgaagaagaggaaggaaagggtgtcctctgaatcaacccttccttcagtggtgggtaccactgcagaagaaagcactgcactgatacctgctgcttcagaaagtaaggcacaaaaggatcttactcctgtcggaagagatgctttgtcacgaattaggggtcgagactttgactcagcatgtggtcttactgaggatactggagccttgattgtatggcaagcaccacctattctagaggagacggctgcccacaatcagttagactccaagcaggacccagatagtttcaggcctccggcgacctctgatattgagtaccagcgacaaggaccaactgcacaaatgaccaatatttcgtttatggttgggaactcatcccatgcaaggccgactgaccaggatgatgaaaacatgagaggagatattctcacattgatcaatgagagcaatgcaagaatcatggaaatgtatgatgcccacatcagcaaactgaaggcagggaacataaaactaatagagcaactggaaaatgaaagagcagctgcacttgagaggacaagaatccttgaagagaggctccagcaagagttggaaaacgaaaggacagttgctgctgagaggacaagacttcttgaaaagaagctccaaagagaactggaacatgaacgagaagctgctattgagagaacaagagttcttgacgagagactccaaagann

SEQ ID NO: 68026 - DNA, 1222 bp, Zea Mays
  misc_feature (1221)..(1222): n is a, c, g, or t
aactttaaatatacatatacagatatattgaaccggcgcttcgaaggggcgtctagcctcctaggccagcaaaccccctctgtaccctccgggcaatcgggcatgaatccacccatccgcgatgctacatggagctcagcaagcctcggcgtcgtcgaccgcaggcccgcgccccaagagcactgctatcctgcagtctgatcagccacctcgcgccgccgccgcgcgggaggggggccgcggcggcacgggtccggagtcgcttgtgcgcggctcggtcgtcgcgccgtgcgtcagctgcggcatctgcggcggactcctccgtgacgccaccgccttcaccgagtgcctacacgccttttgcaggaaatgcatatatgacaaggttgcgaaagacaacataaagtgttgcccgaagtgtggcatttttatgggaaatccgttggagaagctcagacctgatcatagcctggaacacatcaggccactgatatttcctgctaagaggcgcaaggttgtcaccatgaagaagaggaaggaaagggtgtcctctgaatcaacccttccttcagtggtgggtaccactgcagaagaaagcactgcactgatacctgctgcttcagaaagtaaggcacaaaaggatcttactcctgtcggaagagatgctttgtcacgaattaggggtcgagactttgactcagcatgtggtcttactgaggatactggagccttgattgtatggcaagcaccacctattctagaggagacggctgcccacaatcagttagactccaagcaggacccagatagtttcaggcctccggcgacctctgatattgagtaccagcgacaaggaccaactgcacaaatgaccaatatttcgtttatggttgggaactcatcccatgcaaggccgactgaccaggatgatgaaaacatgagaggagatattctcacattgatcaatgagagcaatgcaagaatcatggaaatgtatgatgcccacatcagcaaactgaaggcaactggaaaatgaaagagcagctgcacttgagaggacaagaatccttgaagagaggctccagcaagagttggaaaacgaaaggacagttgctgctgagaggacaagacttcttgaaaagaagctccaaagagaactggaacatgaacgagaagctgctattgagagaacaagagttcttgacgagagactccaaagann

SEQ ID NO: 68027 - DNA, 5493 bp, Zea Mays
tacagatccaggtgacatggtgaaaactccgagatctcctgttaccacaggttggtgatgtggccgtctcacatggaatttccctacattgcttgccttatcttgattagatctagcacttatggccattctaggtgcagcaggaggcaatgacaaagcttcaaagtgtggttgtgatattgacaatggtgaggctgggccatcattggtggtggtggagcaacaagcactagccactttgtagcaaacatgtggtcactagcatggtcatttgacttaatcattaactagacaatacactgacgaatgaaccagtgtaacatttaaatggaagtttattatcacacatgcagagtattgtgatgcaaatacatgtatgtttcttgcaacaaccacaaggaacaagaagatgcagagcaaagccacaaaagaaggaagaggaatccacagaaaacaacaagctggagaatggatctctggatgcaacagaagaggtgcatcatggagtcgaaaaaggtgatggacatgttacccgcaagagaccaaggagatcagcggcctgttctgatttcaaagagaaatccatacgcttatccgaaaaaaaatctgttgtcatggtcaagaagaatcggatggaggaggaagaagtagatgctgtcaatctgacaaaacttggaccagaagatccaccaccttgccggaagttgatcgattttatcttgcatgatgcagaagggaacccacaaccctttgaaatgtcagaaattgatgacttctttataacagctcttatcatgcccatggatgatgatctagaaaaagagcgtgaaagaggagtacgctgtgaaggatttgggcgaattgaggactggaatatttctggttatgatgaaggtactcctgtaatctgggtgtcaactgatgttgctgactatgaatgtgtgaaaccatcaaccaattacaaatcttattttgaccacttctatgagaaggctcaggtgtgtgttgaagttttcaaaaagcttgcaaaatcagttggtgggaatcctaaccagggcctggatgaattgcttgctagtgttgttcggtcaaccaatgccatgaaaggatatagtggaaccatgagcaaagatttggtgatatccattggagaatttgtatacaatcaacttgttggtttggatgagacatcaaacaatgatgatgaaaagtttgctaccctgccagttcttctttctctaagagaccagtgcagatctagggtggaactgaccaagttgccctctaacttctcgaacacaagtctgaaaattaaggactcagagtgtgatgagacagcagaagacgatgatgatgcaaaattagctagattacttcaacaagaagaagaatggaaaatgatgaagaaacagaggggtaggcgtggaacaccatcccagaaaaatgtctacataaaaatcagtgaagctgagattgccaatgactatccccttcctgcatactataagccatttagccaggaaatggatgaatacatatttgatagtgatgacagcatattttctgatgatgtgccagttaggatactcaataactggacactgtacaatgcagattccaggcttatatctttggaattgatccctatgaaatcaggggcagaaaatgatgtggttatctttggatctggtttcatgagagatgatgatggcagttgctgttctacagctgagtctgtgaaatcttcgtcttcctccagcaaagctgaccaactggatgcaggaatccctatttatttgagcccaatcaaagaatggattatagagtttggtggctcaatgatttgtataaccattcggactgatgtggcctggtacaagctacgccaaccaacaaaacaatatgctccatggtgtgagcctgtactgaaaacagcaaggcttgctgttagcatcattaccctgttgaaagagcagagtcgtgcctcaaagctttcttttgctgatgtcataagaaaagtagctgaatttgacaaaggaaaccctgcatttatatcttcaaacatcacacttgttgagagatatattgtggtgcatggacagataatactccagcagtttgcagattttccagatgagactatccgtcggagtgcatttgtcagtggtcttttattgaagatggaacagaggaggcatacaaagttagttatgaagaaaaaaactcaagtgatgaggggagagaatctgaatccaagtgcagcaatgggtccagcatcgaggaaaaaagcaatgcgtgcaacaacaaccaggctcatcaacagaatctggagtgattactatgcacatcatttccctgaagattccaaggagggagatggaaatgaaacaaaagaaattgatgatgaacaagaagaaaatgaagatgaggatgctgaagatgaagggcagattgaagagaacatctcaaagactcctccatcaacacggtcccggaagttgctatcacaaacttgtaaggaaatcagatgggaaggtgaaacatctgggaaaacattgtctggagaaactctatataaatgtgcttatgttagggaactcagaatacctgttggtggaacagtggctctagaagatgattcaggagacacagtcatttgttttgttgagtacatgttccagaaagttgatggttcaaaaatggttcatgggaggattctgcaaaaaggttcacagacaattcttggcaatgcggcaaatgagagggaggttttcttaactaatgactgcttagaattcaaattagatgacatcaaggaattggtaatggttgatatccaatcaaggccttggggtcacaagtacagaaaagagaattctgaagctgataaagttgagcaggtcaaagcagaagagagaaagaaaaagggccagcccatggtatatttctgcaaaagcttgtactggcctgagaagggtgccttctttgccctctcccgagataaaatgggtcttggtagtggtttatgtagttcttgtgataatatagagccagattctgatgaattgaaaatattctcgaagaccagctttgtctacagaaaggttacatataatgtcaatgagtttttatacataagacctgatttttttgctgaagatgaggatcgtgcaaccttcaaggctggccgaaatgtgggtctaaagccctatgcagtttgtcaaatattgtccatccctgaaggggctggatctaaaaaactcaatccagcatcagcaaatatcagtgctagaagattttacagaccagatgacatttcatcagccaaagcctatgcatctgacatcagagaggtctactatagtgaggatgtaattgatgtgcctgtggatatgatagagggaaaatgtgaggttagaaagaagaacgatcttgcaagttcagaccttccagtgatgtttgaacatgtatttttctgtgaacttatatatgaccgtgccagtggagctctcaagcagttgcctccaaatgttaggtttatgtctatggtgcaaaggacaagtgcgttgaaaaagaacaaaggaaagcagatctgtgagcctgatcaaatagattcaggtaaatggttggatgtgcctaaagagaaccgtctagctactcttgacatttttgctggctgtggaggtttatcagaagggctgcagcaagctggtgtatcttttacaaaatgggcgattgaatacgaagagcctgctggtgaagcatttaataaaaatcatccagaggctgtggtctttgtagataactgcaatgtgattctaaaggcaattatggataaatgtggggatactgatgattgtgtttcaacttctgaagctgctgaacaagcagcaaaacttccagaagtgaacattaataatcttccagtccctggcgaagttgaattcataaatggtggtcctccgtgtcagggattctctgggatgaatagattcaaccaaagcccatggagtaaagttcagtgtgagatgattctagcattcctctcattcgctgagtatttccgtcccagattctttctgttagaaaatgttcggaactttgtttccttcaacaaagggcagaccttccgtttggcagttgcatctcttctggagatgggataccaggtccggtttggaattctagaagcaggggcttttggtgttgcccagtccaggaaaagggcgtttatttgggctgctgcacctggagagatgcttcctgattggccagagccgatgcatgtgtttgctagccctgagctgaagataacactgcctgatggccaatactatgcagctgcaagaagcactgctggtggagcgcctttccgagcgattactgttagagatacaattggggatctgcctaaagtgggaaatggtgccagcaaactcacgcttgagtatggaggtgagcccgtgtcttggttccagaagaagataagagggaatatgatggtactgaatgatcacatatctaaggagatgaatgagctgaacctaataaggtgccaacacattccgaaacggccgggttgtgattggcatgacctaccggacgagaaggttaagctgtcaaatgggcagatggctgacctgataccttggtgcctgcccaacacagccaagaggcacaatcagtggaaaggactgtacgggaggctggactgggaaggcaacttccccacatccgtcactgatccccagccaatgggcaaggtcggcatgtgcttccaccctgatcaagacaggatcatcacagtccgggaatgtgctcggtcacagggctttcctgacagctatgaatttgcgggcaacatccagaacaagcaccggcagattggcaatgccgtgcccccgcctcttgcctatgcacttgggaggaagctgaaggaagccgttgacaagcgtcaggaagccagcgcaggcgtgcctgcaccatgagaagttttccttccatcaaaccatgacccatgaagctaagcgctgaggtcgtccttgaggaccagttaattttggttttatcagtcttaatgcactcctgaatgtatatgttagagaagtgtcgattgctgattgttaccctgattcagggtagcggttatatctaaaaacttgagaaaatctagtgtactctagttgtcatgtgttccattttgttggctctaaactttcaactagttttggtgattaatgacaacatgagattaaattaaattttgtagaggcatttaaattaggccactaatagtgactatttagtcgctcaatttttttgcccctaattatggaatttgttttttaaaggatgaacaacaagattaaatggattagttcaagtgtcgattggggctaagactatccgtagcggttttttctaactttttctctatgtgccacctttatatcatgtcatactagcaattctaattaattgattaagggtatc

SEQ ID NO: 68028 - DNA, 5372 bp, Zea Mays
cagagatccaggcagcggacgagccctctccgtccccagccattagcgaccagctggtgccggtcatccctgctgcgacgagctggtgccgtgaagccgccctccaggcctacagatccaggtgtccctttgttcagttgttggtcgtgtgtgctgcccgtatccctacaaccatgctggtgcctggtgctgctgccttgagctgaccatgcaaaacaaccgtgctggtgcttctgctggtgacatggtgaaaactccgagatctcctgttaccacaggaacaagaagatgcagagcaaagccacaaaagaaggaagaggaatccacagaaaacaacaagctggagaatggatctctggatgcaacagaagaggtgcatcatggagtcgaaaaaggtgatggacatgttacccgcaagagaccaaggagatcagcggcctgttctgatttcaaagagaaatccatacgcttatccgaaaaaaaatctgttgtcatggtcaagaagaatcggatggaggaggaagaagtagatgctgtcaatctgacaaaacttggaccagaagatccaccaccttgccggaagttgatcgattttatcttgcatgatgcagaagggaacccacaaccctttgaaatgtcagaaattgatgacttctttataacagctcttatcatgcccatggatgatgatctagaaaaagagcgtgaaagaggagtacgctgtgaaggatttgggcgaattgaggactggaatatttctggttatgatgaaggtactcctgtaatctgggtgtcaactgatgttgctgactatgaatgtgtgaaaccatcaaccaattacaaatcttattttgaccacttctatgagaaggctcaggtgtgtgttgaagttttcaaaaagcttgcaaaatcagttggtgggaatcctaaccagggcctggatgaattgcttgctagtgttgttcggtcaaccaatgccatgaaaggatatagtggaaccatgagcaaagatttggtgatatccattggagaatttgtatacaatcaacttgttggtttggatgagacatcaaacaatgatgatgaaaagtttgctaccctgccagttcttctttctctaagagaccagtgcagatctagggtggaactgaccaagttgccctctaacttctcgaacacaagtctgaaaattaaggactcagagtgtgatgagacagcagaagacgatgatgatgcaaaattagctagattacttcaacaagaagaagaatggaaaatgatgaagaaacagaggggtaggcgtggaacaccatcccagaaaaatgtctacataaaaatcagtgaagctgagattgccaatgactatccccttcctgcatactataagccatttagccaggaaatggatgaatacatatttgatagtgatgacagcatattttctgatgatgtgccagttaggatactcaataactggacactgtacaatgcagattccaggcttatatctttggaattgatccctatgaaatcaggggcagaaaatgatgtggttatctttggatctggtttcatgagagatgatgatggcagttgctgttctacagctgagtctgtgaaatcttcgtcttcctccagcaaagctgaccaactggatgcaggaatccctatttatttgagcccaatcaaagaatggattatagagtttggtggctcaatgatttgtataaccattcggactgatgtggcctggtacaagctacgccaaccaacaaaacaatatgctccatggtgtgagcctgtactgaaaacagcaaggcttgctgttagcatcattaccctgttgaaagagcagagtcgtgcctcaaagctttcttttgctgatgtcataagaaaagtagctgaatttgacaaaggaaaccctgcatttatatcttcaaacatcacacttgttgagagatatattgtggtgcatggacagataatactccagcagtttgcagattttccagatgagactatccgtcggagtgcatttgtcagtggtcttttattgaagatggaacagaggaggcatacaaagttagttatgaagaaaaaaactcaagtgatgaggggagagaatctgaatccaagtgcagcaatgggtccagcatcgaggaaaaaagcaatgcgtgcaacaacaaccaggctcatcaacagaatctggagtgattactatgcacatcatttccctgaagattccaaggagggagatggaaatgaaacaaaagaaattgatgatgaacaagaagaaaatgaagatgaggatgctgaagatgaagggcagattgaagagaacatctcaaagactcctccatcaacacggtcccggaagttgctatcacaaacttgtaaggaaatcagatgggaaggtgaaacatctgggaaaacattgtctggagaaactctatataaatgtgcttatgttagggaactcagaatacctgttggtggaacagtggctctagaagatgattcaggagacacagtcatttgttttgttgagtacatgttccagaaagttgatggttcaaaaatggttcatgggaggattctgcaaaaaggttcacagacaattcttggcaatgcggcaaatgagagggaggttttcttaactaatgactgcttagaattcaaattagatgacatcaaggaattggtaatggttgatatccaatcaaggccttggggtcacaagtacagaaaagagaattctgaagctgataaagttgagcaggtcaaagcagaagagagaaagaaaaagggccagcccatggtatatttctgcaaaagcttgtactggcctgagaagggtgccttctttgccctctcccgagataaaatgggtcttggtagtggtttatgtagttcttgtgataatatagagccagattctgatgaattgaaaatattctcgaagaccagctttgtctacagaaaggttacatataatgtcaatgagtttttatacataagacctgatttttttgctgaagatgaggatcgtgcaaccttcaaggctggccgaaatgtgggtctaaagccctatgcagtttgtcaaatattgtccatccctgaaggggctggatctaaaaaactcaatccagcatcagcaaatatcagtgctagaagattttacagaccagatgacatttcatcagccaaagcctatgcatctgacatcagagaggtctactatagtgaggatgtaattgatgtgcctgtggatatgatagagggaaaatgtgaggttagaaagaagaacgatcttgcaagttcagaccttccagtgatgtttgaacatgtatttttctgtgaacttatatatgaccgtgccagtggagctctcaagcagttgcctccaaatgttaggtttatgtctatggtgcaaaggacaagtgcgttgaaaaagaacaaaggaaagcagatctgtgagcctgatcaaatagattcaggtaaatggttggatgtgcctaaagagaaccgtctagctactcttgacatttttgctggctgtggaggtttatcagaagggctgcagcaagctggtgtatcttttacaaaatgggcgattgaatacgaagagcctgctggtgaagcatttaataaaaatcatccagaggctgtggtctttgtagataactgcaatgtgattctaaaggcaattatggataaatgtggggatactgatgattgtgtttcaacttctgaagctgctgaacaagcagcaaaacttccagaagtgaacattaataatcttccagtccctggcgaagttgaattcataaatggtggtcctccgtgtcagggattctctgggatgaatagattcaaccaaagcccatggagtaaagttcagtgtgagatgattctagcattcctctcattcgctgagtatttccgtcccagattctttctgttagaaaatgttcggaactttgtttccttcaacaaagggcagaccttccgtttggcagttgcatctcttctggagatgggataccaggtccggtttggaattctagaagcaggggcttttggtgttgcccagtccaggaaaagggcgtttatttgggctgctgcacctggagagatgcttcctgattggccagagccgatgcatgtgtttgctagccctgagctgaagataacactgcctgatggccaatactatgcagctgcaagaagcactgctggtggagcgcctttccgagcgattactgttagagatacaattggggatctgcctaaagtgggaaatggtgccagcaaactcacgcttgagtatggaggtgagcccgtgtcttggttccagaagaagataagagggaatatgatggtactgaatgatcacatatctaaggagatgaatgagctgaacctaataaggtgccaacacattccgaaacggccgggttgtgattggcatgacctaccggacgagaaggttaagctgtcaaatgggcagatggctgacctgataccttggtgcctgcccaacacagccaagaggcacaatcagtggaaaggactgtacgggaggctggactgggaaggcaacttccccacatccgtcactgatccccagccaatgggcaaggtcggcatgtgcttccaccctgatcaagacaggatcatcacagtccgggaatgtgctcggtcacagggctttcctgacagctatgaatttgcgggcaacatccagaacaagcaccggcagattggcaatgccgtgcccccgcctcttgcctatgcacttgggaggaagctgaaggaagccgttgacaagcgtcaggaagccagcgcaggcgtgcctgcaccatgagaagttttccttccatcaaaccatgacccatgaagctaagcgctgaggtcgtccttgaggaccagttaattttggttttatcagtcttaatgcactcctgaatgtatatgttagagaagtgtcgattgctgattgttaccctgattcagggtagcggttatatctaaaaacttgagaaaatctagtgtactctagttgtcatgtgttccattttgttggctctaaactttcaactagttttggtgattaatgacaacatgagattaaattaaattttgtagaggcatttaaattaggccactaatagtgactatttagtcgctcaatttttttgcccctaattatggaatttgttttttaaaggatgaacaacaagattaaatggattagttcaagtgtcgattggggctaagactatccgtagcggttttttctaactttttctctatgtgccacctttatatcatgtcatactagcaattctaattaattgattaagggtatc

SEQ ID NO: 68029 - DNA, 5546 bp, Zea Mays
gtccctggctccctgcgcgtgcgagaccagagatccaggcagcggacgagccctctccgtccccagccattagcgaccagctggtgccggtcatccctgctgcgacgagctggtgccgtgaagccgccctccaggcctacagatccaggtgacatggtgaaaactccgagatctcctgttaccacaggtgcagcaggaggcaatgacaaagcttcaaagtgtggttgtgatattgacaatggtgaggctgggccatcattggtggtggtggagcaacaagcactagccactttgtagcaaacatgtggtcactagcatggtcatttgacttaatcattaactagacaatacactgacgaatgaaccagtgtaacatttaaatggaagtttattatcacacatgcagagtattgtgatgcaaatacatgtatgtttcttgcaacaaccacaaggaacaagaagatgcagagcaaagccacaaaagaaggaagaggaatccacagaaaacaacaagctggagaatggatctctggatgcaacagaagaggtgcatcatggagtcgaaaaaggtgatggacatgttacccgcaagagaccaaggagatcagcggcctgttctgatttcaaagagaaatccatacgcttatccgaaaaaaaatctgttgtcatggtcaagaagaatcggatggaggaggaagaagtagatgctgtcaatctgacaaaacttggaccagaagatccaccaccttgccggaagttgatcgattttatcttgcatgatgcagaagggaacccacaaccctttgaaatgtcagaaattgatgacttctttataacagctcttatcatgcccatggatgatgatctagaaaaagagcgtgaaagaggagtacgctgtgaaggatttgggcgaattgaggactggaatatttctggttatgatgaaggtactcctgtaatctgggtgtcaactgatgttgctgactatgaatgtgtgaaaccatcaaccaattacaaatcttattttgaccacttctatgagaaggctcaggtgtgtgttgaagttttcaaaaagcttgcaaaatcagttggtgggaatcctaaccagggcctggatgaattgcttgctagtgttgttcggtcaaccaatgccatgaaaggatatagtggaaccatgagcaaagatttggtgatatccattggagaatttgtatacaatcaacttgttggtttggatgagacatcaaacaatgatgatgaaaagtttgctaccctgccagttcttctttctctaagagaccagtgcagatctagggtggaactgaccaagttgccctctaacttctcgaacacaagtctgaaaattaaggactcagagtgtgatgagacagcagaagacgatgatgatgcaaaattagctagattacttcaacaagaagaagaatggaaaatgatgaagaaacagaggggtaggcgtggaacaccatcccagaaaaatgtctacataaaaatcagtgaagctgagattgccaatgactatccccttcctgcatactataagccatttagccaggaaatggatgaatacatatttgatagtgatgacagcatattttctgatgatgtgccagttaggatactcaataactggacactgtacaatgcagattccaggcttatatctttggaattgatccctatgaaatcaggggcagaaaatgatgtggttatctttggatctggtttcatgagagatgatgatggcagttgctgttctacagctgagtctgtgaaatcttcgtcttcctccagcaaagctgaccaactggatgcaggaatccctatttatttgagcccaatcaaagaatggattatagagtttggtggctcaatgatttgtataaccattcggactgatgtggcctggtacaagctacgccaaccaacaaaacaatatgctccatggtgtgagcctgtactgaaaacagcaaggcttgctgttagcatcattaccctgttgaaagagcagagtcgtgcctcaaagctttcttttgctgatgtcataagaaaagtagctgaatttgacaaaggaaaccctgcatttatatcttcaaacatcacacttgttgagagatatattgtggtgcatggacagataatactccagcagtttgcagattttccagatgagactatccgtcggagtgcatttgtcagtggtcttttattgaagatggaacagaggaggcatacaaagttagttatgaagaaaaaaactcaagtgatgaggggagagaatctgaatccaagtgcagcaatgggtccagcatcgaggaaaaaagcaatgcgtgcaacaacaaccaggctcatcaacagaatctggagtgattactatgcacatcatttccctgaagattccaaggagggagatggaaatgaaacaaaagaaattgatgatgaacaagaagaaaatgaagatgaggatgctgaagatgaagggcagattgaagagaacatctcaaagactcctccatcaacacggtcccggaagttgctatcacaaacttgtaaggaaatcagatgggaaggtgaaacatctgggaaaacattgtctggagaaactctatataaatgtgcttatgttagggaactcagaatacctgttggtggaacagtggctctagaagatgattcaggagacacagtcatttgttttgttgagtacatgttccagaaagttgatggttcaaaaatggttcatgggaggattctgcaaaaaggttcacagacaattcttggcaatgcggcaaatgagagggaggttttcttaactaatgactgcttagaattcaaattagatgacatcaaggaattggtaatggttgatatccaatcaaggccttggggtcacaagtacagaaaagagaattctgaagctgataaagttgagcaggtcaaagcagaagagagaaagaaaaagggccagcccatggtatatttctgcaaaagcttgtactggcctgagaagggtgccttctttgccctctcccgagataaaatgggtcttggtagtggtttatgtagttcttgtgataatatagagccagattctgatgaattgaaaatattctcgaagaccagctttgtctacagaaaggttacatataatgtcaatgagtttttatacataagacctgatttttttgctgaagatgaggatcgtgcaaccttcaaggctggccgaaatgtgggtctaaagccctatgcagtttgtcaaatattgtccatccctgaaggggctggatctaaaaaactcaatccagcatcagcaaatatcagtgctagaagattttacagaccagatgacatttcatcagccaaagcctatgcatctgacatcagagaggtctactatagtgaggatgtaattgatgtgcctgtggatatgatagagggaaaatgtgaggttagaaagaagaacgatcttgcaagttcagaccttccagtgatgtttgaacatgtatttttctgtgaacttatatatgaccgtgccagtggagctctcaagcagttgcctccaaatgttaggtttatgtctatggtgcaaaggacaagtgcgttgaaaaagaacaaaggaaagcagatctgtgagcctgatcaaatagattcaggtaaatggttggatgtgcctaaagagaaccgtctagctactcttgacatttttgctggctgtggaggtttatcagaagggctgcagcaagctggtgtatcttttacaaaatgggcgattgaatacgaagagcctgctggtgaagcatttaataaaaatcatccagaggctgtggtctttgtagataactgcaatgtgattctaaaggcaattatggataaatgtggggatactgatgattgtgtttcaacttctgaagctgctgaacaagcagcaaaacttccagaagtgaacattaataatcttccagtccctggcgaagttgaattcataaatggtggtcctccgtgtcagggattctctgggatgaatagattcaaccaaagcccatggagtaaagttcagtgtgagatgattctagcattcctctcattcgctgagtatttccgtcccagattctttctgttagaaaatgttcggaactttgtttccttcaacaaagggcagaccttccgtttggcagttgcatctcttctggagatgggataccaggtccggtttggaattctagaagcaggggcttttggtgttgcccagtccaggaaaagggcgtttatttgggctgctgcacctggagagatgcttcctgattggccagagccgatgcatgtgtttgctagccctgagctgaagataacactgcctgatggccaatactatgcagctgcaagaagcactgctggtggagcgcctttccgagcgattactgttagagatacaattggggatctgcctaaagtgggaaatggtgccagcaaactcacgcttgagtatggaggtgagcccgtgtcttggttccagaagaagataagagggaatatgatggtactgaatgatcacatatctaaggagatgaatgagctgaacctaataaggtgccaacacattccgaaacggccgggttgtgattggcatgacctaccggacgagaaggttaagctgtcaaatgggcagatggctgacctgataccttggtgcctgcccaacacagccaagaggcacaatcagtggaaaggactgtacgggaggctggactgggaaggcaacttccccacatccgtcactgatccccagccaatgggcaaggtcggcatgtgcttccaccctgatcaagacaggatcatcacagtccgggaatgtgctcggtcacagggctttcctgacagctatgaatttgcgggcaacatccagaacaagcaccggcagattggcaatgccgtgcccccgcctcttgcctatgcacttgggaggaagctgaaggaagccgttgacaagcgtcaggaagccagcgcaggcgtgcctgcaccatgagaagttttccttccatcaaaccatgacccatgaagctaagcgctgaggtcgtccttgaggaccagttaattttggttttatcagtcttaatgcactcctgaatgtatatgttagagaagtgtcgattgctgattgttaccctgattcagggtagcggttatatctaaaaacttgagaaaatctagtgtactctagttgtcatgtgttccattttgttggctctaaactttcaactagttttggtgattaatgacaacatgagattaaattaaattttgtagaggcatttaaattaggccactaatagtgactatttagtcgctcaatttttttgcccctaattatggaatttgttttttaaaggatgaacaacaagattaaatggattagttcaagtgtcgattggggctaagactatccgtagcggttttttctaactttttctctatgtgccacctttatatcatgtcatactagcaattctaattaattgattaagggtatc

SEQ ID NO: 68030 - DNA, 5428 bp, Zea Mays
ccactcccccaggcgttcaagcacggcgcccatgccctagcccctagacccctattcgcaggtcgcagcagccgccaacacccagatcccataccacgccgccaccgcgccaccggagtccggcggccagcccccgcccaccggcgagtccctggctccctgcgcgtgcgagaccagagatccaggcagcggacgagccctctccgtccccagccattagcgaccagctggtgccggtcatccctgctgcgacgagctggtgccgtgaagccgccctccaggcctacagatccaggtgacatggtgaaaactccgagatctcctgttaccacaggaacaagaagatgcagagcaaagccacaaaagaaggaagaggaatccacagaaaacaacaagctggagaatggatctctggatgcaacagaagaggtgcatcatggagtcgaaaaaggtgatggacatgttacccgcaagagaccaaggagatcagcggcctgttctgatttcaaagagaaatccatacgcttatccgaaaaaaaatctgttgtcatggtcaagaagaatcggatggaggaggaagaagtagatgctgtcaatctgacaaaacttggaccagaagatccaccaccttgccggaagttgatcgattttatcttgcatgatgcagaagggaacccacaaccctttgaaatgtcagaaattgatgacttctttataacagctcttatcatgcccatggatgatgatctagaaaaagagcgtgaaagaggagtacgctgtgaaggatttgggcgaattgaggactggaatatttctggttatgatgaaggtactcctgtaatctgggtgtcaactgatgttgctgactatgaatgtgtgaaaccatcaaccaattacaaatcttattttgaccacttctatgagaaggctcaggtgtgtgttgaagttttcaaaaagcttgcaaaatcagttggtgggaatcctaaccagggcctggatgaattgcttgctagtgttgttcggtcaaccaatgccatgaaaggatatagtggaaccatgagcaaagatttggtgatatccattggagaatttgtatacaatcaacttgttggtttggatgagacatcaaacaatgatgatgaaaagtttgctaccctgccagttcttctttctctaagagaccagtgcagatctagggtggaactgaccaagttgccctctaacttctcgaacacaagtctgaaaattaaggactcagagtgtgatgagacagcagaagacgatgatgatgcaaaattagctagattacttcaacaagaagaagaatggaaaatgatgaagaaacagaggggtaggcgtggaacaccatcccagaaaaatgtctacataaaaatcagtgaagctgagattgccaatgactatccccttcctgcatactataagccatttagccaggaaatggatgaatacatatttgatagtgatgacagcatattttctgatgatgtgccagttaggatactcaataactggacactgtacaatgcagattccaggcttatatctttggaattgatccctatgaaatcaggggcagaaaatgatgtggttatctttggatctggtttcatgagagatgatgatggcagttgctgttctacagctgagtctgtgaaatcttcgtcttcctccagcaaagctgaccaactggatgcaggaatccctatttatttgagcccaatcaaagaatggattatagagtttggtggctcaatgatttgtataaccattcggactgatgtggcctggtacaagctacgccaaccaacaaaacaatatgctccatggtgtgagcctgtactgaaaacagcaaggcttgctgttagcatcattaccctgttgaaagagcagagtcgtgcctcaaagctttcttttgctgatgtcataagaaaagtagctgaatttgacaaaggaaaccctgcatttatatcttcaaacatcacacttgttgagagatatattgtggtgcatggacagataatactccagcagtttgcagattttccagatgagactatccgtcggagtgcatttgtcagtggtcttttattgaagatggaacagaggaggcatacaaagttagttatgaagaaaaaaactcaagtgatgaggggagagaatctgaatccaagtgcagcaatgggtccagcatcgaggaaaaaagcaatgcgtgcaacaacaaccaggctcatcaacagaatctggagtgattactatgcacatcatttccctgaagattccaaggagggagatggaaatgaaacaaaagaaattgatgatgaacaagaagaaaatgaagatgaggatgctgaagatgaagggcagattgaagagaacatctcaaagactcctccatcaacacggtcccggaagttgctatcacaaacttgtaaggaaatcagatgggaaggtgaaacatctgggaaaacattgtctggagaaactctatataaatgtgcttatgttagggaactcagaatacctgttggtggaacagtggctctagaagatgattcaggagacacagtcatttgttttgttgagtacatgttccagaaagttgatggttcaaaaatggttcatgggaggattctgcaaaaaggttcacagacaattcttggcaatgcggcaaatgagagggaggttttcttaactaatgactgcttagaattcaaattagatgacatcaaggaattggtaatggttgatatccaatcaaggccttggggtcacaagtacagaaaagagaattctgaagctgataaagttgagcaggtcaaagcagaagagagaaagaaaaagggccagcccatggtatatttctgcaaaagcttgtactggcctgagaagggtgccttctttgccctctcccgagataaaatgggtcttggtagtggtttatgtagttcttgtgataatatagagccagattctgatgaattgaaaatattctcgaagaccagctttgtctacagaaaggttacatataatgtcaatgagtttttatacataagacctgatttttttgctgaagatgaggatcgtgcaaccttcaaggctggccgaaatgtgggtctaaagccctatgcagtttgtcaaatattgtccatccctgaaggggctggatctaaaaaactcaatccagcatcagcaaatatcagtgctagaagattttacagaccagatgacatttcatcagccaaagcctatgcatctgacatcagagaggtctactatagtgaggatgtaattgatgtgcctgtggatatgatagagggaaaatgtgaggttagaaagaagaacgatcttgcaagttcagaccttccagtgatgtttgaacatgtatttttctgtgaacttatatatgaccgtgccagtggagctctcaagcagttgcctccaaatgttaggtttatgtctatggtgcaaaggacaagtgcgttgaaaaagaacaaaggaaagcagatctgtgagcctgatcaaatagattcaggtaaatggttggatgtgcctaaagagaaccgtctagctactcttgacatttttgctggctgtggaggtttatcagaagggctgcagcaagctggtgtatcttttacaaaatgggcgattgaatacgaagagcctgctggtgaagcatttaataaaaatcatccagaggctgtggtctttgtagataactgcaatgtgattctaaaggcaattatggataaatgtggggatactgatgattgtgtttcaacttctgaagctgctgaacaagcagcaaaacttccagaagtgaacattaataatcttccagtccctggcgaagttgaattcataaatggtggtcctccgtgtcagggattctctgggatgaatagattcaaccaaagcccatggagtaaagttcagtgtgagatgattctagcattcctctcattcgctgagtatttccgtcccagattctttctgttagaaaatgttcggaactttgtttccttcaacaaagggcagaccttccgtttggcagttgcatctcttctggagatgggataccaggtccggtttggaattctagaagcaggggcttttggtgttgcccagtccaggaaaagggcgtttatttgggctgctgcacctggagagatgcttcctgattggccagagccgatgcatgtgtttgctagccctgagctgaagataacactgcctgatggccaatactatgcagctgcaagaagcactgctggtggagcgcctttccgagcgattactgttagagatacaattggggatctgcctaaagtgggaaatggtgccagcaaactcacgcttgagtatggaggtgagcccgtgtcttggttccagaagaagataagagggaatatgatggtactgaatgatcacatatctaaggagatgaatgagctgaacctaataaggtgccaacacattccgaaacggccgggttgtgattggcatgacctaccggacgagaaggttaagctgtcaaatgggcagatggctgacctgataccttggtgcctgcccaacacagccaagaggcacaatcagtggaaaggactgtacgggaggctggactgggaaggcaacttccccacatccgtcactgatccccagccaatgggcaaggtcggcatgtgcttccaccctgatcaagacaggatcatcacagtccgggaatgtgctcggtcacagggctttcctgacagctatgaatttgcgggcaacatccagaacaagcaccggcagattggcaatgccgtgcccccgcctcttgcctatgcacttgggaggaagctgaaggaagccgttgacaagcgtcaggaagccagcgcaggcgtgcctgcaccatgagaagttttccttccatcaaaccatgacccatgaagctaagcgctgaggtcgtccttgaggaccagttaattttggttttatcagtcttaatgcactcctgaatgtatatgttagagaagtgtcgattgctgattgttaccctgattcagggtagcggttatatctaaaaacttgagaaaatctagtgtactctagttgtcatgtgttccattttgttggctctaaactttcaactagttttggtgattaatgacaacatgagattaaattaaattttgtagaggcatttaaattaggccactaatagtgactatttagtcgctcaatttttttgcccctaattatggaatttgttttttaaaggatgaacaacaagattaaatggattagttcaagtgtcgattggggctaagactatccgtagcggttttttctaactttttctctatgtgccacctttatatcatgtcatactagcaattctaattaattgattaagggtatc

SEQ ID NO: 68031 - DNA, 5916 bp, Zea Mays
caggccgccacccacccccactcggccactcccccaggcgttcaagcacggcgcccatgccctagcccctagacccctattcgcaggtcgcagcagccgccaacacccagatcccataccacgccgccaccgcgccaccggagtccggcggccagcccccgcccaccggcgagtccctggctccctgcgcgtgcgagaccagagatccaggcagcggacgagccctctccgtccccagccattagcgaccagctggtgccggtcatccctgctgcgacgagctggtgccgtgaagccgccctccaggcctacagatccaggtgtccctttgttcagttgttggtcgtgtgtgctgcccgtatccctacaaccatgctggtgcctggtgctgctgccttgagctgaccatgcaaaacaaccgtgctggtgcttctgctggtgacatggtgaaaactccgagatctcctgttaccacaggtgcagcaggaggcaatgacaaagcttcaaagtgtggttgtgatattgacaatggtgaggctgggccatcattggtggtggtggagcaacaagcactagccactttgtagcaaacatgtggtcactagcatggtcatttgacttaatcattaactagacaatacactgacgaatgaaccagtgtaacatttaaatggaagtttattatcacacatgcagagtattgtgatgcaaatacatgtatgtttcttgcaacaaccacaaggaacaagaagatgcagagcaaagccacaaaagaaggaagaggaatccacagaaaacaacaagctggagaatggatctctggatgcaacagaagaggtgcatcatggagtcgaaaaaggtgatggacatgttacccgcaagagaccaaggagatcagcggcctgttctgatttcaaagagaaatccatacgcttatccgaaaaaaaatctgttgtcatggtcaagaagaatcggatggaggaggaagaagtagatgctgtcaatctgacaaaacttggaccagaagatccaccaccttgccggaagttgatcgattttatcttgcatgatgcagaagggaacccacaaccctttgaaatgtcagaaattgatgacttctttataacagctcttatcatgcccatggatgatgatctagaaaaagagcgtgaaagaggagtacgctgtgaaggatttgggcgaattgaggactggaatatttctggttatgatgaaggtactcctgtaatctgggtgtcaactgatgttgctgactatgaatgtgtgaaaccatcaaccaattacaaatcttattttgaccacttctatgagaaggctcaggtgtgtgttgaagttttcaaaaagcttgcaaaatcagttggtgggaatcctaaccagggcctggatgaattgcttgctagtgttgttcggtcaaccaatgccatgaaaggatatagtggaaccatgagcaaagatttggtgatatccattggagaatttgtatacaatcaacttgttggtttggatgagacatcaaacaatgatgatgaaaagtttgctaccctgccagttcttctttctctaagagaccagtgcagatctagggtggaactgaccaagttgccctctaacttctcgaacacaagtctgaaaattaaggactcagagtgtgatgagacagcagaagacgatgatgatgcaaaattagctagattacttcaacaagaagaagaatggaaaatgatgaagaaacagaggggtaggcgtggaacaccatcccagaaaaatgtctacataaaaatcagtgaagctgagattgccaatgactatccccttcctgcatactataagccatttagccaggaaatggatgaatacatatttgatagtgatgacagcatattttctgatgatgtgccagttaggatactcaataactggacactgtacaatgcagattccaggcttatatctttggaattgatccctatgaaatcaggggcagaaaatgatgtggttatctttggatctggtttcatgagagatgatgatggcagttgctgttctacagctgagtctgtgaaatcttcgtcttcctccagcaaagctgaccaactggatgcaggaatccctatttatttgagcccaatcaaagaatggattatagagtttggtggctcaatgatttgtataaccattcggactgatgtggcctggtacaagctacgccaaccaacaaaacaatatgctccatggtgtgagcctgtactgaaaacagcaaggcttgctgttagcatcattaccctgttgaaagagcagagtcgtgcctcaaagctttcttttgctgatgtcataagaaaagtagctgaatttgacaaaggaaaccctgcatttatatcttcaaacatcacacttgttgagagatatattgtggtgcatggacagataatactccagcagtttgcagattttccagatgagactatccgtcggagtgcatttgtcagtggtcttttattgaagatggaacagaggaggcatacaaagttagttatgaagaaaaaaactcaagtgatgaggggagagaatctgaatccaagtgcagcaatgggtccagcatcgaggaaaaaagcaatgcgtgcaacaacaaccaggctcatcaacagaatctggagtgattactatgcacatcatttccctgaagattccaaggagggagatggaaatgaaacaaaagaaattgatgatgaacaagaagaaaatgaagatgaggatgctgaagatgaagggcagattgaagagaacatctcaaagactcctccatcaacacggtcccggaagttgctatcacaaacttgtaaggaaatcagatgggaaggtgaaacatctgggaaaacattgtctggagaaactctatataaatgtgcttatgttagggaactcagaatacctgttggtggaacagtggctctagaagatgattcaggagacacagtcatttgttttgttgagtacatgttccagaaagttgatggttcaaaaatggttcatgggaggattctgcaaaaaggttcacagacaattcttggcaatgcggcaaatgagagggaggttttcttaactaatgactgcttagaattcaaattagatgacatcaaggaattggtaatggttgatatccaatcaaggccttggggtcacaagtacagaaaagagaattctgaagctgataaagttgagcaggtcaaagcagaagagagaaagaaaaagggccagcccatggtatatttctgcaaaagcttgtactggcctgagaagggtgccttctttgccctctcccgagataaaatgggtcttggtagtggtttatgtagttcttgtgataatatagagccagattctgatgaattgaaaatattctcgaagaccagctttgtctacagaaaggttacatataatgtcaatgagtttttatacataagacctgatttttttgctgaagatgaggatcgtgcaaccttcaaggctggccgaaatgtgggtctaaagccctatgcagtttgtcaaatattgtccatccctgaaggggctggatctaaaaaactcaatccagcatcagcaaatatcagtgctagaagattttacagaccagatgacatttcatcagccaaagcctatgcatctgacatcagagaggtctactatagtgaggatgtaattgatgtgcctgtggatatgatagagggaaaatgtgaggttagaaagaagaacgatcttgcaagttcagaccttccagtgatgtttgaacatgtatttttctgtgaacttatatatgaccgtgccagtggagctctcaagcagttgcctccaaatgttaggtttatgtctatggtgcaaaggacaagtgcgttgaaaaagaacaaaggaaagcagatctgtgagcctgatcaaatagattcaggtaaatggttggatgtgcctaaagagaaccgtctagctactcttgacatttttgctggctgtggaggtttatcagaagggctgcagcaagctggtatgtattgttaacactgatgctgtataccatgaacatgaccaacaaataaaaaatttcctcattgttcaatgctgtaggtgtatcttttacaaaatgggcgattgaatacgaagagcctgctggtgaagcatttaataaaaatcatccagaggctgtggtctttgtagataactgcaatgtgattctaaaggcaattatggataaatgtggggatactgatgattgtgtttcaacttctgaagctgctgaacaagcagcaaaacttccagaagtgaacattaataatcttccagtccctggcgaagttgaattcataaatggtggtcctccgtgtcagggattctctgggatgaatagattcaaccaaagcccatggagtaaagttcagtgtgagatgattctagcattcctctcattcgctgagtatttccgtcccagattctttctgttagaaaatgttcggaactttgtttccttcaacaaagggcagaccttccgtttggcagttgcatctcttctggagatgggataccaggtccggtttggaattctagaagcaggggcttttggtgttgcccagtccaggaaaagggcgtttatttgggctgctgcacctggagagatgcttcctgattggccagagccgatgcatgtgtttgctagccctgagctgaagataacactgcctgatggccaatactatgcagctgcaagaagcactgctggtggagcgcctttccgagcgattactgttagagatacaattggggatctgcctaaagtgggaaatggtgccagcaaactcacgcttgagtatggaggtgagcccgtgtcttggttccagaagaagataagagggaatatgatggtactgaatgatcacatatctaaggagatgaatgagctgaacctaataaggtgccaacacattccgaaacggccgggttgtgattggcatgacctaccggacgagaaggttaagctgtcaaatgggcagatggctgacctgataccttggtgcctgcccaacacagccaagaggcacaatcagtggaaaggactgtacgggaggctggactgggaaggcaacttccccacatccgtcactgatccccagccaatgggcaaggtcggcatgtgcttccaccctgatcaagacaggatcatcacagtccgggaatgtgctcggtcacagggctttcctgacagctatgaatttgcgggcaacatccagaacaagcaccggcagattggcaatgccgtgcccccgcctcttgcctatgcacttgggaggaagctgaaggaagccgttgacaagcgtcaggaagccagcgcaggcgtgcctgcaccatgagaagttttccttccatcaaaccatgacccatgaagctaagcgctgaggtcgtccttgaggaccagttaattttggttttatcagtcttaatgcactcctgaatgtatatgttagagaagtgtcgattgctgattgttaccctgattcagggtagcggttatatctaaaaacttgagaaaatctagtgtactctagttgtcatgtgttccattttgttggctctaaactttcaactagttttggtgattaatgacaacatgagattaaattaaattttgtagaggcatttaaattaggccactaatagtgactatttagtcgctcaatttttttgcccctaattatggaatttgttttttaaaggatgaacaacaagattaaatggattagttcaagtgtcgattggggctaagactatccgtagcggttttttctaactttttctctatgtgccacctttatatcatgtcatactagcaattctaattaattgattaagggtatc

SEQ ID NO: 68032 - DNA, 5251 bp, Zea Mays
gcgcctgttgcctcgggagtcgtgcactcgagcagcagatttttgcgtgggggattcctgttcttccccatcaattgcttgctgcgccagtatcccagcactaattgccttcagctgggtgacatggtgaaaactccgagatctcctgttaccacaggaacaagaagatgcagagcaaagccacaaaagaaggaagaggaatccacagaaaacaacaagctggagaatggatctctggatgcaacagaagaggtgcatcatggagtcgaaaaaggtgatggacatgttacccgcaagagaccaaggagatcagcggcctgttctgatttcaaagagaaatccatacgcttatccgaaaaaaaatctgttgtcatggtcaagaagaatcggatggaggaggaagaagtagatgctgtcaatctgacaaaacttggaccagaagatccaccaccttgccggaagttgatcgattttatcttgcatgatgcagaagggaacccacaaccctttgaaatgtcagaaattgatgacttctttataacagctcttatcatgcccatggatgatgatctagaaaaagagcgtgaaagaggagtacgctgtgaaggatttgggcgaattgaggactggaatatttctggttatgatgaaggtactcctgtaatctgggtgtcaactgatgttgctgactatgaatgtgtgaaaccatcaaccaattacaaatcttattttgaccacttctatgagaaggctcaggtgtgtgttgaagttttcaaaaagcttgcaaaatcagttggtgggaatcctaaccagggcctggatgaattgcttgctagtgttgttcggtcaaccaatgccatgaaaggatatagtggaaccatgagcaaagatttggtgatatccattggagaatttgtatacaatcaacttgttggtttggatgagacatcaaacaatgatgatgaaaagtttgctaccctgccagttcttctttctctaagagaccagtgcagatctagggtggaactgaccaagttgccctctaacttctcgaacacaagtctgaaaattaaggactcagagtgtgatgagacagcagaagacgatgatgatgcaaaattagctagattacttcaacaagaagaagaatggaaaatgatgaagaaacagaggggtaggcgtggaacaccatcccagaaaaatgtctacataaaaatcagtgaagctgagattgccaatgactatccccttcctgcatactataagccatttagccaggaaatggatgaatacatatttgatagtgatgacagcatattttctgatgatgtgccagttaggatactcaataactggacactgtacaatgcagattccaggcttatatctttggaattgatccctatgaaatcaggggcagaaaatgatgtggttatctttggatctggtttcatgagagatgatgatggcagttgctgttctacagctgagtctgtgaaatcttcgtcttcctccagcaaagctgaccaactggatgcaggaatccctatttatttgagcccaatcaaagaatggattatagagtttggtggctcaatgatttgtataaccattcggactgatgtggcctggtacaagctacgccaaccaacaaaacaatatgctccatggtgtgagcctgtactgaaaacagcaaggcttgctgttagcatcattaccctgttgaaagagcagagtcgtgcctcaaagctttcttttgctgatgtcataagaaaagtagctgaatttgacaaaggaaaccctgcatttatatcttcaaacatcacacttgttgagagatatattgtggtgcatggacagataatactccagcagtttgcagattttccagatgagactatccgtcggagtgcatttgtcagtggtcttttattgaagatggaacagaggaggcatacaaagttagttatgaagaaaaaaactcaagtgatgaggggagagaatctgaatccaagtgcagcaatgggtccagcatcgaggaaaaaagcaatgcgtgcaacaacaaccaggctcatcaacagaatctggagtgattactatgcacatcatttccctgaagattccaaggagggagatggaaatgaaacaaaagaaattgatgatgaacaagaagaaaatgaagatgaggatgctgaagatgaagggcagattgaagagaacatctcaaagactcctccatcaacacggtcccggaagttgctatcacaaacttgtaaggaaatcagatgggaaggtgaaacatctgggaaaacattgtctggagaaactctatataaatgtgcttatgttagggaactcagaatacctgttggtggaacagtggctctagaagatgattcaggagacacagtcatttgttttgttgagtacatgttccagaaagttgatggttcaaaaatggttcatgggaggattctgcaaaaaggttcacagacaattcttggcaatgcggcaaatgagagggaggttttcttaactaatgactgcttagaattcaaattagatgacatcaaggaattggtaatggttgatatccaatcaaggccttggggtcacaagtacagaaaagagaattctgaagctgataaagttgagcaggtcaaagcagaagagagaaagaaaaagggccagcccatggtatatttctgcaaaagcttgtactggcctgagaagggtgccttctttgccctctcccgagataaaatgggtcttggtagtggtttatgtagttcttgtgataatatagagccagattctgatgaattgaaaatattctcgaagaccagctttgtctacagaaaggttacatataatgtcaatgagtttttatacataagacctgatttttttgctgaagatgaggatcgtgcaaccttcaaggctggccgaaatgtgggtctaaagccctatgcagtttgtcaaatattgtccatccctgaaggggctggatctaaaaaactcaatccagcatcagcaaatatcagtgctagaagattttacagaccagatgacatttcatcagccaaagcctatgcatctgacatcagagaggtctactatagtgaggatgtaattgatgtgcctgtggatatgatagagggaaaatgtgaggttagaaagaagaacgatcttgcaagttcagaccttccagtgatgtttgaacatgtatttttctgtgaacttatatatgaccgtgccagtggagctctcaagcagttgcctccaaatgttaggtttatgtctatggtgcaaaggacaagtgcgttgaaaaagaacaaaggaaagcagatctgtgagcctgatcaaatagattcaggtaaatggttggatgtgcctaaagagaaccgtctagctactcttgacatttttgctggctgtggaggtttatcagaagggctgcagcaagctggtgtatcttttacaaaatgggcgattgaatacgaagagcctgctggtgaagcatttaataaaaatcatccagaggctgtggtctttgtagataactgcaatgtgattctaaaggcaattatggataaatgtggggatactgatgattgtgtttcaacttctgaagctgctgaacaagcagcaaaacttccagaagtgaacattaataatcttccagtccctggcgaagttgaattcataaatggtggtcctccgtgtcagggattctctgggatgaatagattcaaccaaagcccatggagtaaagttcagtgtgagatgattctagcattcctctcattcgctgagtatttccgtcccagattctttctgttagaaaatgttcggaactttgtttccttcaacaaagggcagaccttccgtttggcagttgcatctcttctggagatgggataccaggtccggtttggaattctagaagcaggggcttttggtgttgcccagtccaggaaaagggcgtttatttgggctgctgcacctggagagatgcttcctgattggccagagccgatgcatgtgtttgctagccctgagctgaagataacactgcctgatggccaatactatgcagctgcaagaagcactgctggtggagcgcctttccgagcgattactgttagagatacaattggggatctgcctaaagtgggaaatggtgccagcaaactcacgcttgagtatggaggtgagcccgtgtcttggttccagaagaagataagagggaatatgatggtactgaatgatcacatatctaaggagatgaatgagctgaacctaataaggtgccaacacattccgaaacggccgggttgtgattggcatgacctaccggacgagaaggttaagctgtcaaatgggcagatggctgacctgataccttggtgcctgcccaacacagccaagaggcacaatcagtggaaaggactgtacgggaggctggactgggaaggcaacttccccacatccgtcactgatccccagccaatgggcaaggtcggcatgtgcttccaccctgatcaagacaggatcatcacagtccgggaatgtgctcggtcacagggctttcctgacagctatgaatttgcgggcaacatccagaacaagcaccggcagattggcaatgccgtgcccccgcctcttgcctatgcacttgggaggaagctgaaggaagccgttgacaagcgtcaggaagccagcgcaggcgtgcctgcaccatgagaagttttccttccatcaaaccatgacccatgaagctaagcgctgaggtcgtccttgaggaccagttaattttggttttatcagtcttaatgcactcctgaatgtatatgttagagaagtgtcgattgctgattgttaccctgattcagggtagcggttatatctaaaaacttgagaaaatctagtgtactctagttgtcatgtgttccattttgttggctctaaactttcaactagttttggtgattaatgacaacatgagattaaattaaattttgtagaggcatttaaattaggccactaatagtgactatttagtcgctcaatttttttgcccctaattatggaatttgttttttaaaggatgaacaacaagattaaatggattagttcaagtgtcgattggggctaagactatccgtagcggttttttctaactttttctctatgtgccacctttatatcatgtcatactagcaattctaattaattgattaagggtatc

SEQ ID NO: 68033 - DNA, 5480 bp, Zea Mays
gttgttggtcggggctgtcggctgagttttgggggtctcgagtagtggatccgcgtggtcccggtggtgagccgtgcggcggcggccgccgccgcttccgtcgttcgagttctccgtccgggtgggggcttagccatttcggaggattagcttccggatccgctttgctgctgcttgtgcttatgtggcgatttgagcggggattcgagcggtctcaccttcgagatttccgtcggagtgttcttcagcttcatcttagagcagcagatttttgcgtgggggattcctgttcttccccatcaattgcttgctgcgccagtatcccagcactaattgccttcagctgggtgacatggtgaaaactccgagatctcctgttaccacaggaacaagaagatgcagagcaaagccacaaaagaaggaagaggaatccacagaaaacaacaagctggagaatggatctctggatgcaacagaagaggtgcatcatggagtcgaaaaaggtgatggacatgttacccgcaagagaccaaggagatcagcggcctgttctgatttcaaagagaaatccatacgcttatccgaaaaaaaatctgttgtcatggtcaagaagaatcggatggaggaggaagaagtagatgctgtcaatctgacaaaacttggaccagaagatccaccaccttgccggaagttgatcgattttatcttgcatgatgcagaagggaacccacaaccctttgaaatgtcagaaattgatgacttctttataacagctcttatcatgcccatggatgatgatctagaaaaagagcgtgaaagaggagtacgctgtgaaggatttgggcgaattgaggactggaatatttctggttatgatgaaggtactcctgtaatctgggtgtcaactgatgttgctgactatgaatgtgtgaaaccatcaaccaattacaaatcttattttgaccacttctatgagaaggctcaggtgtgtgttgaagttttcaaaaagcttgcaaaatcagttggtgggaatcctaaccagggcctggatgaattgcttgctagtgttgttcggtcaaccaatgccatgaaaggatatagtggaaccatgagcaaagatttggtgatatccattggagaatttgtatacaatcaacttgttggtttggatgagacatcaaacaatgatgatgaaaagtttgctaccctgccagttcttctttctctaagagaccagtgcagatctagggtggaactgaccaagttgccctctaacttctcgaacacaagtctgaaaattaaggactcagagtgtgatgagacagcagaagacgatgatgatgcaaaattagctagattacttcaacaagaagaagaatggaaaatgatgaagaaacagaggggtaggcgtggaacaccatcccagaaaaatgtctacataaaaatcagtgaagctgagattgccaatgactatccccttcctgcatactataagccatttagccaggaaatggatgaatacatatttgatagtgatgacagcatattttctgatgatgtgccagttaggatactcaataactggacactgtacaatgcagattccaggcttatatctttggaattgatccctatgaaatcaggggcagaaaatgatgtggttatctttggatctggtttcatgagagatgatgatggcagttgctgttctacagctgagtctgtgaaatcttcgtcttcctccagcaaagctgaccaactggatgcaggaatccctatttatttgagcccaatcaaagaatggattatagagtttggtggctcaatgatttgtataaccattcggactgatgtggcctggtacaagctacgccaaccaacaaaacaatatgctccatggtgtgagcctgtactgaaaacagcaaggcttgctgttagcatcattaccctgttgaaagagcagagtcgtgcctcaaagctttcttttgctgatgtcataagaaaagtagctgaatttgacaaaggaaaccctgcatttatatcttcaaacatcacacttgttgagagatatattgtggtgcatggacagataatactccagcagtttgcagattttccagatgagactatccgtcggagtgcatttgtcagtggtcttttattgaagatggaacagaggaggcatacaaagttagttatgaagaaaaaaactcaagtgatgaggggagagaatctgaatccaagtgcagcaatgggtccagcatcgaggaaaaaagcaatgcgtgcaacaacaaccaggctcatcaacagaatctggagtgattactatgcacatcatttccctgaagattccaaggagggagatggaaatgaaacaaaagaaattgatgatgaacaagaagaaaatgaagatgaggatgctgaagatgaagggcagattgaagagaacatctcaaagactcctccatcaacacggtcccggaagttgctatcacaaacttgtaaggaaatcagatgggaaggtgaaacatctgggaaaacattgtctggagaaactctatataaatgtgcttatgttagggaactcagaatacctgttggtggaacagtggctctagaagatgattcaggagacacagtcatttgttttgttgagtacatgttccagaaagttgatggttcaaaaatggttcatgggaggattctgcaaaaaggttcacagacaattcttggcaatgcggcaaatgagagggaggttttcttaactaatgactgcttagaattcaaattagatgacatcaaggaattggtaatggttgatatccaatcaaggccttggggtcacaagtacagaaaagagaattctgaagctgataaagttgagcaggtcaaagcagaagagagaaagaaaaagggccagcccatggtatatttctgcaaaagcttgtactggcctgagaagggtgccttctttgccctctcccgagataaaatgggtcttggtagtggtttatgtagttcttgtgataatatagagccagattctgatgaattgaaaatattctcgaagaccagctttgtctacagaaaggttacatataatgtcaatgagtttttatacataagacctgatttttttgctgaagatgaggatcgtgcaaccttcaaggctggccgaaatgtgggtctaaagccctatgcagtttgtcaaatattgtccatccctgaaggggctggatctaaaaaactcaatccagcatcagcaaatatcagtgctagaagattttacagaccagatgacatttcatcagccaaagcctatgcatctgacatcagagaggtctactatagtgaggatgtaattgatgtgcctgtggatatgatagagggaaaatgtgaggttagaaagaagaacgatcttgcaagttcagaccttccagtgatgtttgaacatgtatttttctgtgaacttatatatgaccgtgccagtggagctctcaagcagttgcctccaaatgttaggtttatgtctatggtgcaaaggacaagtgcgttgaaaaagaacaaaggaaagcagatctgtgagcctgatcaaatagattcaggtaaatggttggatgtgcctaaagagaaccgtctagctactcttgacatttttgctggctgtggaggtttatcagaagggctgcagcaagctggtgtatcttttacaaaatgggcgattgaatacgaagagcctgctggtgaagcatttaataaaaatcatccagaggctgtggtctttgtagataactgcaatgtgattctaaaggcaattatggataaatgtggggatactgatgattgtgtttcaacttctgaagctgctgaacaagcagcaaaacttccagaagtgaacattaataatcttccagtccctggcgaagttgaattcataaatggtggtcctccgtgtcagggattctctgggatgaatagattcaaccaaagcccatggagtaaagttcagtgtgagatgattctagcattcctctcattcgctgagtatttccgtcccagattctttctgttagaaaatgttcggaactttgtttccttcaacaaagggcagaccttccgtttggcagttgcatctcttctggagatgggataccaggtccggtttggaattctagaagcaggggcttttggtgttgcccagtccaggaaaagggcgtttatttgggctgctgcacctggagagatgcttcctgattggccagagccgatgcatgtgtttgctagccctgagctgaagataacactgcctgatggccaatactatgcagctgcaagaagcactgctggtggagcgcctttccgagcgattactgttagagatacaattggggatctgcctaaagtgggaaatggtgccagcaaactcacgcttgagtatggaggtgagcccgtgtcttggttccagaagaagataagagggaatatgatggtactgaatgatcacatatctaaggagatgaatgagctgaacctaataaggtgccaacacattccgaaacggccgggttgtgattggcatgacctaccggacgagaaggttaagctgtcaaatgggcagatggctgacctgataccttggtgcctgcccaacacagccaagaggcacaatcagtggaaaggactgtacgggaggctggactgggaaggcaacttccccacatccgtcactgatccccagccaatgggcaaggtcggcatgtgcttccaccctgatcaagacaggatcatcacagtccgggaatgtgctcggtcacagggctttcctgacagctatgaatttgcgggcaacatccagaacaagcaccggcagattggcaatgccgtgcccccgcctcttgcctatgcacttgggaggaagctgaaggaagccgttgacaagcgtcaggaagccagcgcaggcgtgcctgcaccatgagaagttttccttccatcaaaccatgacccatgaagctaagcgctgaggtcgtccttgaggaccagttaattttggttttatcagtcttaatgcactcctgaatgtatatgttagagaagtgtcgattgctgattgttaccctgattcagggtagcggttatatctaaaaacttgagaaaatctagtgtactctagttgtcatgtgttccattttgttggctctaaactttcaactagttttggtgattaatgacaacatgagattaaattaaattttgtagaggcatttaaattaggccactaatagtgactatttagtcgctcaatttttttgcccctaattatggaatttgttttttaaaggatgaacaacaagattaaatggattagttcaagtgtcgattggggctaagactatccgtagcggttttttctaactttttctctatgtgccacctttatatcatgtcatactagcaattctaattaattgattaagggtatc

SEQ ID NO: 68034 - DNA, 6106 bp, Zea Mays
gttgttggtcggggctgtcggctgagttttgggggtctcgagtagtggatccgcgtggtcccggtggtgagccgtgcggcggcggccgccgccgcttccgtcgttcgagttctccgtccgggtgggggcttagccatttcggaggattagcttccggatccgctttgctgctgcttgtgcttatgtggcgatttgagcggggattcgagcggtctcaccttcgagatttccgtcggagtgttcttcagcttcatcttagtgagtttcgtatagtattgttattttaggtgtcgctgttgcgattttggacgacttttgtgtcgcggtagtgcaagatttcgccccttggcagttcaatttgtgaggatttatgcaggattttggggctggattagcaagcggaagcacatcgtttgctgcgctttcccctttccgttactaccatagtgaggactgaggagttatgattccgtggattcaggatgagagcactgaagagggttggtgcgcctgttgcctcgggagtcgtgcactcgagcagcagatttttgcgtgggggattcctgttcttccccatcaattgcttgctgcgccagtatcccagcactaattgccttcagctgggtgacatggtgaaaactccgagatctcctgttaccacaggttggtgatgtggccgtctcacatggaatttccctacattgcttgccttatcttgattagatctagcacttatggccattctaggtgcagcaggaggcaatgacaaagcttcaaagtgtggttgtgatattgacaatggtgaggctgggccatcattggtggtggtggagcaacaagcactagccactttgtagcaaacatgtggtcactagcatggtcatttgacttaatcattaactagacaatacactgacgaatgaaccagtgtaacatttaaatggaagtttattatcacacatgcagagtattgtgatgcaaatacatgtatgtttcttgcaacaaccacaaggaacaagaagatgcagagcaaagccacaaaagaaggaagaggaatccacagaaaacaacaagctggagaatggatctctggatgcaacagaagaggtgcatcatggagtcgaaaaaggtgatggacatgttacccgcaagagaccaaggagatcagcggcctgttctgatttcaaagagaaatccatacgcttatccgaaaaaaaatctgttgtcatggtcaagaagaatcggatggaggaggaagaagtagatgctgtcaatctgacaaaacttggaccagaagatccaccaccttgccggaagttgatcgattttatcttgcatgatgcagaagggaacccacaaccctttgaaatgtcagaaattgatgacttctttataacagctcttatcatgcccatggatgatgatctagaaaaagagcgtgaaagaggagtacgctgtgaaggatttgggcgaattgaggactggaatatttctggttatgatgaaggtactcctgtaatctgggtgtcaactgatgttgctgactatgaatgtgtgaaaccatcaaccaattacaaatcttattttgaccacttctatgagaaggctcaggtgtgtgttgaagttttcaaaaagcttgcaaaatcagttggtgggaatcctaaccagggcctggatgaattgcttgctagtgttgttcggtcaaccaatgccatgaaaggatatagtggaaccatgagcaaagatttggtgatatccattggagaatttgtatacaatcaacttgttggtttggatgagacatcaaacaatgatgatgaaaagtttgctaccctgccagttcttctttctctaagagaccagtgcagatctagggtggaactgaccaagttgccctctaacttctcgaacacaagtctgaaaattaaggactcagagtgtgatgagacagcagaagacgatgatgatgcaaaattagctagattacttcaacaagaagaagaatggaaaatgatgaagaaacagaggggtaggcgtggaacaccatcccagaaaaatgtctacataaaaatcagtgaagctgagattgccaatgactatccccttcctgcatactataagccatttagccaggaaatggatgaatacatatttgatagtgatgacagcatattttctgatgatgtgccagttaggatactcaataactggacactgtacaatgcagattccaggcttatatctttggaattgatccctatgaaatcaggggcagaaaatgatgtggttatctttggatctggtttcatgagagatgatgatggcagttgctgttctacagctgagtctgtgaaatcttcgtcttcctccagcaaagctgaccaactggatgcaggaatccctatttatttgagcccaatcaaagaatggattatagagtttggtggctcaatgatttgtataaccattcggactgatgtggcctggtacaagctacgccaaccaacaaaacaatatgctccatggtgtgagcctgtactgaaaacagcaaggcttgctgttagcatcattaccctgttgaaagagcagagtcgtgcctcaaagctttcttttgctgatgtcataagaaaagtagctgaatttgacaaaggaaaccctgcatttatatcttcaaacatcacacttgttgagagatatattgtggtgcatggacagataatactccagcagtttgcagattttccagatgagactatccgtcggagtgcatttgtcagtggtcttttattgaagatggaacagaggaggcatacaaagttagttatgaagaaaaaaactcaagtgatgaggggagagaatctgaatccaagtgcagcaatgggtccagcatcgaggaaaaaagcaatgcgtgcaacaacaaccaggctcatcaacagaatctggagtgattactatgcacatcatttccctgaagattccaaggagggagatggaaatgaaacaaaagaaattgatgatgaacaagaagaaaatgaagatgaggatgctgaagatgaagggcagattgaagagaacatctcaaagactcctccatcaacacggtcccggaagttgctatcacaaacttgtaaggaaatcagatgggaaggtgaaacatctgggaaaacattgtctggagaaactctatataaatgtgcttatgttagggaactcagaatacctgttggtggaacagtggctctagaagatgattcaggagacacagtcatttgttttgttgagtacatgttccagaaagttgatggttcaaaaatggttcatgggaggattctgcaaaaaggttcacagacaattcttggcaatgcggcaaatgagagggaggttttcttaactaatgactgcttagaattcaaattagatgacatcaaggaattggtaatggttgatatccaatcaaggccttggggtcacaagtacagaaaagagaattctgaagctgataaagttgagcaggtcaaagcagaagagagaaagaaaaagggccagcccatggtatatttctgcaaaagcttgtactggcctgagaagggtgccttctttgccctctcccgagataaaatgggtcttggtagtggtttatgtagttcttgtgataatatagagccagattctgatgaattgaaaatattctcgaagaccagctttgtctacagaaaggttacatataatgtcaatgagtttttatacataagacctgatttttttgctgaagatgaggatcgtgcaaccttcaaggctggccgaaatgtgggtctaaagccctatgcagtttgtcaaatattgtccatccctgaaggggctggatctaaaaaactcaatccagcatcagcaaatatcagtgctagaagattttacagaccagatgacatttcatcagccaaagcctatgcatctgacatcagagaggtctactatagtgaggatgtaattgatgtgcctgtggatatgatagagggaaaatgtgaggttagaaagaagaacgatcttgcaagttcagaccttccagtgatgtttgaacatgtatttttctgtgaacttatatatgaccgtgccagtggagctctcaagcagttgcctccaaatgttaggtttatgtctatggtgcaaaggacaagtgcgttgaaaaagaacaaaggaaagcagatctgtgagcctgatcaaatagattcaggtaaatggttggatgtgcctaaagagaaccgtctagctactcttgacatttttgctggctgtggaggtttatcagaagggctgcagcaagctggtgtatcttttacaaaatgggcgattgaatacgaagagcctgctggtgaagcatttaataaaaatcatccagaggctgtggtctttgtagataactgcaatgtgattctaaaggcaattatggataaatgtggggatactgatgattgtgtttcaacttctgaagctgctgaacaagcagcaaaacttccagaagtgaacattaataatcttccagtccctggcgaagttgaattcataaatggtggtcctccgtgtcagggattctctgggatgaatagattcaaccaaagcccatggagtaaagttcagtgtgagatgattctagcattcctctcattcgctgagtatttccgtcccagattctttctgttagaaaatgttcggaactttgtttccttcaacaaagggcagaccttccgtttggcagttgcatctcttctggagatgggataccaggtccggtttggaattctagaagcaggggcttttggtgttgcccagtccaggaaaagggcgtttatttgggctgctgcacctggagagatgcttcctgattggccagagccgatgcatgtgtttgctagccctgagctgaagataacactgcctgatggccaatactatgcagctgcaagaagcactgctggtggagcgcctttccgagcgattactgttagagatacaattggggatctgcctaaagtgggaaatggtgccagcaaactcacgcttgagtatggaggtgagcccgtgtcttggttccagaagaagataagagggaatatgatggtactgaatgatcacatatctaaggagatgaatgagctgaacctaataaggtgccaacacattccgaaacggccgggttgtgattggcatgacctaccggacgagaaggttaagctgtcaaatgggcagatggctgacctgataccttggtgcctgcccaacacagccaagaggcacaatcagtggaaaggactgtacgggaggctggactgggaaggcaacttccccacatccgtcactgatccccagccaatgggcaaggtcggcatgtgcttccaccctgatcaagacaggatcatcacagtccgggaatgtgctcggtcacagggctttcctgacagctatgaatttgcgggcaacatccagaacaagcaccggcagattggcaatgccgtgcccccgcctcttgcctatgcacttgggaggaagctgaaggaagccgttgacaagcgtcaggaagccagcgcaggcgtgcctgcaccatgagaagttttccttccatcaaaccatgacccatgaagctaagcgctgaggtcgtccttgaggaccagttaattttggttttatcagtcttaatgcactcctgaatgtatatgttagagaagtgtcgattgctgattgttaccctgattcagggtagcggttatatctaaaaacttgagaaaatctagtgtactctagttgtcatgtgttccattttgttggctctaaactttcaactagttttggtgattaatgacaacatgagattaaattaaattttgtagaggcatttaaattaggccactaatagtgactatttagtcgctcaatttttttgcccctaattatggaatttgttttttaaaggatgaacaacaagattaaatggattagttcaagtgtcgattggggctaagactatccgtagcggttttttctaactttttctctatgtgccacctttatatcatgtcatactagcaattctaattaattgattaagggtatc

SEQ ID NO: 68035 - DNA, 5829 bp, Zea Mays
gttgttggtcggggctgtcggctgagttttgggggtctcgagtagtggatccgcgtggtcccggtggtgagccgtgcggcggcggccgccgccgcttccgtcgttcgagttctccgtccgggtgggggcttagccatttcggaggattagcttccggatccgctttgctgctgcttgtgcttatgtggcgatttgagcggggattcgagcggtctcaccttcgagatttccgtcggagtgttcttcagcttcatcttagagcagcagatttttgcgtgggggattcctgttcttccccatcaattgcttgctgcgccagtatcccagcactaattgccttcagctgggtgacatggtgaaaactccgagatctcctgttaccacaggttggtgatgtggccgtctcacatggaatttccctacattgcttgccttatcttgattagatctagcacttatggccattctaggtgcagcaggaggcaatgacaaagcttcaaagtgtggttgtgatattgacaatggtgaggctgggccatcattggtggtggtggagcaacaagcactagccactttgtagcaaacatgtggtcactagcatggtcatttgacttaatcattaactagacaatacactgacgaatgaaccagtgtaacatttaaatggaagtttattatcacacatgcagagtattgtgatgcaaatacatgtatgtttcttgcaacaaccacaaggaacaagaagatgcagagcaaagccacaaaagaaggaagaggaatccacagaaaacaacaagctggagaatggatctctggatgcaacagaagaggtgcatcatggagtcgaaaaaggtgatggacatgttacccgcaagagaccaaggagatcagcggcctgttctgatttcaaagagaaatccatacgcttatccgaaaaaaaatctgttgtcatggtcaagaagaatcggatggaggaggaagaagtagatgctgtcaatctgacaaaacttggaccagaagatccaccaccttgccggaagttgatcgattttatcttgcatgatgcagaagggaacccacaaccctttgaaatgtcagaaattgatgacttctttataacagctcttatcatgcccatggatgatgatctagaaaaagagcgtgaaagaggagtacgctgtgaaggatttgggcgaattgaggactggaatatttctggttatgatgaaggtactcctgtaatctgggtgtcaactgatgttgctgactatgaatgtgtgaaaccatcaaccaattacaaatcttattttgaccacttctatgagaaggctcaggtgtgtgttgaagttttcaaaaagcttgcaaaatcagttggtgggaatcctaaccagggcctggatgaattgcttgctagtgttgttcggtcaaccaatgccatgaaaggatatagtggaaccatgagcaaagatttggtgatatccattggagaatttgtatacaatcaacttgttggtttggatgagacatcaaacaatgatgatgaaaagtttgctaccctgccagttcttctttctctaagagaccagtgcagatctagggtggaactgaccaagttgccctctaacttctcgaacacaagtctgaaaattaaggactcagagtgtgatgagacagcagaagacgatgatgatgcaaaattagctagattacttcaacaagaagaagaatggaaaatgatgaagaaacagaggggtaggcgtggaacaccatcccagaaaaatgtctacataaaaatcagtgaagctgagattgccaatgactatccccttcctgcatactataagccatttagccaggaaatggatgaatacatatttgatagtgatgacagcatattttctgatgatgtgccagttaggatactcaataactggacactgtacaatgcagattccaggcttatatctttggaattgatccctatgaaatcaggggcagaaaatgatgtggttatctttggatctggtttcatgagagatgatgatggcagttgctgttctacagctgagtctgtgaaatcttcgtcttcctccagcaaagctgaccaactggatgcaggaatccctatttatttgagcccaatcaaagaatggattatagagtttggtggctcaatgatttgtataaccattcggactgatgtggcctggtacaagctacgccaaccaacaaaacaatatgctccatggtgtgagcctgtactgaaaacagcaaggcttgctgttagcatcattaccctgttgaaagagcagagtcgtgcctcaaagctttcttttgctgatgtcataagaaaagtagctgaatttgacaaaggaaaccctgcatttatatcttcaaacatcacacttgttgagagatatattgtggtgcatggacagataatactccagcagtttgcagattttccagatgagactatccgtcggagtgcatttgtcagtggtcttttattgaagatggaacagaggaggcatacaaagttagttatgaagaaaaaaactcaagtgatgaggggagagaatctgaatccaagtgcagcaatgggtccagcatcgaggaaaaaagcaatgcgtgcaacaacaaccaggctcatcaacagaatctggagtgattactatgcacatcatttccctgaagattccaaggagggagatggaaatgaaacaaaagaaattgatgatgaacaagaagaaaatgaagatgaggatgctgaagatgaagggcagattgaagagaacatctcaaagactcctccatcaacacggtcccggaagttgctatcacaaacttgtaaggaaatcagatgggaaggtgaaacatctgggaaaacattgtctggagaaactctatataaatgtgcttatgttagggaactcagaatacctgttggtggaacagtggctctagaagatgattcaggagacacagtcatttgttttgttgagtacatgttccagaaagttgatggttcaaaaatggttcatgggaggattctgcaaaaaggttcacagacaattcttggcaatgcggcaaatgagagggaggttttcttaactaatgactgcttagaattcaaattagatgacatcaaggaattggtaatggttgatatccaatcaaggccttggggtcacaagtacagaaaagagaattctgaagctgataaagttgagcaggtcaaagcagaagagagaaagaaaaagggccagcccatggtatatttctgcaaaagcttgtactggcctgagaagggtgccttctttgccctctcccgagataaaatgggtcttggtagtggtttatgtagttcttgtgataatatagagccagattctgatgaattgaaaatattctcgaagaccagctttgtctacagaaaggttacatataatgtcaatgagtttttatacataagacctgatttttttgctgaagatgaggatcgtgcaaccttcaaggctggccgaaatgtgggtctaaagccctatgcagtttgtcaaatattgtccatccctgaaggggctggatctaaaaaactcaatccagcatcagcaaatatcagtgctagaagattttacagaccagatgacatttcatcagccaaagcctatgcatctgacatcagagaggtctactatagtgaggatgtaattgatgtgcctgtggatatgatagagggaaaatgtgaggttagaaagaagaacgatcttgcaagttcagaccttccagtgatgtttgaacatgtatttttctgtgaacttatatatgaccgtgccagtggagctctcaagcagttgcctccaaatgttaggtttatgtctatggtgcaaaggacaagtgcgttgaaaaagaacaaaggaaagcagatctgtgagcctgatcaaatagattcaggtaaatggttggatgtgcctaaagagaaccgtctagctactcttgacatttttgctggctgtggaggtttatcagaagggctgcagcaagctggtgtatcttttacaaaatgggcgattgaatacgaagagcctgctggtgaagcatttaataaaaatcatccagaggctgtggtctttgtagataactgcaatgtgattctaaaggcaattatggataaatgtggggatactgatgattgtgtttcaacttctgaagctgctgaacaagcagcaaaacttccagaagtgaacattaataatcttccagtccctggcgaagttgaattcataaatggtggtcctccgtgtcagggattctctgggatgaatagattcaaccaaagcccatggagtaaagttcagtgtgagatgattctagcattcctctcattcgctgagtatttccgtcccagattctttctgttagaaaatgttcggaactttgtttccttcaacaaagggcagaccttccgtttggcagttgcatctcttctggagatgggataccaggtccggtttggaattctagaagcaggggcttttggtgttgcccagtccaggaaaagggcgtttatttgggctgctgcacctggagagatgcttcctgattggccagagccgatgcatgtgtttgctagccctgagctgaagataacactgcctgatggccaatactatgcagctgcaagaagcactgctggtggagcgcctttccgagcgattactgttagagatacaattggggatctgcctaaagtgggaaatggtgccagcaaactcacgcttgagtatggaggtgagcccgtgtcttggttccagaagaagataagagggaatatgatggtactgaatgatcacatatctaaggagatgaatgagctgaacctaataaggtgccaacacattccgaaacggccgggttgtgattggcatgacctaccggacgagaaggttaagctgtcaaatgggcagatggctgacctgataccttggtgcctgcccaacacagccaagaggcacaatcagtggaaaggactgtacgggaggctggactgggaaggcaacttccccacatccgtcactgatccccagccaatgggcaaggtcggcatgtgcttccaccctgatcaagacaggatcatcacagtccgggaatgtgctcggtcacagggctttcctgacagctatgaatttgcgggcaacatccagaacaagcaccggcagattggcaatgccgtgcccccgcctcttgcctatgcacttgggaggaagctgaaggaagccgttgacaagcgtcaggaagccagcgcaggcgtgcctgcaccatgagaagttttccttccatcaaaccatgacccatgaagctaagcgctgaggtcgtccttgaggaccagttaattttggttttatcagtcttaatgcactcctgaatgtatatgttagagaagtgtcgattgctgattgttaccctgattcagggtagcggttatatctaaaaacttgagaaaatctagtgtactctagttgtcatgtgttccattttgttggctctaaactttcaactagttttggtgattaatgacaacatgagattaaattaaattttgtagaggcatttaaattaggccactaatagtgactatttagtcgctcaatttttttgcccctaattatggaatttgttttttaaaggatgaacaacaagattaaatggattagttcaagtgtcgattggggctaagactatccgtagcggttttttctaactttttctctatgtgccacctttatatcatgtcatactagcaattctaattaattgattaagggtatc

SEQ ID NO: 68036 - DNA, 5520 bp, Zea Mays
cgcctcccgtgccgccccggcgccgccgcgtccgagcagcagatttttgcgtgggggattcctgttcttccccatcaattgcttgctgcgccagtatcccagcactaattgccttcagctgggtgacatggtgaaaactccgagatctcctgttaccacaggtgcagcaggaggcaatgacaaagcttcaaagtgtggttgtgatattgacaatggtgaggctgggccatcattggtggtggtggagcaacaagcactagccactttgtagcaaacatgtggtcactagcatggtcatttgacttaatcattaactagacaatacactgacgaatgaaccagtgtaacatttaaatggaagtttattatcacacatgcagagtattgtgatgcaaatacatgtatgtttcttgcaacaaccacaaggaacaagaagatgcagagcaaagccacaaaagaaggaagaggaatccacagaaaacaacaagctggagaatggatctctggatgcaacagaagaggtgcatcatggagtcgaaaaaggtgatggacatgttacccgcaagagaccaaggagatcagcggcctgttctgatttcaaagagaaatccatacgcttatccgaaaaaaaatctgttgtcatggtcaagaagaatcggatggaggaggaagaagtagatgctgtcaatctgacaaaacttggaccagaagatccaccaccttgccggaagttgatcgattttatcttgcatgatgcagaagggaacccacaaccctttgaaatgtcagaaattgatgacttctttataacagctcttatcatgcccatggatgatgatctagaaaaagagcgtgaaagaggagtacgctgtgaaggatttgggcgaattgaggactggaatatttctggttatgatgaaggtactcctgtaatctgggtgtcaactgatgttgctgactatgaatgtgtgaaaccatcaaccaattacaaatcttattttgaccacttctatgagaaggctcaggtgtgtgttgaagttttcaaaaagcttgcaaaatcagttggtgggaatcctaaccagggcctggatgaattgcttgctagtgttgttcggtcaaccaatgccatgaaaggatatagtggaaccatgagcaaagatttggtgatatccattggagaatttgtatacaatcaacttgttggtttggatgagacatcaaacaatgatgatgaaaagtttgctaccctgccagttcttctttctctaagagaccagtgcagatctagggtggaactgaccaagttgccctctaacttctcgaacacaagtctgaaaattaaggactcagagtgtgatgagacagcagaagacgatgatgatgcaaaattagctagattacttcaacaagaagaagaatggaaaatgatgaagaaacagaggggtaggcgtggaacaccatcccagaaaaatgtctacataaaaatcagtgaagctgagattgccaatgactatccccttcctgcatactataagccatttagccaggaaatggatgaatacatatttgatagtgatgacagcatattttctgatgatgtgccagttaggatactcaataactggacactgtacaatgcagattccaggcttatatctttggaattgatccctatgaaatcaggggcagaaaatgatgtggttatctttggatctggtttcatgagagatgatgatggcagttgctgttctacagctgagtctgtgaaatcttcgtcttcctccagcaaagctgaccaactggatgcaggaatccctatttatttgagcccaatcaaagaatggattatagagtttggtggctcaatgatttgtataaccattcggactgatgtggcctggtacaagctacgccaaccaacaaaacaatatgctccatggtgtgagcctgtactgaaaacagcaaggcttgctgttagcatcattaccctgttgaaagagcagagtcgtgcctcaaagctttcttttgctgatgtcataagaaaagtagctgaatttgacaaaggaaaccctgcatttatatcttcaaacatcacacttgttgagagatatattgtggtgcatggacagataatactccagcagtttgcagattttccagatgagactatccgtcggagtgcatttgtcagtggtcttttattgaagatggaacagaggaggcatacaaagttagttatgaagaaaaaaactcaagtgatgaggggagagaatctgaatccaagtgcagcaatgggtccagcatcgaggaaaaaagcaatgcgtgcaacaacaaccaggctcatcaacagaatctggagtgattactatgcacatcatttccctgaagattccaaggagggagatggaaatgaaacaaaagaaattgatgatgaacaagaagaaaatgaagatgaggatgctgaagatgaagggcagattgaagagaacatctcaaagactcctccatcaacacggtcccggaagttgctatcacaaacttgtaaggaaatcagatgggaaggtgaaacatctgggaaaacattgtctggagaaactctatataaatgtgcttatgttagggaactcagaatacctgttggtggaacagtggctctagaagatgattcaggagacacagtcatttgttttgttgagtacatgttccagaaagttgatggttcaaaaatggttcatgggaggattctgcaaaaaggttcacagacaattcttggcaatgcggcaaatgagagggaggttttcttaactaatgactgcttagaattcaaattagatgacatcaaggaattggtaatggttgatatccaatcaaggccttggggtcacaagtacagaaaagagaattctgaagctgataaagttgagcaggtcaaagcagaagagagaaagaaaaagggccagcccatggtatatttctgcaaaagcttgtactggcctgagaagggtgccttctttgccctctcccgagataaaatgggtcttggtagtggtttatgtagttcttgtgataatatagagccagattctgatgaattgaaaatattctcgaagaccagctttgtctacagaaaggttacatataatgtcaatgagtttttatacataagacctgatttttttgctgaagatgaggatcgtgcaaccttcaaggctggccgaaatgtgggtctaaagccctatgcagtttgtcaaatattgtccatccctgaaggggctggatctaaaaaactcaatccagcatcagcaaatatcagtgctagaagattttacagaccagatgacatttcatcagccaaagcctatgcatctgacatcagagaggtctactatagtgaggatgtaattgatgtgcctgtggatatgatagagggaaaatgtgaggttagaaagaagaacgatcttgcaagttcagaccttccagtgatgtttgaacatgtatttttctgtgaacttatatatgaccgtgccagtggagctctcaagcagttgcctccaaatgttaggtttatgtctatggtgcaaaggacaagtgcgttgaaaaagaacaaaggaaagcagatctgtgagcctgatcaaatagattcaggtaaatggttggatgtgcctaaagagaaccgtctagctactcttgacatttttgctggctgtggaggtttatcagaagggctgcagcaagctggtgtatcttttacaaaatgggcgattgaatacgaagagcctgctggtgaagcatttaataaaaatcatccagaggctgtggtctttgtagataactgcaatgtgattctaaaggcaattatggataaatgtggggatactgatgattgtgtttcaacttctgaagctgctgaacaagcagcaaaacttccagaagtgaacattaataatcttccagtccctggcgaagttgaattcataaatggtggtcctccgtgtcagggattctctgggatgaatagattcaaccaaagcccatggagtaaagttcagtgtgagatgattctagcattcctctcattcgctgagtatttccgtcccagattctttctgttagaaaatgttcggaactttgtttccttcaacaaagggcagaccttccgtttggcagttgcatctcttctggagatgggataccaggtccggtttggaattctagaagcaggggcttttggtgttgcccagtccaggaaaagggcgtttatttgggctgctgcacctggagagatgcttcctgattggccagagccgatgcatgtgtttgctagccctgagctgaagataacactgcctgatggccaatactatgcagctgcaagaagcactgctggtggagcgcctttccgagcgattactgttagagatacaattggggatctgcctaaagtgggaaatggtgccagcaaactcacgcttgagtatggaggtgagcccgtgtcttggttccagaagaagataagagggaatatgatggtactgaatgatcacatatctaaggagatgaatgagctgaacctaataaggtgccaacacattccgaaacggccgggttgtgattggcatgacctaccggacgagaaggttaagctgtcaaatgggcagatggctgacctgataccttggtgcctgcccaacacagccaagaggcacaatcagtggaaaggactgtacgggaggctggactgggaaggcaacttccccacatccgtcactgatccccagccaatgggcaaggtcggcatgtgcttccaccctgatcaagacaggatcatcacagtccgggaatgtgctcggtcacagggctttcctgacagctatgaatttgcgggcaacatccagaacaagcaccggcagattggcaatgccgtgcccccgcctcttgcctatgcacttgggaggaagctgaaggaagccgttgacaagcgtcaggaagccagcgcaggcgtgcctgcaccatgagaagttttccttccatcaaaccatgacccatgaagctaagcgctgaggtcgtccttgaggaccagttaattttggttttatcagtcttaatgcactcctgaatgtatatgttagagaagtgtcgattgctgattgttaccctgattcagggtagcggttatatctaaaaacttgagaaaatctagtgtactctagttgtcatgtgttccattttgttggctctaaactttcaactagttttggtgattaatgacaacatgagattaaattaaattttgtagaggcatttaaattaggccactaatagtgactatttagtcgctcaatttttttgcccctaattatggaatttgttttttaaaggatgaacaacaagattaaatggattagttcaagtgtcgattggggctaagactatccgtagcggttttttctaactttttctctatgtgccacctttatatcatgtcatactagcaattctaattaattgattaagggtatc

SEQ ID NO: 68037 - DNA, 5520 bp, Zea Mays
cacgcgcctcccgtgccgccccggcgccgccgcgtccggtgacatggtgaaaactccgagatctcctgttaccacaggttggtgatgtggccgtctcacatggaatttccctacattgcttgccttatcttgattagatctagcacttatggccattctaggtgcagcaggaggcaatgacaaagcttcaaagtgtggttgtgatattgacaatggtgaggctgggccatcattggtggtggtggagcaacaagcactagccactttgtagcaaacatgtggtcactagcatggtcatttgacttaatcattaactagacaatacactgacgaatgaaccagtgtaacatttaaatggaagtttattatcacacatgcagagtattgtgatgcaaatacatgtatgtttcttgcaacaaccacaaggaacaagaagatgcagagcaaagccacaaaagaaggaagaggaatccacagaaaacaacaagctggagaatggatctctggatgcaacagaagaggtgcatcatggagtcgaaaaaggtgatggacatgttacccgcaagagaccaaggagatcagcggcctgttctgatttcaaagagaaatccatacgcttatccgaaaaaaaatctgttgtcatggtcaagaagaatcggatggaggaggaagaagtagatgctgtcaatctgacaaaacttggaccagaagatccaccaccttgccggaagttgatcgattttatcttgcatgatgcagaagggaacccacaaccctttgaaatgtcagaaattgatgacttctttataacagctcttatcatgcccatggatgatgatctagaaaaagagcgtgaaagaggagtacgctgtgaaggatttgggcgaattgaggactggaatatttctggttatgatgaaggtactcctgtaatctgggtgtcaactgatgttgctgactatgaatgtgtgaaaccatcaaccaattacaaatcttattttgaccacttctatgagaaggctcaggtgtgtgttgaagttttcaaaaagcttgcaaaatcagttggtgggaatcctaaccagggcctggatgaattgcttgctagtgttgttcggtcaaccaatgccatgaaaggatatagtggaaccatgagcaaagatttggtgatatccattggagaatttgtatacaatcaacttgttggtttggatgagacatcaaacaatgatgatgaaaagtttgctaccctgccagttcttctttctctaagagaccagtgcagatctagggtggaactgaccaagttgccctctaacttctcgaacacaagtctgaaaattaaggactcagagtgtgatgagacagcagaagacgatgatgatgcaaaattagctagattacttcaacaagaagaagaatggaaaatgatgaagaaacagaggggtaggcgtggaacaccatcccagaaaaatgtctacataaaaatcagtgaagctgagattgccaatgactatccccttcctgcatactataagccatttagccaggaaatggatgaatacatatttgatagtgatgacagcatattttctgatgatgtgccagttaggatactcaataactggacactgtacaatgcagattccaggcttatatctttggaattgatccctatgaaatcaggggcagaaaatgatgtggttatctttggatctggtttcatgagagatgatgatggcagttgctgttctacagctgagtctgtgaaatcttcgtcttcctccagcaaagctgaccaactggatgcaggaatccctatttatttgagcccaatcaaagaatggattatagagtttggtggctcaatgatttgtataaccattcggactgatgtggcctggtacaagctacgccaaccaacaaaacaatatgctccatggtgtgagcctgtactgaaaacagcaaggcttgctgttagcatcattaccctgttgaaagagcagagtcgtgcctcaaagctttcttttgctgatgtcataagaaaagtagctgaatttgacaaaggaaaccctgcatttatatcttcaaacatcacacttgttgagagatatattgtggtgcatggacagataatactccagcagtttgcagattttccagatgagactatccgtcggagtgcatttgtcagtggtcttttattgaagatggaacagaggaggcatacaaagttagttatgaagaaaaaaactcaagtgatgaggggagagaatctgaatccaagtgcagcaatgggtccagcatcgaggaaaaaagcaatgcgtgcaacaacaaccaggctcatcaacagaatctggagtgattactatgcacatcatttccctgaagattccaaggagggagatggaaatgaaacaaaagaaattgatgatgaacaagaagaaaatgaagatgaggatgctgaagatgaagggcagattgaagagaacatctcaaagactcctccatcaacacggtcccggaagttgctatcacaaacttgtaaggaaatcagatgggaaggtgaaacatctgggaaaacattgtctggagaaactctatataaatgtgcttatgttagggaactcagaatacctgttggtggaacagtggctctagaagatgattcaggagacacagtcatttgttttgttgagtacatgttccagaaagttgatggttcaaaaatggttcatgggaggattctgcaaaaaggttcacagacaattcttggcaatgcggcaaatgagagggaggttttcttaactaatgactgcttagaattcaaattagatgacatcaaggaattggtaatggttgatatccaatcaaggccttggggtcacaagtacagaaaagagaattctgaagctgataaagttgagcaggtcaaagcagaagagagaaagaaaaagggccagcccatggtatatttctgcaaaagcttgtactggcctgagaagggtgccttctttgccctctcccgagataaaatgggtcttggtagtggtttatgtagttcttgtgataatatagagccagattctgatgaattgaaaatattctcgaagaccagctttgtctacagaaaggttacatataatgtcaatgagtttttatacataagacctgatttttttgctgaagatgaggatcgtgcaaccttcaaggctggccgaaatgtgggtctaaagccctatgcagtttgtcaaatattgtccatccctgaaggggctggatctaaaaaactcaatccagcatcagcaaatatcagtgctagaagattttacagaccagatgacatttcatcagccaaagcctatgcatctgacatcagagaggtctactatagtgaggatgtaattgatgtgcctgtggatatgatagagggaaaatgtgaggttagaaagaagaacgatcttgcaagttcagaccttccagtgatgtttgaacatgtatttttctgtgaacttatatatgaccgtgccagtggagctctcaagcagttgcctccaaatgttaggtttatgtctatggtgcaaaggacaagtgcgttgaaaaagaacaaaggaaagcagatctgtgagcctgatcaaatagattcaggtaaatggttggatgtgcctaaagagaaccgtctagctactcttgacatttttgctggctgtggaggtttatcagaagggctgcagcaagctggtgtatcttttacaaaatgggcgattgaatacgaagagcctgctggtgaagcatttaataaaaatcatccagaggctgtggtctttgtagataactgcaatgtgattctaaaggcaattatggataaatgtggggatactgatgattgtgtttcaacttctgaagctgctgaacaagcagcaaaacttccagaagtgaacattaataatcttccagtccctggcgaagttgaattcataaatggtggtcctccgtgtcagggattctctgggatgaatagattcaaccaaagcccatggagtaaagttcagtgtgagatgattctagcattcctctcattcgctgagtatttccgtcccagattctttctgttagaaaatgttcggaactttgtttccttcaacaaagggcagaccttccgtttggcagttgcatctcttctggagatgggataccaggtccggtttggaattctagaagcaggggcttttggtgttgcccagtccaggaaaagggcgtttatttgggctgctgcacctggagagatgcttcctgattggccagagccgatgcatgtgtttgctagccctgagctgaagataacactgcctgatggccaatactatgcagctgcaagaagcactgctggtggagcgcctttccgagcgattactgttagagatacaattggggatctgcctaaagtgggaaatggtgccagcaaactcacgcttgagtatggaggtgagcccgtgtcttggttccagaagaagataagagggaatatgatggtactgaatgatcacatatctaaggagatgaatgagctgaacctaataaggtgccaacacattccgaaacggccgggttgtgattggcatgacctaccggacgagaaggttaagctgtcaaatgggcagatggctgacctgataccttggtgcctgcccaacacagccaagaggcacaatcagtggaaaggactgtacgggaggctggactgggaaggcaacttccccacatccgtcactgatccccagccaatgggcaaggtcggcatgtgcttccaccctgatcaagacaggatcatcacagtccgggaatgtgctcggtcacagggctttcctgacagctatgaatttgcgggcaacatccagaacaagcaccggcagattggcaatgccgtgcccccgcctcttgcctatgcacttgggaggaagctgaaggaagccgttgacaagcgtcaggaagccagcgcaggcgtgcctgcaccatgagaagttttccttccatcaaaccatgacccatgaagctaagcgctgaggtcgtccttgaggaccagttaattttggttttatcagtcttaatgcactcctgaatgtatatgttagagaagtgtcgattgctgattgttaccctgattcagggtagcggttatatctaaaaacttgagaaaatctagtgtactctagttgtcatgtgttccattttgttggctctaaactttcaactagttttggtgattaatgacaacatgagattaaattaaattttgtagaggcatttaaattaggccactaatagtgactatttagtcgctcaatttttttgcccctaattatggaatttgttttttaaaggatgaacaacaagattaaatggattagttcaagtgtcgattggggctaagactatccgtagcggttttttctaactttttctctatgtgccacctttatatcatgtcatactagcaattctaattaattgattaagggtatc

SEQ ID NO: 68038 - DNA, 5240 bp, Zea Mays
caaaaccccctcggttcgaccccctttccgcccgcctgcttgtcgagttgctccaccccggcccccgcgcacgcgcctcccgtgccgccccggcgccgccgcgtccggtgacatggtgaaaactccgagatctcctgttaccacaggaacaagaagatgcagagcaaagccacaaaagaaggaagaggaatccacagaaaacaacaagctggagaatggatctctggatgcaacagaagaggtgcatcatggagtcgaaaaaggtgatggacatgttacccgcaagagaccaaggagatcagcggcctgttctgatttcaaagagaaatccatacgcttatccgaaaaaaaatctgttgtcatggtcaagaagaatcggatggaggaggaagaagtagatgctgtcaatctgacaaaacttggaccagaagatccaccaccttgccggaagttgatcgattttatcttgcatgatgcagaagggaacccacaaccctttgaaatgtcagaaattgatgacttctttataacagctcttatcatgcccatggatgatgatctagaaaaagagcgtgaaagaggagtacgctgtgaaggatttgggcgaattgaggactggaatatttctggttatgatgaaggtactcctgtaatctgggtgtcaactgatgttgctgactatgaatgtgtgaaaccatcaaccaattacaaatcttattttgaccacttctatgagaaggctcaggtgtgtgttgaagttttcaaaaagcttgcaaaatcagttggtgggaatcctaaccagggcctggatgaattgcttgctagtgttgttcggtcaaccaatgccatgaaaggatatagtggaaccatgagcaaagatttggtgatatccattggagaatttgtatacaatcaacttgttggtttggatgagacatcaaacaatgatgatgaaaagtttgctaccctgccagttcttctttctctaagagaccagtgcagatctagggtggaactgaccaagttgccctctaacttctcgaacacaagtctgaaaattaaggactcagagtgtgatgagacagcagaagacgatgatgatgcaaaattagctagattacttcaacaagaagaagaatggaaaatgatgaagaaacagaggggtaggcgtggaacaccatcccagaaaaatgtctacataaaaatcagtgaagctgagattgccaatgactatccccttcctgcatactataagccatttagccaggaaatggatgaatacatatttgatagtgatgacagcatattttctgatgatgtgccagttaggatactcaataactggacactgtacaatgcagattccaggcttatatctttggaattgatccctatgaaatcaggggcagaaaatgatgtggttatctttggatctggtttcatgagagatgatgatggcagttgctgttctacagctgagtctgtgaaatcttcgtcttcctccagcaaagctgaccaactggatgcaggaatccctatttatttgagcccaatcaaagaatggattatagagtttggtggctcaatgatttgtataaccattcggactgatgtggcctggtacaagctacgccaaccaacaaaacaatatgctccatggtgtgagcctgtactgaaaacagcaaggcttgctgttagcatcattaccctgttgaaagagcagagtcgtgcctcaaagctttcttttgctgatgtcataagaaaagtagctgaatttgacaaaggaaaccctgcatttatatcttcaaacatcacacttgttgagagatatattgtggtgcatggacagataatactccagcagtttgcagattttccagatgagactatccgtcggagtgcatttgtcagtggtcttttattgaagatggaacagaggaggcatacaaagttagttatgaagaaaaaaactcaagtgatgaggggagagaatctgaatccaagtgcagcaatgggtccagcatcgaggaaaaaagcaatgcgtgcaacaacaaccaggctcatcaacagaatctggagtgattactatgcacatcatttccctgaagattccaaggagggagatggaaatgaaacaaaagaaattgatgatgaacaagaagaaaatgaagatgaggatgctgaagatgaagggcagattgaagagaacatctcaaagactcctccatcaacacggtcccggaagttgctatcacaaacttgtaaggaaatcagatgggaaggtgaaacatctgggaaaacattgtctggagaaactctatataaatgtgcttatgttagggaactcagaatacctgttggtggaacagtggctctagaagatgattcaggagacacagtcatttgttttgttgagtacatgttccagaaagttgatggttcaaaaatggttcatgggaggattctgcaaaaaggttcacagacaattcttggcaatgcggcaaatgagagggaggttttcttaactaatgactgcttagaattcaaattagatgacatcaaggaattggtaatggttgatatccaatcaaggccttggggtcacaagtacagaaaagagaattctgaagctgataaagttgagcaggtcaaagcagaagagagaaagaaaaagggccagcccatggtatatttctgcaaaagcttgtactggcctgagaagggtgccttctttgccctctcccgagataaaatgggtcttggtagtggtttatgtagttcttgtgataatatagagccagattctgatgaattgaaaatattctcgaagaccagctttgtctacagaaaggttacatataatgtcaatgagtttttatacataagacctgatttttttgctgaagatgaggatcgtgcaaccttcaaggctggccgaaatgtgggtctaaagccctatgcagtttgtcaaatattgtccatccctgaaggggctggatctaaaaaactcaatccagcatcagcaaatatcagtgctagaagattttacagaccagatgacatttcatcagccaaagcctatgcatctgacatcagagaggtctactatagtgaggatgtaattgatgtgcctgtggatatgatagagggaaaatgtgaggttagaaagaagaacgatcttgcaagttcagaccttccagtgatgtttgaacatgtatttttctgtgaacttatatatgaccgtgccagtggagctctcaagcagttgcctccaaatgttaggtttatgtctatggtgcaaaggacaagtgcgttgaaaaagaacaaaggaaagcagatctgtgagcctgatcaaatagattcaggtaaatggttggatgtgcctaaagagaaccgtctagctactcttgacatttttgctggctgtggaggtttatcagaagggctgcagcaagctggtgtatcttttacaaaatgggcgattgaatacgaagagcctgctggtgaagcatttaataaaaatcatccagaggctgtggtctttgtagataactgcaatgtgattctaaaggcaattatggataaatgtggggatactgatgattgtgtttcaacttctgaagctgctgaacaagcagcaaaacttccagaagtgaacattaataatcttccagtccctggcgaagttgaattcataaatggtggtcctccgtgtcagggattctctgggatgaatagattcaaccaaagcccatggagtaaagttcagtgtgagatgattctagcattcctctcattcgctgagtatttccgtcccagattctttctgttagaaaatgttcggaactttgtttccttcaacaaagggcagaccttccgtttggcagttgcatctcttctggagatgggataccaggtccggtttggaattctagaagcaggggcttttggtgttgcccagtccaggaaaagggcgtttatttgggctgctgcacctggagagatgcttcctgattggccagagccgatgcatgtgtttgctagccctgagctgaagataacactgcctgatggccaatactatgcagctgcaagaagcactgctggtggagcgcctttccgagcgattactgttagagatacaattggggatctgcctaaagtgggaaatggtgccagcaaactcacgcttgagtatggaggtgagcccgtgtcttggttccagaagaagataagagggaatatgatggtactgaatgatcacatatctaaggagatgaatgagctgaacctaataaggtgccaacacattccgaaacggccgggttgtgattggcatgacctaccggacgagaaggttaagctgtcaaatgggcagatggctgacctgataccttggtgcctgcccaacacagccaagaggcacaatcagtggaaaggactgtacgggaggctggactgggaaggcaacttccccacatccgtcactgatccccagccaatgggcaaggtcggcatgtgcttccaccctgatcaagacaggatcatcacagtccgggaatgtgctcggtcacagggctttcctgacagctatgaatttgcgggcaacatccagaacaagcaccggcagattggcaatgccgtgcccccgcctcttgcctatgcacttgggaggaagctgaaggaagccgttgacaagcgtcaggaagccagcgcaggcgtgcctgcaccatgagaagttttccttccatcaaaccatgacccatgaagctaagcgctgaggtcgtccttgaggaccagttaattttggttttatcagtcttaatgcactcctgaatgtatatgttagagaagtgtcgattgctgattgttaccctgattcagggtagcggttatatctaaaaacttgagaaaatctagtgtactctagttgtcatgtgttccattttgttggctctaaactttcaactagttttggtgattaatgacaacatgagattaaattaaattttgtagaggcatttaaattaggccactaatagtgactatttagtcgctcaatttttttgcccctaattatggaatttgttttttaaaggatgaacaacaagattaaatggattagttcaagtgtcgattggggctaagactatccgtagcggttttttctaactttttctctatgtgccacctttatatcatgtcatactagcaattctaattaattgattaagggtatc

SEQ ID NO: 68039 - DNA, 5679 bp, Zea Mays
tccaaaaccccctcggttcgaccccctttccgcccgcctgcttgtcgagttgctccaccccggcccccgcgcacgcgcctcccgtgccgccccggcgccgccgcgtccgagcagcagatttttgcgtgggggattcctgttcttccccatcaattgcttgctgcgccagtatcccagcactaattgccttcagctgggtgacatggtgaaaactccgagatctcctgttaccacaggttggtgatgtggccgtctcacatggaatttccctacattgcttgccttatcttgattagatctagcacttatggccattctaggtgcagcaggaggcaatgacaaagcttcaaagtgtggttgtgatattgacaatggtgaggctgggccatcattggtggtggtggagcaacaagcactagccactttgtagcaaacatgtggtcactagcatggtcatttgacttaatcattaactagacaatacactgacgaatgaaccagtgtaacatttaaatggaagtttattatcacacatgcagagtattgtgatgcaaatacatgtatgtttcttgcaacaaccacaaggaacaagaagatgcagagcaaagccacaaaagaaggaagaggaatccacagaaaacaacaagctggagaatggatctctggatgcaacagaagaggtgcatcatggagtcgaaaaaggtgatggacatgttacccgcaagagaccaaggagatcagcggcctgttctgatttcaaagagaaatccatacgcttatccgaaaaaaaatctgttgtcatggtcaagaagaatcggatggaggaggaagaagtagatgctgtcaatctgacaaaacttggaccagaagatccaccaccttgccggaagttgatcgattttatcttgcatgatgcagaagggaacccacaaccctttgaaatgtcagaaattgatgacttctttataacagctcttatcatgcccatggatgatgatctagaaaaagagcgtgaaagaggagtacgctgtgaaggatttgggcgaattgaggactggaatatttctggttatgatgaaggtactcctgtaatctgggtgtcaactgatgttgctgactatgaatgtgtgaaaccatcaaccaattacaaatcttattttgaccacttctatgagaaggctcaggtgtgtgttgaagttttcaaaaagcttgcaaaatcagttggtgggaatcctaaccagggcctggatgaattgcttgctagtgttgttcggtcaaccaatgccatgaaaggatatagtggaaccatgagcaaagatttggtgatatccattggagaatttgtatacaatcaacttgttggtttggatgagacatcaaacaatgatgatgaaaagtttgctaccctgccagttcttctttctctaagagaccagtgcagatctagggtggaactgaccaagttgccctctaacttctcgaacacaagtctgaaaattaaggactcagagtgtgatgagacagcagaagacgatgatgatgcaaaattagctagattacttcaacaagaagaagaatggaaaatgatgaagaaacagaggggtaggcgtggaacaccatcccagaaaaatgtctacataaaaatcagtgaagctgagattgccaatgactatccccttcctgcatactataagccatttagccaggaaatggatgaatacatatttgatagtgatgacagcatattttctgatgatgtgccagttaggatactcaataactggacactgtacaatgcagattccaggcttatatctttggaattgatccctatgaaatcaggggcagaaaatgatgtggttatctttggatctggtttcatgagagatgatgatggcagttgctgttctacagctgagtctgtgaaatcttcgtcttcctccagcaaagctgaccaactggatgcaggaatccctatttatttgagcccaatcaaagaatggattatagagtttggtggctcaatgatttgtataaccattcggactgatgtggcctggtacaagctacgccaaccaacaaaacaatatgctccatggtgtgagcctgtactgaaaacagcaaggcttgctgttagcatcattaccctgttgaaagagcagagtcgtgcctcaaagctttcttttgctgatgtcataagaaaagtagctgaatttgacaaaggaaaccctgcatttatatcttcaaacatcacacttgttgagagatatattgtggtgcatggacagataatactccagcagtttgcagattttccagatgagactatccgtcggagtgcatttgtcagtggtcttttattgaagatggaacagaggaggcatacaaagttagttatgaagaaaaaaactcaagtgatgaggggagagaatctgaatccaagtgcagcaatgggtccagcatcgaggaaaaaagcaatgcgtgcaacaacaaccaggctcatcaacagaatctggagtgattactatgcacatcatttccctgaagattccaaggagggagatggaaatgaaacaaaagaaattgatgatgaacaagaagaaaatgaagatgaggatgctgaagatgaagggcagattgaagagaacatctcaaagactcctccatcaacacggtcccggaagttgctatcacaaacttgtaaggaaatcagatgggaaggtgaaacatctgggaaaacattgtctggagaaactctatataaatgtgcttatgttagggaactcagaatacctgttggtggaacagtggctctagaagatgattcaggagacacagtcatttgttttgttgagtacatgttccagaaagttgatggttcaaaaatggttcatgggaggattctgcaaaaaggttcacagacaattcttggcaatgcggcaaatgagagggaggttttcttaactaatgactgcttagaattcaaattagatgacatcaaggaattggtaatggttgatatccaatcaaggccttggggtcacaagtacagaaaagagaattctgaagctgataaagttgagcaggtcaaagcagaagagagaaagaaaaagggccagcccatggtatatttctgcaaaagcttgtactggcctgagaagggtgccttctttgccctctcccgagataaaatgggtcttggtagtggtttatgtagttcttgtgataatatagagccagattctgatgaattgaaaatattctcgaagaccagctttgtctacagaaaggttacatataatgtcaatgagtttttatacataagacctgatttttttgctgaagatgaggatcgtgcaaccttcaaggctggccgaaatgtgggtctaaagccctatgcagtttgtcaaatattgtccatccctgaaggggctggatctaaaaaactcaatccagcatcagcaaatatcagtgctagaagattttacagaccagatgacatttcatcagccaaagcctatgcatctgacatcagagaggtctactatagtgaggatgtaattgatgtgcctgtggatatgatagagggaaaatgtgaggttagaaagaagaacgatcttgcaagttcagaccttccagtgatgtttgaacatgtatttttctgtgaacttatatatgaccgtgccagtggagctctcaagcagttgcctccaaatgttaggtttatgtctatggtgcaaaggacaagtgcgttgaaaaagaacaaaggaaagcagatctgtgagcctgatcaaatagattcaggtaaatggttggatgtgcctaaagagaaccgtctagctactcttgacatttttgctggctgtggaggtttatcagaagggctgcagcaagctggtgtatcttttacaaaatgggcgattgaatacgaagagcctgctggtgaagcatttaataaaaatcatccagaggctgtggtctttgtagataactgcaatgtgattctaaaggcaattatggataaatgtggggatactgatgattgtgtttcaacttctgaagctgctgaacaagcagcaaaacttccagaagtgaacattaataatcttccagtccctggcgaagttgaattcataaatggtggtcctccgtgtcagggattctctgggatgaatagattcaaccaaagcccatggagtaaagttcagtgtgagatgattctagcattcctctcattcgctgagtatttccgtcccagattctttctgttagaaaatgttcggaactttgtttccttcaacaaagggcagaccttccgtttggcagttgcatctcttctggagatgggataccaggtccggtttggaattctagaagcaggggcttttggtgttgcccagtccaggaaaagggcgtttatttgggctgctgcacctggagagatgcttcctgattggccagagccgatgcatgtgtttgctagccctgagctgaagataacactgcctgatggccaatactatgcagctgcaagaagcactgctggtggagcgcctttccgagcgattactgttagagatacaattggggatctgcctaaagtgggaaatggtgccagcaaactcacgcttgagtatggaggtgagcccgtgtcttggttccagaagaagataagagggaatatgatggtactgaatgatcacatatctaaggagatgaatgagctgaacctaataaggtgccaacacattccgaaacggccgggttgtgattggcatgacctaccggacgagaaggttaagctgtcaaatgggcagatggctgacctgataccttggtgcctgcccaacacagccaagaggcacaatcagtggaaaggactgtacgggaggctggactgggaaggcaacttccccacatccgtcactgatccccagccaatgggcaaggtcggcatgtgcttccaccctgatcaagacaggatcatcacagtccgggaatgtgctcggtcacagggctttcctgacagctatgaatttgcgggcaacatccagaacaagcaccggcagattggcaatgccgtgcccccgcctcttgcctatgcacttgggaggaagctgaaggaagccgttgacaagcgtcaggaagccagcgcaggcgtgcctgcaccatgagaagttttccttccatcaaaccatgacccatgaagctaagcgctgaggtcgtccttgaggaccagttaattttggttttatcagtcttaatgcactcctgaatgtatatgttagagaagtgtcgattgctgattgttaccctgattcagggtagcggttatatctaaaaacttgagaaaatctagtgtactctagttgtcatgtgttccattttgttggctctaaactttcaactagttttggtgattaatgacaacatgagattaaattaaattttgtagaggcatttaaattaggccactaatagtgactatttagtcgctcaatttttttgcccctaattatggaatttgttttttaaaggatgaacaacaagattaaatggattagttcaagtgtcgattggggctaagactatccgtagcggttttttctaactttttctctatgtgccacctttatatcatgtcatactagcaattctaattaattgattaagggtatc

SEQ ID NO: 68040 - DNA, 5577 bp, Zea Mays
aaaaagagaaccgggaagcaggagcggcaaggggccctgcttgggtggcggccagcgcgcccgtgggaaccgggaattttttgggttttcggggcccccgcgctcgtttcccgccaaaagcctccgcccagccccgcctctccacgtgctcctcgcctcgccgccgcggccacagccgagaggccgagaccaaaaccccaaacgcgggatgacagcctgaccggagcgcgctataaaacgcctctcgtccaaaaccccctcggttcgaccccctttccgcccgcctgcttgtcgagttgctccaccccggcccccgcgcacgcgcctcccgtgccgccccggcgccgccgcgtccgagcagcagatttttgcgtgggggattcctgttcttccccatcaattgcttgctgcgccagtatcccagcactaattgccttcagctgggtgacatggtgaaaactccgagatctcctgttaccacaggaacaagaagatgcagagcaaagccacaaaagaaggaagaggaatccacagaaaacaacaagctggagaatggatctctggatgcaacagaagaggtgcatcatggagtcgaaaaaggtgatggacatgttacccgcaagagaccaaggagatcagcggcctgttctgatttcaaagagaaatccatacgcttatccgaaaaaaaatctgttgtcatggtcaagaagaatcggatggaggaggaagaagtagatgctgtcaatctgacaaaacttggaccagaagatccaccaccttgccggaagttgatcgattttatcttgcatgatgcagaagggaacccacaaccctttgaaatgtcagaaattgatgacttctttataacagctcttatcatgcccatggatgatgatctagaaaaagagcgtgaaagaggagtacgctgtgaaggatttgggcgaattgaggactggaatatttctggttatgatgaaggtactcctgtaatctgggtgtcaactgatgttgctgactatgaatgtgtgaaaccatcaaccaattacaaatcttattttgaccacttctatgagaaggctcaggtgtgtgttgaagttttcaaaaagcttgcaaaatcagttggtgggaatcctaaccagggcctggatgaattgcttgctagtgttgttcggtcaaccaatgccatgaaaggatatagtggaaccatgagcaaagatttggtgatatccattggagaatttgtatacaatcaacttgttggtttggatgagacatcaaacaatgatgatgaaaagtttgctaccctgccagttcttctttctctaagagaccagtgcagatctagggtggaactgaccaagttgccctctaacttctcgaacacaagtctgaaaattaaggactcagagtgtgatgagacagcagaagacgatgatgatgcaaaattagctagattacttcaacaagaagaagaatggaaaatgatgaagaaacagaggggtaggcgtggaacaccatcccagaaaaatgtctacataaaaatcagtgaagctgagattgccaatgactatccccttcctgcatactataagccatttagccaggaaatggatgaatacatatttgatagtgatgacagcatattttctgatgatgtgccagttaggatactcaataactggacactgtacaatgcagattccaggcttatatctttggaattgatccctatgaaatcaggggcagaaaatgatgtggttatctttggatctggtttcatgagagatgatgatggcagttgctgttctacagctgagtctgtgaaatcttcgtcttcctccagcaaagctgaccaactggatgcaggaatccctatttatttgagcccaatcaaagaatggattatagagtttggtggctcaatgatttgtataaccattcggactgatgtggcctggtacaagctacgccaaccaacaaaacaatatgctccatggtgtgagcctgtactgaaaacagcaaggcttgctgttagcatcattaccctgttgaaagagcagagtcgtgcctcaaagctttcttttgctgatgtcataagaaaagtagctgaatttgacaaaggaaaccctgcatttatatcttcaaacatcacacttgttgagagatatattgtggtgcatggacagataatactccagcagtttgcagattttccagatgagactatccgtcggagtgcatttgtcagtggtcttttattgaagatggaacagaggaggcatacaaagttagttatgaagaaaaaaactcaagtgatgaggggagagaatctgaatccaagtgcagcaatgggtccagcatcgaggaaaaaagcaatgcgtgcaacaacaaccaggctcatcaacagaatctggagtgattactatgcacatcatttccctgaagattccaaggagggagatggaaatgaaacaaaagaaattgatgatgaacaagaagaaaatgaagatgaggatgctgaagatgaagggcagattgaagagaacatctcaaagactcctccatcaacacggtcccggaagttgctatcacaaacttgtaaggaaatcagatgggaaggtgaaacatctgggaaaacattgtctggagaaactctatataaatgtgcttatgttagggaactcagaatacctgttggtggaacagtggctctagaagatgattcaggagacacagtcatttgttttgttgagtacatgttccagaaagttgatggttcaaaaatggttcatgggaggattctgcaaaaaggttcacagacaattcttggcaatgcggcaaatgagagggaggttttcttaactaatgactgcttagaattcaaattagatgacatcaaggaattggtaatggttgatatccaatcaaggccttggggtcacaagtacagaaaagagaattctgaagctgataaagttgagcaggtcaaagcagaagagagaaagaaaaagggccagcccatggtatatttctgcaaaagcttgtactggcctgagaagggtgccttctttgccctctcccgagataaaatgggtcttggtagtggtttatgtagttcttgtgataatatagagccagattctgatgaattgaaaatattctcgaagaccagctttgtctacagaaaggttacatataatgtcaatgagtttttatacataagacctgatttttttgctgaagatgaggatcgtgcaaccttcaaggctggccgaaatgtgggtctaaagccctatgcagtttgtcaaatattgtccatccctgaaggggctggatctaaaaaactcaatccagcatcagcaaatatcagtgctagaagattttacagaccagatgacatttcatcagccaaagcctatgcatctgacatcagagaggtctactatagtgaggatgtaattgatgtgcctgtggatatgatagagggaaaatgtgaggttagaaagaagaacgatcttgcaagttcagaccttccagtgatgtttgaacatgtatttttctgtgaacttatatatgaccgtgccagtggagctctcaagcagttgcctccaaatgttaggtttatgtctatggtgcaaaggacaagtgcgttgaaaaagaacaaaggaaagcagatctgtgagcctgatcaaatagattcaggtaaatggttggatgtgcctaaagagaaccgtctagctactcttgacatttttgctggctgtggaggtttatcagaagggctgcagcaagctggtgtatcttttacaaaatgggcgattgaatacgaagagcctgctggtgaagcatttaataaaaatcatccagaggctgtggtctttgtagataactgcaatgtgattctaaaggcaattatggataaatgtggggatactgatgattgtgtttcaacttctgaagctgctgaacaagcagcaaaacttccagaagtgaacattaataatcttccagtccctggcgaagttgaattcataaatggtggtcctccgtgtcagggattctctgggatgaatagattcaaccaaagcccatggagtaaagttcagtgtgagatgattctagcattcctctcattcgctgagtatttccgtcccagattctttctgttagaaaatgttcggaactttgtttccttcaacaaagggcagaccttccgtttggcagttgcatctcttctggagatgggataccaggtccggtttggaattctagaagcaggggcttttggtgttgcccagtccaggaaaagggcgtttatttgggctgctgcacctggagagatgcttcctgattggccagagccgatgcatgtgtttgctagccctgagctgaagataacactgcctgatggccaatactatgcagctgcaagaagcactgctggtggagcgcctttccgagcgattactgttagagatacaattggggatctgcctaaagtgggaaatggtgccagcaaactcacgcttgagtatggaggtgagcccgtgtcttggttccagaagaagataagagggaatatgatggtactgaatgatcacatatctaaggagatgaatgagctgaacctaataaggtgccaacacattccgaaacggccgggttgtgattggcatgacctaccggacgagaaggttaagctgtcaaatgggcagatggctgacctgataccttggtgcctgcccaacacagccaagaggcacaatcagtggaaaggactgtacgggaggctggactgggaaggcaacttccccacatccgtcactgatccccagccaatgggcaaggtcggcatgtgcttccaccctgatcaagacaggatcatcacagtccgggaatgtgctcggtcacagggctttcctgacagctatgaatttgcgggcaacatccagaacaagcaccggcagattggcaatgccgtgcccccgcctcttgcctatgcacttgggaggaagctgaaggaagccgttgacaagcgtcaggaagccagcgcaggcgtgcctgcaccatgagaagttttccttccatcaaaccatgacccatgaagctaagcgctgaggtcgtccttgaggaccagttaattttggttttatcagtcttaatgcactcctgaatgtatatgttagagaagtgtcgattgctgattgttaccctgattcagggtagcggttatatctaaaaacttgagaaaatctagtgtactctagttgtcatgtgttccattttgttggctctaaactttcaactagttttggtgattaatgacaacatgagattaaattaaattttgtagaggcatttaaattaggccactaatagtgactatttagtcgctcaatttttttgcccctaattatggaatttgttttttaaaggatgaacaacaagattaaatggattagttcaagtgtcgattggggctaagactatccgtagcggttttttctaactttttctctatgtgccacctttatatcatgtcatactagcaattctaattaattgattaagggtatc

SEQ ID NO: 68041 - DNA, 1223 bp, Zea Mays
ctttgggtattggccaggttatgatataaccttatttatcagacagttagccagttaaaagttgaagagtgacagtttgacggacaacatactcttggttgttatgtgcagtggactcttgctacagacctgcaaaacctggcaatggagttcaaaaaaagcagtcatcatgtttaaagcatttcgcatacaaaacaagttatcttatgttgtcatcagataactaggtgttgatagaatgcttgtccaaccttgtattgtgtgctttgttggtgaatacctttgcagggtcaggatagtgttgtttggaaatgaatataaatggtcggtgtctacatttggatacagtgagttgagaatgtggtatgtttatttgttcttgtgcatacctgatttttttggtcttttatttctacatattagatattagcatgagaagtttgtatatctgtatagtaacttatgtcagatctaatgtactatgagtcattctttattagatattgagatattacctgcatgttagacatcagtgtgtgagacttttatgtggcttttcccctttccttgtacaaatcctatagtaggcttttatgtggcacaaacctgcagtaagatgcgccttattcccttttgctttgtaatctgcttgttattaatatgcctcgttgactacacagttcagcctaaatccccaaccattatagaagatgttctggacttctacgtctaaagttaactaacggtctaggatctgcttccatttacacttttttacttcaagagagtaagtagttgccagagcactttttccacatatttgtggataataagtagacatcaaactagatcacctggacaacagagaataaggtggcataactttagcaaaaaaatagctaaagttatgattctctttatgaattttcatagagattgtgatgtcaaatatctaagaagaaacgcatggaaaacttctatattgatagagtagtttcgttgcagaaaaaaaatactatattgaaacgtgtttgaggcgagaggcatatctttgctttctgaagtcctgttttctaccataggttgggttgtactaatgttcagaagatgcatcctactgcaggttgggttgggttcttttggatgacatatagtgttgggttgtgcagttcaaacactctttcatttttcttaagtgctctttacttttgatctttgtgatg

SEQ ID NO: 68042 - DNA, 159 bp, Zea Mays
gctagttcatctatgagcataactaaattgaacctgatgatattaaccttagatggtatcaaaggatgacattggggatttggactgtcttcgcattggtgttgtttttacattttttcatcatgttagaatttagtgtttaggaggatttatgggcgg

SEQ ID NO: 68043 - DNA, 3009 bp, Zea Mays
  misc_feature (3009)..(3009): n is a, c, g, or t
agggcgccgcccctcccgcctgggtgcgtcgtcgcgctcacgccccacgccgggtagctttaacctccggcgccggctcggtatatcgccgcccatcccccaccctcaccccagacgccggctcggcagatcaccgcccctcccactgggcaagccgttgtgtgcacgccccacccgcgtagcttcacccccggcaccggctcagcagctcaccggccccacccgcatagcttcaccccctgcacgtggctcagcaggtcactgcagtgcccctgagacccggtgccgtcctgttggatcgaagcttctagatgacgccagatggacagcagaagcccaatcccctccatcgcttcatcccgttgagttgcatatgccaccagaagccccatcccctccctcgctcaagtggcatcgcgactctgcggtaagggcggcagctcatccacagcgatgacggtgacgtcggggacgcgggaggtggcatcagggacgtgctgtccgaaaaggtgcagggcgtcattgagcgtatgatcgaagtcatgcgtagggtagggacccaggcgtcaacctctccgcccgcagattgacgtcccgctccgggtatgtctgattcttcgattcgccttgggagttctgttactggcattcaatcatcgatgacacccaattaatcatggaattgcatattattgttctcgaggatacataggagtacatctatgcaccgccgcccattaagcatttggtcacgccctgtgcttttccttggagatagatcattatcaatcccaataacaattaaaagaactgtggtgttctttgatggatgtctcatgtacacagtagaacaattgatgccagtgttgagatgttgaagtttcaggcctagactgaaatgggagcgccattaaggatctaatgtaccacatgatgattcaatggatttgcgcaataatttacaaggacctgcgtcaatccatttccaaacttctaagtgtactgtccgcatctttcacaagtaagttcatagacaatattttacttttgcacaaaaaaacatgaatgtgtgctattgtttgataagctttcaatgttgctaatccaattatcgtttccgcaagccgtttaagtgctgctttggaagtaattttagcatcggaattataattttgcacaaaaaaaggttgcatgctaatgatacatcatctgtcaattttgctactctagctgctgtcattacaaaccatgttgtcattacaaaccgtttaggtgttgtttggagacagatttgtacttttgaagtagaacaattgcttgcagctaaaacattatctgcagacgcaaaaattaataagctaaaaatattattcatcgtaaacactaatccgtttgcacacataccttctataaccaatatacagtttgcacctaaaaatcttattcatcataatcagaaatccgcttgcatacatactaaaatttgcggcccatatttttacttgagagatgtctagcttcatgtgttccttctatatgaaatatacaatttgtatatcatatttgaacaaacattagaaggaacacagatttgcttaaaaaaagatacctagacatataattgcttagattttagtcatcgagctatttcaatactcttctgttttaacacctgcagacatgattacacaacaactgattctcatattattttttcctcggtacatatgatctgtacaattcttgaaacaatgttttctactgcaaaaaattagctgttccattgaggaatgaatttattaacaagacaccaatcaaattagtcatcaagctgtttcaatactcttctgttttaacacctgcagacatgattacacaacaactgattctcatattattttttcctcggtacatatgatctgtacaattcttgaaacaatgtttttgtactacaaaaagttagctgttccattgaggaatgaatttattaacaagacaccaatcaaatatttttttaaagatataacccatttctaactctttcaaaaaaaagtatgctccaccgttacagtaacataaaacagccaccattactctccaaaacacctttttagattcaaaaggttagtattacaacctccttccttaaacacctctaacagcccggagaaattaccaattaacaggtagtatttgttaattgttgcgctcatattttagtgcctaatagatgcctgacgaaatgcctagatgctatgattttctcccagattctgagtttctgaatttaggtgctgcatttctaaatatttgagtttgcatacgtgctatgatttactcccagattctagcaaggggtgatattgttgaagtagatacatggattagtgctaatggtaaaaatggaatgcgtagacattggcatgtacatgattctataacaggccatacaatactgaaggtgacaaggttcaaatctacgtcgtgctcttatgtttatatctttaatcaattttattagcaatttaattctaccaactgccatgttagtgttacgattgacacaacacttatagtttctctgctaaaaaacaacaaatcttctaggtgcaccaccggcaccctggatcattattgttattttttggtgtcctcttgctcctattatcctataattcatctgcttgataatctcttttttgtataatgaggttttattggcattttaaggtttaccactgtctacaacacacaagtttggattatatcttgtgtctcataagcagtttggcaataaaaggaagtatcttcataggagaaccgccccatttccatactatgcaacaccaatggacatggttgtttaagtatatgttttttcttttttcttctgcttaatatataatggggcgcagttctcctgcgcgtctaaaaaaataacacatggtcttttaaacccgggttgtcaataatagtcctctggcgcaatgtttttgtagggcttggagn

SEQ ID NO: 68044 - DNA, 3204 bp, Zea Mays
  misc_feature (3204)..(3204): n is a, c, g, or t
agggcgccgcccctcccgcctgggtgcgtcgtcgcgctcacgccccacgccgggtagctttaacctccggcgccggctcggtatatcgccgcccatcccccaccctcaccccagacgccggctcggcagatcaccgcccctcccactgggcaagccgttgtgtgcacgccccacccgcgtagcttcacccccggcaccggctcagcagctcaccggccccacccgcatagcttcaccccctgcacgtggctcagcaggtcactgcagtgcccctgagacccggtgccgtcctgttggatcgaagcttctagatgacgccagatggacagcagaagcccaatcccctccatcgcttcatcccgttgagttgcatatgccaccagaagccccatcccctccctcgctcaagtggcatcgcgactctgcggtaagggcggcagctcatccacagcgatgacggtgacgtcggggacgcgggaggtggcatcagggacgtgctgtccgaaaaggtgcagggcgtcattgagcgtatgatcgaagtcatgcgtagggtagggacccaggcgtcaacctctccgcccgcagattgacgtcccgctccgggtatgtctgattcttcgattcgccttgggagttctgttactggcattcaatcatcgatgacacccaattaatcatggaattgcatattattgttctcgaggatacataggagtacatctatgcaccgccgcccattaagcatttggtcacgccctgtgcttttccttggagatagatcattatcaatcccaataacaattaaaagaactgtggtgttctttgatggatgtctcatgtacacagtagaacaattggtactttgtatatgaaaatacttttattctatgaatacaacagcggtaccaaattgtgttatgtatgatgatctcatgcttctcttccctagatgccagtgttgagatgttgaagtttcaggcctagactgaaatgggagcgccattaagtttacaggatctaatgtaccacatgatgattcaatggatttgcgcaatgtaatttggctatctcctttgccatcaaatggatctttggacttctgtgtcgtgagctattatccaaagcattaacttcaaacattaacttccacaaatttacaaggacctgcgtcaatccatttccaaacttctaagtgtactgtccgcatctttcacaagtaagttcatagacaatattttacttttgcacaaaaaaacatgaatgtgtgctattgtttgataagctttcaatgttgctaatccaattatcgtttccgcaagccgtttaagtgctgctttggaagtaattttagcatcggaattataattttgcacaaaaaaaggttgcatgctaatgatacatcatctgtcaattttgctactctagctgctgtcattacaaaccatgttgtcattacaaaccgtttaggtgttgtttggagacagatttgtacttttgaagtagaacaattgcttgcagctaaaacattatctgcagacgcaaaaattaataagctaaaaatattattcatcgtaaacactaatccgtttgcacacataccttctataaccaatatacagtttgcacctaaaaatcttattcatcataatcagaaatccgcttgcatacatactaaaatttgcggcccatatttttacttgagagatgtctagcttcatgtgttccttctatatgaaatatacaatttgtatatcatatttgaacaaacattagaaggaacacagatttgcttaaaaaaagatacctagacatataattgcttagattttagtcatcgagctatttcaatactcttctgttttaacacctgcagacatgattacacaacaactgattctcatattattttttcctcggtacatatgatctgtacaattcttgaaacaatgttttctactgcaaaaaattagctgttccattgaggaatgaatttattaacaagacaccaatcaaattagtcatcaagctgtttcaatactcttctgttttaacacctgcagacatgattacacaacaactgattctcatattattttttcctcggtacatatgatctgtacaattcttgaaacaatgtttttgtactacaaaaagttagctgttccattgaggaatgaatttattaacaagacaccaatcaaatatttttttaaagatataacccatttctaactctttcaaaaaaaagtatgctccaccgttacagtaacataaaacagccaccattactctccaaaacacctttttagattcaaaaggttagtattacaacctccttccttaaacacctctaacagcccggagaaattaccaattaacaggtagtatttgttaattgttgcgctcatattttagtgcctaatagatgcctgacgaaatgcctagatgctatgattttctcccagattctgagtttctgaatttaggtgctgcatttctaaatatttgagtttgcatacgtgctatgatttactcccagattctagcaaggggtgatattgttgaagtagatacatggattagtgctaatggtaaaaatggaatgcgtagacattggcatgtacatgattctataacaggccatacaatactgaaggtgacaaggttcaaatctacgtcgtgctcttatgtttatatctttaatcaattttattagcaatttaattctaccaactgccatgttagtgttacgattgacacaacacttatagtttctctgctaaaaaacaacaaatcttctaggtgcaccaccggcaccctggatcattattgttattttttggtgtcctcttgctcctattatcctataattcatctgcttgataatctcttttttgtataatgaggttttattggcattttaaggtttaccactgtctacaacacacaagtttggattatatcttgtgtctcataagcagtttggcaataaaaggaagtatcttcataggagaaccgccccatttccatactatgcaacaccaatggacatggttgtttaagtatatgttttttcttttttcttctgcttaatatataatggggcgcagttctcctgcgcgtctaaaaaaataacacatggtcttttaaacccgggttgtcaataatagtcctctggcgcaatgtttttgtagggcttggagn

SEQ ID NO: 68045 - DNA, 1975 bp, Zea Mays
  misc_feature (1975)..(1975): n is a, c, g, or t
agggcgccgcccctcccgcctgggtgcgtcgtcgcgctcacgccccacgccgggtagctttaacctccggcgccggctcggtatatcgccgcccatcccccaccctcaccccagacgccggctcggcagatcaccgcccctcccactgggcaagccgttgtgtgcacgccccacccgcgtagcttcacccccggcaccggctcagcagctcaccggccccacccgcatagcttcaccccctgcacgtggctcagcaggtcactgcagtgcccctgagacccggtgccgtcctgttggatcgaagcttctagatgacgccagatggacagcagaagcccaatcccctccatcgcttcatcccgttgagttgcatatgccaccagaagccccatcccctccctcgctcaagtggcatcgcgactctgcggtaagggcggcagctcatccacagcgatgacggtgacgtcggggacgcgggaggtggcatcagggacgtgctgtccgaaaaggtgcagggcgtcattgagcgtatgatcgaagtcatgcgtagggtagggacccaggcgtcaacctctccgcccgcagattgacgtcccgctccgggtatgtctgattcttcgattcgccttgggagttctgttactggcattcaatcatcgatgacacccaattaatcatggaattgcatattattgttctcgaggatacataggagtacatctatgcaccgccgcccattaagcatttggtcacgccctgtgcttttccttggagatagatcattatcaatcccaataacaattaaaagaactgtggtgttctttgatggatgtctcatgtacacagtagaacaattggtactttgtatatgaaaatacttttattctatgaatacaacagcggtaccaaattgtgttatgtatgatgatctcatgcttctcttccctagatgccagtgttgagatgttgaagtttcaggcctagactgaaatgggagcgccattaaggatctaatgtaccacatgatgattcaatggatttgcgcaatgtaatttggctatctcctttgccatcaaatggatctttggacttctgtgtcgtgagctattatccaaagcattaacttcaaacattaacttccacagtacaatctatatcaagatgcatgatcaattgtgtacttctatactgatctttggatcaccatagttagttctacgagtactcatatacttttcttttcttcacatgtcaagaatttacaaggacctgcgtcaatccatttccaaacttctaagtgtactgtccgcatctttcacaagggtgatattgttgaagtagatacatggattagtgctaatggtaaaaatggaatgcgtagacattggcatgtacatgattctataacaggccatacaatactgaaggtgacaaggttcaaatctacgtcgtgctcttatgtttatatctttaatcaattttattagcaatttaattctaccaactgccatgttagtgttacgattgacacaacacttatagtttctctgctaaaaaacaacaaatcttctaggtgcaccaccggcaccctggatcattattgttattttttggtgtcctcttgctcctattatcctataattcatctgcttgataatctcttttttgtataatgaggttttattggcattttaaggtttaccactgtctacaacacacaagtttggattatatcttgtgtctcataagcagtttggcaataaaaggaagtatcttcataggagaaccgccccatttccatactatgcaacaccaatggacatggttgtttaagtatatgttttttcttttttcttctgcttaatatataatggggcgcagttctcctgcgcgtctaaaaaaataacacatggtcttttaaacccgggttgtcaataatagtcctctggcgcaatgtttttgtagggcttggagn

SEQ ID NO: 68046 - DNA, 3105 bp, Zea Mays
  misc_feature (3105)..(3105): n is a, c, g, or t
agggcgccgcccctcccgcctgggtgcgtcgtcgcgctcacgccccacgccgggtagctttaacctccggcgccggctcggtatatcgccgcccatcccccaccctcaccccagacgccggctcggcagatcaccgcccctcccactgggcaagccgttgtgtgcacgccccacccgcgtagcttcacccccggcaccggctcagcagctcaccggccccacccgcatagcttcaccccctgcacgtggctcagcaggtcactgcagtgcccctgagacccggtgccgtcctgttggatcgaagcttctagatgacgccagatggacagcagaagcccaatcccctccatcgcttcatcccgttgagttgcatatgccaccagaagccccatcccctccctcgctcaagtggcatcgcgactctgcggtaagggcggcagctcatccacagcgatgacggtgacgtcggggacgcgggaggtggcatcagggacgtgctgtccgaaaaggtgcagggcgtcattgagcgtatgatcgaagtcatgcgtagggtagggacccaggcgtcaacctctccgcccgcagattgacgtcccgctccgggtatgtctgattcttcgattcgccttgggagttctgttactggcattcaatcatcgatgacacccaattaatcatggaattgcatattattgttctcgaggatacataggagtacatctatgcaccgccgcccattaagcatttggtcacgccctgtgcttttccttggagatagatcattatcaatcccaataacaattaaaagaactgtggtgttctttgatggatgtctcatgtacacagtagaacaattgatgccagtgttgagatgttgaagtttcaggcctagactgaaatgggagcgccattaaggatctaatgtaccacatgatgattcaatggatttgcgcaatgtaatttggctatctcctttgccatcaaatggatctttggacttctgtgtcgtgagctattatccaaagcattaacttcaaacattaacttccacaaatttacaaggacctgcgtcaatccatttccaaacttctaagtgtactgtccgcatctttcacaagtaagttcatagacaatattttacttttgcacaaaaaaacatgaatgtgtgctattgtttgataagctttcaatgttgctaatccaattatcgtttccgcaagccgtttaagtgctgctttggaagtaattttagcatcggaattataattttgcacaaaaaaaggttgcatgctaatgatacatcatctgtcaattttgctactctagctgctgtcattacaaaccatgttgtcattacaaaccgtttaggtgttgtttggagacagatttgtacttttgaagtagaacaattgcttgcagctaaaacattatctgcagacgcaaaaattaataagctaaaaatattattcatcgtaaacactaatccgtttgcacacataccttctataaccaatatacagtttgcacctaaaaatcttattcatcataatcagaaatccgcttgcatacatactaaaatttgcggcccatatttttacttgagagatgtctagcttcatgtgttccttctatatgaaatatacaatttgtatatcatatttgaacaaacattagaaggaacacagatttgcttaaaaaaagatacctagacatataattgcttagattttagtcatcgagctatttcaatactcttctgttttaacacctgcagacatgattacacaacaactgattctcatattattttttcctcggtacatatgatctgtacaattcttgaaacaatgttttctactgcaaaaaattagctgttccattgaggaatgaatttattaacaagacaccaatcaaattagtcatcaagctgtttcaatactcttctgttttaacacctgcagacatgattacacaacaactgattctcatattattttttcctcggtacatatgatctgtacaattcttgaaacaatgtttttgtactacaaaaagttagctgttccattgaggaatgaatttattaacaagacaccaatcaaatatttttttaaagatataacccatttctaactctttcaaaaaaaagtatgctccaccgttacagtaacataaaacagccaccattactctccaaaacacctttttagattcaaaaggttagtattacaacctccttccttaaacacctctaacagcccggagaaattaccaattaacaggtagtatttgttaattgttgcgctcatattttagtgcctaatagatgcctgacgaaatgcctagatgctatgattttctcccagattctgagtttctgaatttaggtgctgcatttctaaatatttgagtttgcatacgtgctatgatttactcccagattctagcaaggggtgatattgttgaagtagatacatggattagtgctaatggtaaaaatggaatgcgtagacattggcatgtacatgattctataacaggccatacaatactgaaggtgacaaggttcaaatctacgtcgtgctcttatgtttatatctttaatcaattttattagcaatttaattctaccaactgccatgttagtgttacgattgacacaacacttatagtttctctgctaaaaaacaacaaatcttctaggtgcaccaccggcaccctggatcattattgttattttttggtgtcctcttgctcctattatcctataattcatctgcttgataatctcttttttgtataatgaggttttattggcattttaaggtttaccactgtctacaacacacaagtttggattatatcttgtgtctcataagcagtttggcaataaaaggaagtatcttcataggagaaccgccccatttccatactatgcaacaccaatggacatggttgtttaagtatatgttttttcttttttcttctgcttaatatataatggggcgcagttctcctgcgcgtctaaaaaaataacacatggtcttttaaacccgggttgtcaataatagtcctctggcgcaatgtttttgtagggcttggagn

SEQ ID NO: 68047 - DNA, 1675 bp, Zea Mays
  misc_feature (1675)..(1675): n is a, c, g, or t
agggcgccgcccctcccgcctgggtgcgtcgtcgcgctcacgccccacgccgggtagctttaacctccggcgccggctcggtatatcgccgcccatcccccaccctcaccccagacgccggctcggcagatcaccgcccctcccactgggcaagccgttgtgtgcacgccccacccgcgtagcttcacccccggcaccggctcagcagctcaccggccccacccgcatagcttcaccccctgcacgtggctcagcaggtcactgcagtgcccctgagacccggtgccgtcctgttggatcgaagcttctagatgacgccagatggacagcagaagcccaatcccctccatcgcttcatcccgttgagttgcatatgccaccagaagccccatcccctccctcgctcaagtggcatcgcgactctgcggtaagggcggcagctcatccacagcgatgacggtgacgtcggggacgcgggaggtggcatcagggacgtgctgtccgaaaaggtgcagggcgtcattgagcgtatgatcgaagtcatgcgtagggtagggacccaggcgtcaacctctccgcccgcagattgacgtcccgctccgggtatgtctgattcttcgattcgccttgggagttctgttactggcattcaatcatcgatgacacccaattaatcatggaattgcatattattgttctcgaggatacataggagtacatctatgcaccgccgcccattaagcatttggtcacgccctgtgcttttccttggagatagatcattatcaatcccaataacaattaaaagaactgtggtgttctttgatggatgtctcatgtacacagtagaacaattgatgccagtgttgagatgttgaagtttcaggcctagactgaaatgggagcgccattaaggatctaatgtaccacatgatgattcaatggatttgcgcaataatttacaaggacctgcgtcaatccatttccaaacttctaagtgtactgtccgcatctttcacaagggtgatattgttgaagtagatacatggattagtgctaatggtaaaaatggaatgcgtagacattggcatgtacatgattctataacaggccatacaatactgaaggtgacaaggttcaaatctacgtcgtgctcttatgtttatatctttaatcaattttattagcaatttaattctaccaactgccatgttagtgttacgattgacacaacacttatagtttctctgctaaaaaacaacaaatcttctaggtgcaccaccggcaccctggatcattattgttattttttggtgtcctcttgctcctattatcctataattcatctgcttgataatctcttttttgtataatgaggttttattggcattttaaggtttaccactgtctacaacacacaagtttggattatatcttgtgtctcataagcagtttggcaataaaaggaagtatcttcataggagaaccgccccatttccatactatgcaacaccaatggacatggttgtttaagtatatgttttttcttttttcttctgcttaatatataatggggcgcagttctcctgcgcgtctaaaaaaataacacatggtcttttaaacccgggttgtcaataatagtcctctggcgcaatgtttttgtagggcttggagn

SEQ ID NO: 68048 - DNA, 1427 bp, Zea Mays
  misc_feature (1427)..(1427): n is a, c, g, or t
gtagcttcgccctagggcgccgcccctcccgcctgggtgcgtcgtcgcgctcacgccccacgccgggtagctttaacctccggcgccggctcggtatatcgccgcccatcccccaccctcaccccagacgccggctcggcagatcaccgcccctcccactgggcaagccgttgtgtgcacgccccacccgcgtagcttcacccccggcaccggctcagcagctcaccggccccacccgcatagcttcaccccctgcacgtggctcagcaggtcactgcagtgcccctgagacccggtgccgtcctgttggatcgaagcttctagatgacgccagatggacagcagaagcccaatcccctccatcgcttcatcccgttgagttgcatatgccaccagaagccccatcccctccctcgctcaagtggcatcgcgactctgcggtaagggcggcagctcatccacagcgatgacggtgacgtcggggacgcgggaggtggcatcagggacgtgctgtccgaaaaggtgcagggcgtcattgagcgtatgatcgaagtcatgcgtagggtagggacccaggcgtcaacctctccgcccgcagattgacgtcccgctccggtgttgagatgttgaagtttcaggcctagactgaaatgggagcgccattaaggatctaatgtaccacatgatgattcaatggatttgcgcaataatttacaaggacctgcgtcaatccatttccaaacttctaagtgtactgtccgcatctttcacaagggtgatattgttgaagtagatacatggattagtgctaatggtaaaaatggaatgcgtagacattggcatgtacatgattctataacaggccatacaatactgaaggtgacaaggttcaaatctacgtcgtgctcttatgtttatatctttaatcaattttattagcaatttaattctaccaactgccatgttagtgttacgattgacacaacacttatagtttctctgctaaaaaacaacaaatcttctaggtgcaccaccggcaccctggatcattattgttattttttggtgtcctcttgctcctattatcctataattcatctgcttgataatctcttttttgtataatgaggttttattggcattttaaggtttaccactgtctacaacacacaagtttggattatatcttgtgtctcataagcagtttggcaataaaaggaagtatcttcataggagaaccgccccatttccatactatgcaacaccaatggacatggttgtttaagtatatgttttttcttttttcttctgcttaatatataatggggcgcagttctcctgcgcgtctaaaaaaataacacatggtcttttaaacccgggttgtcaataatagtcctctggcgcaatgtttttgtagggcttggagn

SEQ ID NO: 68049 - DNA, 1635 bp, Zea Mays
  misc_feature (1635)..(1635): n is a, c, g, or t
gtagcttcgccctagggcgccgcccctcccgcctgggtgcgtcgtcgcgctcacgccccacgccgggtagctttaacctccggcgccggctcggtatatcgccgcccatcccccaccctcaccccagacgccggctcggcagatcaccgcccctcccactgggcaagccgttgtgtgcacgccccacccgcgtagcttcacccccggcaccggctcagcagctcaccggccccacccgcatagcttcaccccctgcacgtggctcagcaggtcactgcagtgcccctgagacccggtgccgtcctgttggatcgaagcttctagatgacgccagatggacagcagaagcccaatcccctccatcgcttcatcccgttgagttgcatatgccaccagaagccccatcccctccctcgctcaagtggcatcgcgactctgcggtaagggcggcagctcatccacagcgatgacggtgacgtcggggacgcgggaggtggcatcagggacgtgctgtccgaaaaggtgcagggcgtcattgagcgtatgatcgaagtcatgcgtagggtagggacccaggcgtcaacctctccgcccgcagattgacgtcccgctccggtgttgagatgttgaagtttcaggcctagactgaaatgggagcgccattaaggatctaatgtaccacatgatgattcaatggatttgcgcaatgtaatttggctatctcctttgccatcaaatggatctttggacttctgtgtcgtgagctattatccaaagcattaacttcaaacattaacttccacagtacaatctatatcaagatgcatgatcaattgtgtacttctatactgatctttggatcaccatagttagttctacgagtactcatatacttttcttttcttcacatgtcaagaatttacaaggacctgcgtcaatccatttccaaacttctaagtgtactgtccgcatctttcacaagggtgatattgttgaagtagatacatggattagtgctaatggtaaaaatggaatgcgtagacattggcatgtacatgattctataacaggccatacaatactgaaggtgacaaggttcaaatctacgtcgtgctcttatgtttatatctttaatcaattttattagcaatttaattctaccaactgccatgttagtgttacgattgacacaacacttatagtttctctgctaaaaaacaacaaatcttctaggtgcaccaccggcaccctggatcattattgttattttttggtgtcctcttgctcctattatcctataattcatctgcttgataatctcttttttgtataatgaggttttattggcattttaaggtttaccactgtctacaacacacaagtttggattatatcttgtgtctcataagcagtttggcaataaaaggaagtatcttcataggagaaccgccccatttccatactatgcaacaccaatggacatggttgtttaagtatatgttttttcttttttcttctgcttaatatataatggggcgcagttctcctgcgcgtctaaaaaaataacacatggtcttttaaacccgggttgtcaataatagtcctctggcgcaatgtttttgtagggcttggagn

SEQ ID NO: 68050 - DNA, 1594 bp, Zea Mays
  misc_feature (1594)..(1594): n is a, c, g, or t
gtagcttcgccctagggcgccgcccctcccgcctgggtgcgtcgtcgcgctcacgccccacgccgggtagctttaacctccggcgccggctcggtatatcgccgcccatcccccaccctcaccccagacgccggctcggcagatcaccgcccctcccactgggcaagccgttgtgtgcacgccccacccgcgtagcttcacccccggcaccggctcagcagctcaccggccccacccgcatagcttcaccccctgcacgtggctcagcaggtcactgcagtgcccctgagacccggtgccgtcctgttggatcgaagcttctagatgacgccagatggacagcagaagcccaatcccctccatcgcttcatcccgttgagttgcatatgccaccagaagccccatcccctccctcgctcaagtggcatcgcgactctgcggtaagggcggcagctcatccacagcgatgacggtgacgtcggggacgcgggaggtggcatcagggacgtgctgtccgaaaaggtgcagggcgtcattgagcgtatgatcgaagtcatgcgtagggtagggacccaggcgtcaacctctccgcccgcagattgacgtcccgctccggatgccagtgttgagatgttgaagtttcaggcctagactgaaatgggagcgccattaaggatctaatgtaccacatgatgattcaatggatttgcgcaatgtaatttggctatctcctttgccatcaaatggatctttggacttctgtgtcgtgagctattatccaaagcattaacttcaaacattaacttccacaaatttacaaggacctgcgtcaatccatttccaaacttctaagtgtactgtccgcatctttcacaagtgctgcatttctaaatatttgagtttgcatacgtgctatgatttactcccagattctagcaaggggtgatattgttgaagtagatacatggattagtgctaatggtaaaaatggaatgcgtagacattggcatgtacatgattctataacaggccatacaatactgaaggtgacaaggttcaaatctacgtcgtgctcttatgtttatatctttaatcaattttattagcaatttaattctaccaactgccatgttagtgttacgattgacacaacacttatagtttctctgctaaaaaacaacaaatcttctaggtgcaccaccggcaccctggatcattattgttattttttggtgtcctcttgctcctattatcctataattcatctgcttgataatctcttttttgtataatgaggttttattggcattttaaggtttaccactgtctacaacacacaagtttggattatatcttgtgtctcataagcagtttggcaataaaaggaagtatcttcataggagaaccgccccatttccatactatgcaacaccaatggacatggttgtttaagtatatgttttttcttttttcttctgcttaatatataatggggcgcagttctcctgcgcgtctaaaaaaataacacatggtcttttaaacccgggttgtcaataatagtcctctggcgcaatgtttttgtagggcttggagn

SEQ ID NO: 68051 - DNA, 1501 bp, Zea Mays
  misc_feature (1501)..(1501): n is a, c, g, or t
cgcgtagcttcgccctagggcgccgcccctcccgcctgggtgcgtcgtcgcgctcacgccccacgccgggtagctttaacctccggcgccggctcggtatatcgccgcccatcccccaccctcaccccagacgccggctcggcagatcaccgcccctcccactgggcaagccgttgtgtgcacgccccacccgcgtagcttcacccccggcaccggctcagcagctcaccggccccacccgcatagcttcaccccctgcacgtggctcagcaggtcactgcagtgcccctgagacccggtgccgtcctgttggatcgaagcttctagatgacgccagatggacagcagaagcccaatcccctccatcgcttcatcccgttgagttgcatatgccaccagaagccccatcccctccctcgctcaagtggcatcgcgactctgcggtaagggcggcagctcatccacagcgatgacggtgacgtcggggacgcgggaggtggcatcagggacgtgctgtccgaaaaggtgcagggcgtcattgagcgtatgatcgaagtcatgcgtagggtagggacccaggcgtcaacctctccgcccgcagattgacgtcccgctccggatgccagtgttgagatgttgaagtttcaggcctagactgaaatgggagcgccattaaggatctaatgtaccacatgatgattcaatggatttgcgcaataatttacaaggacctgcgtcaatccatttccaaacttctaagtgtactgtccgcatctttcacaagtgctgcatttctaaatatttgagtttgcatacgtgctatgatttactcccagattctagcaaggggtgatattgttgaagtagatacatggattagtgctaatggtaaaaatggaatgcgtagacattggcatgtacatgattctataacaggccatacaatactgaaggtgacaaggttcaaatctacgtcgtgctcttatgtttatatctttaatcaattttattagcaatttaattctaccaactgccatgttagtgttacgattgacacaacacttatagtttctctgctaaaaaacaacaaatcttctaggtgcaccaccggcaccctggatcattattgttattttttggtgtcctcttgctcctattatcctataattcatctgcttgataatctcttttttgtataatgaggttttattggcattttaaggtttaccactgtctacaacacacaagtttggattatatcttgtgtctcataagcagtttggcaataaaaggaagtatcttcataggagaaccgccccatttccatactatgcaacaccaatggacatggttgtttaagtatatgttttttcttttttcttctgcttaatatataatggggcgcagttctcctgcgcgtctaaaaaaataacacatggtcttttaaacccgggttgtcaataatagtcctctggcgcaatgtttttgtagggcttggagn

SEQ ID NO: 68052 - DNA, 2685 bp, Zea Mays
  misc_feature (2685)..(2685): n is a, c, g, or t
cccgcccccgcgtagcttcgccctagggcgccgcccctcccgcctgggtgcgtcgtcgcgctcacgccccacgccgggtagctttaacctccggcgccggctcggtatatcgccgcccatcccccaccctcaccccagacgccggctcggcagatcaccgcccctcccactgggcaagccgttgtgtgcacgccccacccgcgtagcttcacccccggcaccggctcagcagctcaccggccccacccgcatagcttcaccccctgcacgtggctcagcaggtcactgcagtgcccctgagacccggtgccgtcctgttggatcgaagcttctagatgacgccagatggacagcagaagcccaatcccctccatcgcttcatcccgttgagttgcatatgccaccagaagccccatcccctccctcgctcaagtggcatcgcgactctgcggtaagggcggcagctcatccacagcgatgacggtgacgtcggggacgcgggaggtggcatcagggacgtgctgtccgaaaaggtgcagggcgtcattgagcgtatgatcgaagtcatgcgtagggtagggacccaggcgtcaacctctccgcccgcagattgacgtcccgctccggatgccagtgttgagatgttgaagtttcaggcctagactgaaatgggagcgccattaaggatctaatgtaccacatgatgattcaatggatttgcgcaatgtaatttggctatctcctttgccatcaaatggatctttggacttctgtgtcgtgagctattatccaaagcattaacttcaaacattaacttccacaaatttacaaggacctgcgtcaatccatttccaaacttctaagtgtactgtccgcatctttcacaagtaagttcatagacaatattttacttttgcacaaaaaaacatgaatgtgtgctattgtttgataagctttcaatgttgctaatccaattatcgtttccgcaagccgtttaagtgctgctttggaagtaattttagcatcggaattataattttgcacaaaaaaaggttgcatgctaatgatacatcatctgtcaattttgctactctagctgctgtcattacaaaccatgttgtcattacaaaccgtttaggtgttgtttggagacagatttgtacttttgaagtagaacaattgcttgcagctaaaacattatctgcagacgcaaaaattaataagctaaaaatattattcatcgtaaacactaatccgtttgcacacataccttctataaccaatatacagtttgcacctaaaaatcttattcatcataatcagaaatccgcttgcatacatactaaaatttgcggcccatatttttacttgagagatgtctagcttcatgtgttccttctatatgaaatatacaatttgtatatcatatttgaacaaacattagaaggaacacagatttgcttaaaaaaagatacctagacatataattgcttagattttagtcatcgagctatttcaatactcttctgttttaacacctgcagacatgattacacaacaactgattctcatattattttttcctcggtacatatgatctgtacaattcttgaaacaatgttttctactgcaaaaaattagctgttccattgaggaatgaatttattaacaagacaccaatcaaattagtcatcaagctgtttcaatactcttctgttttaacacctgcagacatgattacacaacaactgattctcatattattttttcctcggtacatatgatctgtacaattcttgaaacaatgtttttgtactacaaaaagttagctgttccattgaggaatgaatttattaacaagacaccaatcaaatatttttttaaagatataacccatttctaactctttcaaaaaaaagtatgctccaccgttacagtaacataaaacagccaccattactctccaaaacacctttttagattcaaaaggttagtattacaacctccttccttaaacacctctaacagcccggagaaattaccaattaacaggtagtatttgttaattgttgcgctcatattttagtgcctaatagatgcctgacgaaatgcctagatgctatgattttctcccagattctgagtttctgaatttaggtgctgcatttctaaatatttgagtttgcatacgtgctatgatttactcccagattctagcaaggtatgtaacatcagccatgcattctaattctcctaccatgcgctctaactcgctcctctaatctactgcaggggtgatattgttgaagtagatacatggattagtgctaatggtaaaaatggaatgcgtagacattggcatgtacatgattctataacaggccatacaatactgaaggtgacaaggtttaccactgtctacaacacacaagtttggattatatcttgtgtctcataagcagtttggcaataaaaggaagtatcttcataggagaaccgccccatttccatactatgcaacaccaatggacatggttgtttaagtatatgttttttcttttttcttctgcttaatatataatggggcgcagttctcctgcgcgtctaaaaaaataacacatggtcttttaaacccgggttgtcaataatagtcctctggcgcaatgtttttgtagggcttggagn

SEQ ID NO: 68053 - DNA, 1475 bp, Zea Mays
  misc_feature (1475)..(1475): n is a, c, g, or t
agcttctaggagctgcctatagatgacacccccgcccccgcgtagcttcgccctagggcgccgcccctcccgcctgggtgcgtcgtcgcgctcacgccccacgccgggtagctttaacctccggcgccggctcggtatatcgccgcccatcccccaccctcaccccagacgccggctcggcagatcaccgcccctcccactgggcaagccgttgtgtgcacgccccacccgcgtagcttcacccccggcaccggctcagcagctcaccggccccacccgcatagcttcaccccctgcacgtggctcagcaggtcactgcagtgcccctgagacccggtgccgtcctgttggatcgaagcttctagatgacgccagatggacagcagaagcccaatcccctccatcgcttcatcccgttgagttgcatatgccaccagaagccccatcccctccctcgctcaagtggcatcgcgactctgcggtaagggcggcagctcatccacagcgatgacggtgacgtcggggacgcgggaggtggcatcagggacgtgctgtccgaaaaggtgcagggcgtcattgagcgtatgatcgaagtcatgcgtagggtagggacccaggcgtcaacctctccgcccgcagattgacgtcccgctccggatgccagtgttgagatgttgaagtttcaggcctagactgaaatgggagcgccattaaggatctaatgtaccacatgatgattcaatggatttgcgcaataatttacaaggacctgcgtcaatccatttccaaacttctaagtgtactgtccgcatctttcacaagggtgatattgttgaagtagatacatggattagtgctaatggtaaaaatggaatgcgtagacattggcatgtacatgattctataacaggccatacaatactgaaggtgacaaggttcaaatctacgtcgtgctcttatgtttatatctttaatcaattttattagcaatttaattctaccaactgccatgttagtgttacgattgacacaacacttatagtttctctgctaaaaaacaacaaatcttctaggtgcaccaccggcaccctggatcattattgttattttttggtgtcctcttgctcctattatcctataattcatctgcttgataatctcttttttgtataatgaggttttattggcattttaaggtttaccactgtctacaacacacaagtttggattatatcttgtgtctcataagcagtttggcaataaaaggaagtatcttcataggagaaccgccccatttccatactatgcaacaccaatggacatggttgtttaagtatatgttttttcttttttcttctgcttaatatataatggggcgcagttctcctgcgcgtctaaaaaaataacacatggtcttttaaacccgggttgtcaataatagtcctctggcgcaatgtttttgtagggcttggagn

SEQ ID NO: 68054 - DNA, 2838 bp, Zea Mays
  misc_feature (2838)..(2838): n is a, c, g, or t
ctcaggcaggcttctcgtgagcgacgcgaagcttctaggagctgcctatagatgacacccccgcccccgcgtagcttcgccctagggcgccgcccctcccgcctgggtgcgtcgtcgcgctcacgccccacgccgggtagctttaacctccggcgccggctcggtatatcgccgcccatcccccaccctcaccccagacgccggctcggcagatcaccgcccctcccactgggcaagccgttgtgtgcacgccccacccgcgtagcttcacccccggcaccggctcagcagctcaccggccccacccgcatagcttcaccccctgcacgtggctcagcaggtcactgcagtgcccctgagacccggtgccgtcctgttggatcgaagcttctagatgacgccagatggacagcagaagcccaatcccctccatcgcttcatcccgttgagttgcatatgccaccagaagccccatcccctccctcgctcaagtggcatcgcgactctgcggtaagggcggcagctcatccacagcgatgacggtgacgtcggggacgcgggaggtggcatcagggacgtgctgtccgaaaaggtgcagggcgtcattgagcgtatgatcgaagtcatgcgtagggtagggacccaggcgtcaacctctccgcccgcagattgacgtcccgctccggatgccagtgttgagatgttgaagtttcaggcctagactgaaatgggagcgccattaaggatctaatgtaccacatgatgattcaatggatttgcgcaataatttacaaggacctgcgtcaatccatttccaaacttctaagtgtactgtccgcatctttcacaagtaagttcatagacaatattttacttttgcacaaaaaaacatgaatgtgtgctattgtttgataagctttcaatgttgctaatccaattatcgtttccgcaagccgtttaagtgctgctttggaagtaattttagcatcggaattataattttgcacaaaaaaaggttgcatgctaatgatacatcatctgtcaattttgctactctagctgctgtcattacaaaccatgttgtcattacaaaccgtttaggtgttgtttggagacagatttgtacttttgaagtagaacaattgcttgcagctaaaacattatctgcagacgcaaaaattaataagctaaaaatattattcatcgtaaacactaatccgtttgcacacataccttctataaccaatatacagtttgcacctaaaaatcttattcatcataatcagaaatccgcttgcatacatactaaaatttgcggcccatatttttacttgagagatgtctagcttcatgtgttccttctatatgaaatatacaatttgtatatcatatttgaacaaacattagaaggaacacagatttgcttaaaaaaagatacctagacatataattgcttagattttagtcatcgagctatttcaatactcttctgttttaacacctgcagacatgattacacaacaactgattctcatattattttttcctcggtacatatgatctgtacaattcttgaaacaatgttttctactgcaaaaaattagctgttccattgaggaatgaatttattaacaagacaccaatcaaattagtcatcaagctgtttcaatactcttctgttttaacacctgcagacatgattacacaacaactgattctcatattattttttcctcggtacatatgatctgtacaattcttgaaacaatgtttttgtactacaaaaagttagctgttccattgaggaatgaatttattaacaagacaccaatcaaatatttttttaaagatataacccatttctaactctttcaaaaaaaagtatgctccaccgttacagtaacataaaacagccaccattactctccaaaacacctttttagattcaaaaggttagtattacaacctccttccttaaacacctctaacagcccggagaaattaccaattaacaggtagtatttgttaattgttgcgctcatattttagtgcctaatagatgcctgacgaaatgcctagatgctatgattttctcccagattctgagtttctgaatttaggtgctgcatttctaaatatttgagtttgcatacgtgctatgatttactcccagattctagcaaggggtgatattgttgaagtagatacatggattagtgctaatggtaaaaatggaatgcgtagacattggcatgtacatgattctataacaggccatacaatactgaaggtgacaaggttcaaatctacgtcgtgctcttatgtttatatctttaatcaattttattagcaatttaattctaccaactgccatgttagtgttacgattgacacaacacttatagtttctctgctaaaaaacaacaaatcttctaggtgcaccaccggcaccctggatcattattgttattttttggtgtcctcttgctcctattatcctataattcatctgcttgataatctcttttttgtataatgaggttttattggcattttaaggtttaccactgtctacaacacacaagtttggattatatcttgtgtctcataagcagtttggcaataaaaggaagtatcttcataggagaaccgccccatttccatactatgcaacaccaatggacatggttgtttaagtatatgttttttcttttttcttctgcttaatatataatggggcgcagttctcctgcgcgtctaaaaaaataacacatggtcttttaaacccgggttgtcaataatagtcctctggcgcaatgtttttgtagggcttggagn

SEQ ID NO: 68055 - DNA, 2994 bp, Zea Mays
  misc_feature (2994)..(2994): n is a, c, g, or t
atccacgtcacctagaagtttttcacgcggacgattcttgatcaacggctaggcatcgttctcaggcaggcttctcgtgagcgacgcgaagcttctaggagctgcctatagatgacacccccgcccccgcgtagcttcgccctagggcgccgcccctcccgcctgggtgcgtcgtcgcgctcacgccccacgccgggtagctttaacctccggcgccggctcggtatatcgccgcccatcccccaccctcaccccagacgccggctcggcagatcaccgcccctcccactgggcaagccgttgtgtgcacgccccacccgcgtagcttcacccccggcaccggctcagcagctcaccggccccacccgcatagcttcaccccctgcacgtggctcagcaggtcactgcagtgcccctgagacccggtgccgtcctgttggatcgaagcttctagatgacgccagatggacagcagaagcccaatcccctccatcgcttcatcccgttgagttgcatatgccaccagaagccccatcccctccctcgctcaagtggcatcgcgactctgcggtaagggcggcagctcatccacagcgatgacggtgacgtcggggacgcgggaggtggcatcagggacgtgctgtccgaaaaggtgcagggcgtcattgagcgtatgatcgaagtcatgcgtagggtagggacccaggcgtcaacctctccgcccgcagattgacgtcccgctccggatgccagtgttgagatgttgaagtttcaggcctagactgaaatgggagcgccattaaggatctaatgtaccacatgatgattcaatggatttgcgcaatgtaatttggctatctcctttgccatcaaatggatctttggacttctgtgtcgtgagctattatccaaagcattaacttcaaacattaacttccacaaatttacaaggacctgcgtcaatccatttccaaacttctaagtgtactgtccgcatctttcacaagtaagttcatagacaatattttacttttgcacaaaaaaacatgaatgtgtgctattgtttgataagctttcaatgttgctaatccaattatcgtttccgcaagccgtttaagtgctgctttggaagtaattttagcatcggaattataattttgcacaaaaaaaggttgcatgctaatgatacatcatctgtcaattttgctactctagctgctgtcattacaaaccatgttgtcattacaaaccgtttaggtgttgtttggagacagatttgtacttttgaagtagaacaattgcttgcagctaaaacattatctgcagacgcaaaaattaataagctaaaaatattattcatcgtaaacactaatccgtttgcacacataccttctataaccaatatacagtttgcacctaaaaatcttattcatcataatcagaaatccgcttgcatacatactaaaatttgcggcccatatttttacttgagagatgtctagcttcatgtgttccttctatatgaaatatacaatttgtatatcatatttgaacaaacattagaaggaacacagatttgcttaaaaaaagatacctagacatataattgcttagattttagtcatcgagctatttcaatactcttctgttttaacacctgcagacatgattacacaacaactgattctcatattattttttcctcggtacatatgatctgtacaattcttgaaacaatgttttctactgcaaaaaattagctgttccattgaggaatgaatttattaacaagacaccaatcaaattagtcatcaagctgtttcaatactcttctgttttaacacctgcagacatgattacacaacaactgattctcatattattttttcctcggtacatatgatctgtacaattcttgaaacaatgtttttgtactacaaaaagttagctgttccattgaggaatgaatttattaacaagacaccaatcaaatatttttttaaagatataacccatttctaactctttcaaaaaaaagtatgctccaccgttacagtaacataaaacagccaccattactctccaaaacacctttttagattcaaaaggttagtattacaacctccttccttaaacacctctaacagcccggagaaattaccaattaacaggtagtatttgttaattgttgcgctcatattttagtgcctaatagatgcctgacgaaatgcctagatgctatgattttctcccagattctgagtttctgaatttaggtgctgcatttctaaatatttgagtttgcatacgtgctatgatttactcccagattctagcaaggggtgatattgttgaagtagatacatggattagtgctaatggtaaaaatggaatgcgtagacattggcatgtacatgattctataacaggccatacaatactgaaggtgacaaggttcaaatctacgtcgtgctcttatgtttatatctttaatcaattttattagcaatttaattctaccaactgccatgttagtgttacgattgacacaacacttatagtttctctgctaaaaaacaacaaatcttctaggtgcaccaccggcaccctggatcattattgttattttttggtgtcctcttgctcctattatcctataattcatctgcttgataatctcttttttgtataatgaggttttattggcattttaaggtttaccactgtctacaacacacaagtttggattatatcttgtgtctcataagcagtttggcaataaaaggaagtatcttcataggagaaccgccccatttccatactatgcaacaccaatggacatggttgtttaagtatatgttttttcttttttcttctgcttaatatataatggggcgcagttctcctgcgcgtctaaaaaaataacacatggtcttttaaacccgggttgtcaataatagtcctctggcgcaatgtttttgtagggcttggagn

SEQ ID NO: 68056 - DNA, 1669 bp, Zea Mays
  misc_feature (1669)..(1669): n is a, c, g, or t
ccttgggatatttccttattattaaagccggatggaaacggctcccctcacggtatccacgtcacctagaagtttttcacgcggacgattcttgatcaacggctaggcatcgttctcaggcaggcttctcgtgagcgacgcgaagcttctaggagctgcctatagatgacacccccgcccccgcgtagcttcgccctagggcgccgcccctcccgcctgggtgcgtcgtcgcgctcacgccccacgccgggtagctttaacctccggcgccggctcggtatatcgccgcccatcccccaccctcaccccagacgccggctcggcagatcaccgcccctcccactgggcaagccgttgtgtgcacgccccacccgcgtagcttcacccccggcaccggctcagcagctcaccggccccacccgcatagcttcaccccctgcacgtggctcagcaggtcactgcagtgcccctgagacccggtgccgtcctgttggatcgaagcttctagatgacgccagatggacagcagaagcccaatcccctccatcgcttcatcccgttgagttgcatatgccaccagaagccccatcccctccctcgctcaagtggcatcgcgactctgcggtaagggcggcagctcatccacagcgatgacggtgacgtcggggacgcgggaggtggcatcagggacgtgctgtccgaaaaggtgcagggcgtcattgagcgtatgatcgaagtcatgcgtagggtagggacccaggcgtcaacctctccgcccgcagattgacgtcccgctccggatgccagtgttgagatgttgaagtttcaggcctagactgaaatgggagcgccattaaggatctaatgtaccacatgatgattcaatggatttgcgcaatgtaatttggctatctcctttgccatcaaatggatctttggacttctgtgtcaatttacaaggacctgcgtcaatccatttccaaacttctaagtgtactgtccgcatctttcacaagggtgatattgttgaagtagatacatggattagtgctaatggtaaaaatggaatgcgtagacattggcatgtacatgattctataacaggccatacaatactgaaggtgacaaggttcaaatctacgtcgtgctcttatgtttatatctttaatcaattttattagcaatttaattctaccaactgccatgttagtgttacgattgacacaacacttatagtttctctgctaaaaaacaacaaatcttctaggtgcaccaccggcaccctggatcattattgttattttttggtgtcctcttgctcctattatcctataattcatctgcttgataatctcttttttgtataatgaggttttattggcattttaaggtttaccactgtctacaacacacaagtttggattatatcttgtgtctcataagcagtttggcaataaaaggaagtatcttcataggagaaccgccccatttccatactatgcaacaccaatggacatggttgtttaagtatatgttttttcttttttcttctgcttaatatataatggggcgcagttctcctgcgcgtctaaaaaaataacacatggtcttttaaacccgggttgtcaataatagtcctctggcgcaatgtttttgtagggcttggagn

SEQ ID NO: 68057 - DNA, 1714 bp, Zea Mays
  misc_feature (1714)..(1714): n is a, c, g, or t
ccttgggatatttccttattattaaagccggatggaaacggctcccctcacggtatccacgtcacctagaagtttttcacgcggacgattcttgatcaacggctaggcatcgttctcaggcaggcttctcgtgagcgacgcgaagcttctaggagctgcctatagatgacacccccgcccccgcgtagcttcgccctagggcgccgcccctcccgcctgggtgcgtcgtcgcgctcacgccccacgccgggtagctttaacctccggcgccggctcggtatatcgccgcccatcccccaccctcaccccagacgccggctcggcagatcaccgcccctcccactgggcaagccgttgtgtgcacgccccacccgcgtagcttcacccccggcaccggctcagcagctcaccggccccacccgcatagcttcaccccctgcacgtggctcagcaggtcactgcagtgcccctgagacccggtgccgtcctgttggatcgaagcttctagatgacgccagatggacagcagaagcccaatcccctccatcgcttcatcccgttgagttgcatatgccaccagaagccccatcccctccctcgctcaagtggcatcgcgactctgcggtaagggcggcagctcatccacagcgatgacggtgacgtcggggacgcgggaggtggcatcagggacgtgctgtccgaaaaggtgcagggcgtcattgagcgtatgatcgaagtcatgcgtagggtagggacccaggcgtcaacctctccgcccgcagattgacgtcccgctccggatgccagtgttgagatgttgaagtttcaggcctagactgaaatgggagcgccattaaggatctaatgtaccacatgatgattcaatggatttgcgcaatgtaatttggctatctcctttgccatcaaatggatctttggacttctgtgtcgtgagctattatccaaagcattaacttcaaacattaacttccacaaatttacaaggacctgcgtcaatccatttccaaacttctaagtgtactgtccgcatctttcacaagggtgatattgttgaagtagatacatggattagtgctaatggtaaaaatggaatgcgtagacattggcatgtacatgattctataacaggccatacaatactgaaggtgacaaggttcaaatctacgtcgtgctcttatgtttatatctttaatcaattttattagcaatttaattctaccaactgccatgttagtgttacgattgacacaacacttatagtttctctgctaaaaaacaacaaatcttctaggtgcaccaccggcaccctggatcattattgttattttttggtgtcctcttgctcctattatcctataattcatctgcttgataatctcttttttgtataatgaggttttattggcattttaaggtttaccactgtctacaacacacaagtttggattatatcttgtgtctcataagcagtttggcaataaaaggaagtatcttcataggagaaccgccccatttccatactatgcaacaccaatggacatggttgtttaagtatatgttttttcttttttcttctgcttaatatataatggggcgcagttctcctgcgcgtctaaaaaaataacacatggtcttttaaacccgggttgtcaataatagtcctctggcgcaatgtttttgtagggcttggagn

SEQ ID NO: 68058 - DNA, 3027 bp, Zea Mays
  misc_feature (3027)..(3027): n is a, c, g, or t
agaaatccatctatccatccattcccttgggatatttccttattattaaagccggatggaaacggctcccctcacggtatccacgtcacctagaagtttttcacgcggacgattcttgatcaacggctaggcatcgttctcaggcaggcttctcgtgagcgacgcgaagcttctaggagctgcctatagatgacacccccgcccccgcgtagcttcgccctagggcgccgcccctcccgcctgggtgcgtcgtcgcgctcacgccccacgccgggtagctttaacctccggcgccggctcggtatatcgccgcccatcccccaccctcaccccagacgccggctcggcagatcaccgcccctcccactgggcaagccgttgtgtgcacgccccacccgcgtagcttcacccccggcaccggctcagcagctcaccggccccacccgcatagcttcaccccctgcacgtggctcagcaggtcactgcagtgcccctgagacccggtgccgtcctgttggatcgaagcttctagatgacgccagatggacagcagaagcccaatcccctccatcgcttcatcccgttgagttgcatatgccaccagaagccccatcccctccctcgctcaagtggcatcgcgactctgcggtaagggcggcagctcatccacagcgatgacggtgacgtcggggacgcgggaggtggcatcagggacgtgctgtccgaaaaggtgcagggcgtcattgagcgtatgatcgaagtcatgcgtagggtagggacccaggcgtcaacctctccgcccgcagattgacgtcccgctccggatgccagtgttgagatgttgaagtttcaggcctagactgaaatgggagcgccattaaggatctaatgtaccacatgatgattcaatggatttgcgcaatgtaatttggctatctcctttgccatcaaatggatctttggacttctgtgtcaatttacaaggacctgcgtcaatccatttccaaacttctaagtgtactgtccgcatctttcacaagtaagttcatagacaatattttacttttgcacaaaaaaacatgaatgtgtgctattgtttgataagctttcaatgttgctaatccaattatcgtttccgcaagccgtttaagtgctgctttggaagtaattttagcatcggaattataattttgcacaaaaaaaggttgcatgctaatgatacatcatctgtcaattttgctactctagctgctgtcattacaaaccatgttgtcattacaaaccgtttaggtgttgtttggagacagatttgtacttttgaagtagaacaattgcttgcagctaaaacattatctgcagacgcaaaaattaataagctaaaaatattattcatcgtaaacactaatccgtttgcacacataccttctataaccaatatacagtttgcacctaaaaatcttattcatcataatcagaaatccgcttgcatacatactaaaatttgcggcccatatttttacttgagagatgtctagcttcatgtgttccttctatatgaaatatacaatttgtatatcatatttgaacaaacattagaaggaacacagatttgcttaaaaaaagatacctagacatataattgcttagattttagtcatcgagctatttcaatactcttctgttttaacacctgcagacatgattacacaacaactgattctcatattattttttcctcggtacatatgatctgtacaattcttgaaacaatgttttctactgcaaaaaattagctgttccattgaggaatgaatttattaacaagacaccaatcaaattagtcatcaagctgtttcaatactcttctgttttaacacctgcagacatgattacacaacaactgattctcatattattttttcctcggtacatatgatctgtacaattcttgaaacaatgtttttgtactacaaaaagttagctgttccattgaggaatgaatttattaacaagacaccaatcaaatatttttttaaagatataacccatttctaactctttcaaaaaaaagtatgctccaccgttacagtaacataaaacagccaccattactctccaaaacacctttttagattcaaaaggttagtattacaacctccttccttaaacacctctaacagcccggagaaattaccaattaacaggtagtatttgttaattgttgcgctcatattttagtgcctaatagatgcctgacgaaatgcctagatgctatgattttctcccagattctgagtttctgaatttaggtgctgcatttctaaatatttgagtttgcatacgtgctatgatttactcccagattctagcaaggggtgatattgttgaagtagatacatggattagtgctaatggtaaaaatggaatgcgtagacattggcatgtacatgattctataacaggccatacaatactgaaggtgacaaggttcaaatctacgtcgtgctcttatgtttatatctttaatcaattttattagcaatttaattctaccaactgccatgttagtgttacgattgacacaacacttatagtttctctgctaaaaaacaacaaatcttctaggtgcaccaccggcaccctggatcattattgttattttttggtgtcctcttgctcctattatcctataattcatctgcttgataatctcttttttgtataatgaggttttattggcattttaaggtttaccactgtctacaacacacaagtttggattatatcttgtgtctcataagcagtttggcaataaaaggaagtatcttcataggagaaccgccccatttccatactatgcaacaccaatggacatggttgtttaagtatatgttttttcttttttcttctgcttaatatataatggggcgcagttctcctgcgcgtctaaaaaaataacacatggtcttttaaacccgggttgtcaataatagtcctctggcgcaatgtttttgtagggcttggagn

SEQ ID NO: 68059 - DNA, 1536 bp, Zea Mays
tctcagatccaggttctctctccctttcaactccggtggcggcgagagcaagtagcacaaacttatgtgaaagcgactccaaactacgatggatccccagatctagtgacattgagggcaagtagcaagagtttggcagcagtcgtggactacgacggatccaaacaagtcaacctctcagatctgatctggtgactacaaggtcaagcagcacaaactttggtggtagcagcttcagactacgaaaggagtaataagcaggattcaaagatgatggttacacgagagcatccaatgaggagcagggaatgccagctttgccatgaaaacccgctctcttcgccaagcatgaccaaaatgattgtagaggcgatcgctgccctcaaggagaggaaggggtcgagctcggtggccatcagcaagtacgtcgaggggaagcatggcggcaagctccccaccaacttccgcaagcagctcactgtgcagctgaagaagctcgctgccgccggcaagctgacgagggtgaagaactccttcaagctgccggccaccgacgccaagcccaaggccgccaagcccaaggcacccaaggccgcgcccaagcccaagccctcgccgaaggcgaaggccaagaccgctgcgaagcccaaggcggcgtcgcccaaacccaaggccaaggccaaggccaagcctgtcgctcctgccgccgcgtcgcccaagccccgcgggcgccctcccaaggtcgccaagacctccgccaaggcctcccccgccaaggcagccaagaaggcggctgctcctgccaagaagggaaaggcagcggcggctcctaagaaggtggcaaccccgaagaaggctgctgctgctgccgccccggccaggaagggcgtggccaggaaggccaagaagtagtctgcctgccttgtcgctggcgagatccccccctcaattccgcctatagattcccctctttcatggattttgatccaatcgtaatattgtcagtagctctagattcgtcggtagctccagcatgagtgtcggtggtagttctgtgcctgtaaaaacttgggatagttgatcgcgtgtgatcagccgtcatgctcctccagtctctatgaacaagctaagctataatagtattttgctatcctatgatccccgggttgttggcttattgttgtcaatatttttttggttgcatctggtttggatttctgttttttaaattgttggatcggttgattttgttggatttagaagaatcctggcattgcattaagttcggacttttggtttctgcttttcatgtgattctgtttgttcaattgttagattgattaccctggacaatgaatagcaggagactcatttcggtttcattgtcaactgcatcagagtttctaagtaaaaaattcagtagtgagattctttgctgcattcgaagtgctgagaatccatcaaccaatcatcctaaacctaaacctacgatataaagtctttcatgctctaaccattatttttcgaaatgaaaaa

SEQ ID NO: 68060 - DNA, 1388 bp, Zea Mays
tctcagatccaggttctctctccctttcaactccggtggcggcgagagcaagtagcacaaacttatgtgaaagcgactccaaactacgatggatccccaggagtaataagcaggattcaaagatgatggttacacgagagcatccaatgaggagcagggaatgccagctttgccatgaaaacccgctctcttcgccaagcatgaccaaaatgattgtagaggcgatcgctgccctcaaggagaggaaggggtcgagctcggtggccatcagcaagtacgtcgaggggaagcatggcggcaagctccccaccaacttccgcaagcagctcactgtgcagctgaagaagctcgctgccgccggcaagctgacgagggtgaagaactccttcaagctgccggccaccgacgccaagcccaaggccgccaagcccaaggcacccaaggccgcgcccaagcccaagccctcgccgaaggcgaaggccaagaccgctgcgaagcccaaggcggcgtcgcccaaacccaaggccaaggccaaggccaagcctgtcgctcctgccgccgcgtcgcccaagccccgcgggcgccctcccaaggtcgccaagacctccgccaaggcctcccccgccaaggcagccaagaaggcggctgctcctgccaagaagggaaaggcagcggcggctcctaagaaggtggcaaccccgaagaaggctgctgctgctgccgccccggccaggaagggcgtggccaggaaggccaagaagtagtctgcctgccttgtcgctggcgagatccccccctcaattccgcctatagattcccctctttcatggattttgatccaatcgtaatattgtcagtagctctagattcgtcggtagctccagcatgagtgtcggtggtagttctgtgcctgtaaaaacttgggatagttgatcgcgtgtgatcagccgtcatgctcctccagtctctatgaacaagctaagctataatagtattttgctatcctatgatccccgggttgttggcttattgttgtcaatatttttttggttgcatctggtttggatttctgttttttaaattgttggatcggttgattttgttggatttagaagaatcctggcattgcattaagttcggacttttggtttctgcttttcatgtgattctgtttgttcaattgttagattgattaccctggacaatgaatagcaggagactcatttcggtttcattgtcaactgcatcagagtttctaagtaaaaaattcagtagtgagattctttgctgcattcgaagtgctgagaatccatcaaccaatcatcctaaacctaaacctacgatataaagtctttcatgctctaaccattatttttcgaaatgaaaaa

SEQ ID NO: 68061 - DNA, 795 bp, Zea Mays
ctagaagcggggcccacccgaaacgctagacctatcctcttcttcccgtggcacggccaattttgcttccggctgccgctcttctccgccgccgccccgatccccttcctccccaagcccttcaactatccactcccgcgtccccggagaagcggcgagatgtacggcatcctgacctccccctgccctcgagccccgcttctccgcgctctcccgagcccatccgcccgcgcattccccagaacactagccttccccgcgaggcccctcccccgcggtctccgcctgacccctccgcacgccgccgcggaggcatcggcggcagccacggcgttgggcgggcttctggcgtcgccgctctcgactctggaggccgccctgcggggcctcaacctcgcgccccttcgcgcccccgtggcggcggcgatgtcggcggccgtgcggtggctgggagtgtaccgggaggtgctgctcgtcggcgtgctgctctcctggttccccaacatcccctgggaccgccagcccttctcggccctgcgcgacctctgcgaccccttcctcgccctgtgccgtgaggtcatgccccccgtgttcgggcgcaagctcgacctcagcccgcttgttgcattcatggctattgacatcatcatcatgatcctgcgcccgcagccacgcatgtgatgactccctgcagcagtggtcttgtggtaaaatttgtttcttgatcctgcatgtggataacctcactttcatgctgtacacaatagcttgtagatttagggaaatacaaccgag

SEQ ID NO: 68062 - DNA, 2500 bp, Zea Mays
attaatcctagtaccgaggacgcctcgaacagcaccatacacgcatgacgcatgcacctcgattcccaatttcgcatacccccgatctcccgctcggcaaacatggcgagtgcacctcgctcgccatcccagcttcctgccgtttcaaatcgtgcacgccgctgattcacgggaccacggctggtgcggaggtgcatcacgcaaccattgtgccgcccagttgctcgctggctgcgctgtgccgcgccgttcggcccatccactccaccgccgctcccaccacacaggagtacaagcctacaaggcatgtggcgagggggcagctctggccgccgcacgtgctaggagctggagcggatcatcctagagcggcaccgctccagaagcctcagccgagaggacgcgctcaacctgttcgatgaattgcttcctcaggccagacaggcctcggtgcacgccttcactactgtcctataggccagagcgccgcgttcgcggtgtcccttttcaataccatggcccggtcccgcgtcaatatgatggccaccaacgcttgcgcctttgatatccgcatccgctgcttttgcaatgttgggcgtttggacctcgctgatatcctcatccgctgcttctgcaatgttgggcgtttggacctcgccttcgctgcctttggcctgttcctcaggacaggatggagggtgcagaacgtggtcctcaaccagctaatcaagggtctctgtgatggcaagaggactggtgacgcgatggatatggtgttccgacggatgccggagcttggctatacgcctgatgttttctcttacaatgctcttatcaaggggctctgcgccgagaagaagagtcaagaggctcttgagctgctgcttcacatgacggccaatggcggatacaactgttctcccgacgtggtgtcatataacatagtcattgatggcctctttaaagaaggtgaggtcgacaaagcttacttcctgtttcatgaaatgccgggccaggggtttccacctgatcttgtgacatacagctcagtcattgatggcctgtgcaaggctcaagcaatggacaaggctgaagcatccctacaacagatgctttataaaggtgttatgccaaatactaggccatataacagcttgatccatggatattgctctttaggacagttggtagaggcagtgagactactcaaaaagatgtctggaggtggtcttcaactgaatgttgtcacttacaatatgctgattgactattactgcaagattggaagatgcgcagaagctaggagtatctttgattcaatggttcggaggggtcaaaaacccaatgctaccacctactgcagcttgcttcatggagatgcgacagaatggtttgaggccaaatttagtcagctaaagcacggtaattgacattctttgcaagacaggcagggtggaggatgatgtgtaccatttcaatcagatgcatggtcagtgaagggttgtctcctgacatcgtatgttttacctcactaatacatggtctctgtaccattggtgaatggaagaaggttggggactgacttttgaaatgatcaataggggcatccatccaatgctgattgcatattcttgaacacaataacggacaaccaatgcaaggaagtgttgtggaagcacaggatttctttgatctggctatacgccctggtgtgaaaccagatgttatttcatataatatactgataaatggatattgcttccatgtgaaggtggatgagtccattaagcaacttgatcatatggtctccattggcttgatggctactttaagaatggaagggttgaagatgcattagctctttacaaatcaagtggagagctatctcaccttgaaggactcttaagatagctggccagccttgatggaaattcttaaattcaaatcgccatcatatcttgtacttgttttttttttgtgtgtgtgtgtgtcttcacaaaaatccttagacactttgggctgaaggctggtagaaaaggtagtgtaatcttggaacgattttgtagagattgggcccgattatcagtggcgctgaagaatcttcgctccagcaaccttcacaggctttaaattgtcagggaggccattcttttcttgtggttgcagtagaaacagtgggtcatggcattatctgcaaaggagaagaaccatccaactgttcctctgcagagaattactcattcatggttcacatgtctaattcgcaacatgtgaaagaggggaaatgaatgaacaataaaagatgcaggagaattattgcaaggaaaatctgcacccataaaaagccaggatcgccgatccgtctccatacagtatcctctggatggggacccgttgctcctacttccagaagaagccccccctttacccttagattgtggcaggccaggcctacagtacaggctgcagatctggattccgtcatattcttctttagact

SEQ ID NO: 68063 - DNA, 1173 bp, Zea Mays
  misc_feature (1)..(2): n is a, c, g, or t
nntgtaggtgacttttaataatattcccattgccggtcacaaaactcaagtattgtcacagatctttttattagggacataaagaatctattttgtgtggctacaaaggttacccatgctggcagaagcaatctactttcgtgtacgtacgaccaacctactaaaacatgccttgttttatgtatgttgctgcatcccgtatcagagaacacatagctttcgtctcctggggaactaattcgatgccacccgcaactccttttttataaatattatgttgtttgcttatttaaaaccaaacttcatgtatgatacatgttctgtctatgtactcttaagtttgtgttaattgtgctacaacatttatctactttacaaccaaaattgcctgttatacatacatacacaagttcgtccacgtcaacatttatctactctacaaccatcataacacactatccaccacagtatcacactatacatacatatgttcacttcgtcacgcgcgcatgggcgcgcgcaatacactagttaatagtaggcagcccaggatccacagaagaaaggtatttggcccacagcctgaaagtgaaagttgcaggacctgtgttgctggctggtgaaggtagccagcccactgaagactgggtccactgaagaccatcttggtggccacgctcggcgctcggcaggtcgctggaggagaacggaggcatgtaccgcgtcgtctccaaggagtgggaccatgaagatcgagaagatgaccatggcaaggctcagggacgacgacgccgtgcgtcgcgaccttcgcgacatcttcatcttttggttttgaagcacaagagaattggaaatcaacaactggtgtcactggttattcttaagaaccatttgctaccgaatgtagtccaaaggctccttaactcacaaacacatgagacacaaaaatatagaaagaccaaatattctcattcatctattctgttcactggttataataaatggtggtgtcctctctatatagtgcaaagttagagtttcgactagatgggccacatgggcctttggggaccaaactggtttcttaacactctgccttggccctcttgccgcaagatgcacatgtcccaaaactctacaaaacctattggaaaatttttggagaaagagtac

SEQ ID NO: 68064 - DNA, 2791 bp, Zea Mays
cagaggcagtcaacggatgatctcacatactgcaggatttctcggggagcggagggtcggccaggacctgattgggctccagggcgcgatctttgagcgcagatttggtgcccgcgatctgccttggatttgatttaagatttggggagatcggttgtgttcgccctgcgagatcctattattttcattcagtgactgaacctgtcgagactgaagcaaggagggacagagcaaaaaactctcttgagaactgggcatccaatcagaaagatcaagaatcctttgcaaaagcctccgaaccggcggcggtggcagaagccggtctcgggccacgatggcgtcgagcgctggcggcgcgtcgtcgtcgctggtgaagaacgagccctacatgcgtgctgtcaagatctacctcaagagcctagacatccaaatggagaaacagctagccaagacatggagaagcacaacgggtcgtaagggaggactgggagatcgacctcgccaagcttctatcaaccaaaagaaaatcatgctcctcaacagatagcagaacatcctatttgaaatgagtttgtgaataagtggcgcacgacgatagcgggcgattcatatcgcgggtggttccagacgtgggcaccgggcgtgagatttttaatgcctactgctcgctccacatgatcatttatcactggctccagcatgtcatgctgctcatgctgctgcaagggtggcaaataagaagcttgtccacatgttcataggtgaaggacagattaatctgaatggagctcgatgggtgcaggtagtaccaattgcacatctggtgtctcaagaagttcactaaggattatggtatgacctttttcttcctggcaaaagcatgtcaactttgtcgattccctcatttttgttatcgattgatttggaaattatgctggtgatgaagggattgtctatgtttggaaagaatggttccagaacaaaataccattataatgaaataattagttatttagacctatttatacctggtaaacttatgggcttctttacaacaaaaaaggttcttatgttacagtagacactagcacatacaacagacttcttgtgatgctccaaagttgatgaaaggaacctggggcaatagcataaaatgacttgcataaccttggttaccaaaataagctgaataactatgagcactcccatctgtttcgaaagaattaagagccaccttcatccatacatggattacctatttctccatgtcagtttgcaaataattccattaaggagtgtcggggttgccgctttgttgaagctcaagtgtaagcagagacgaagcgtcgtgtgaaaaactgagatggatagggagtggcctctcatgtgtgtgcatcaagagaaaaggcacatatgaaagaatatgcaagaacttcagacccgtacaggaacaagcattgctgcattggaaacaatctggaatgcattgggctttaacgtgtctgggcgtaagtgaaagctaaatgtattcattcaacttgtagtaaattgtcttggtcatcttatcactgcagctgagctgttcagtgcgcttagaggtcgtctttacgacagcaacaaaaatttagtaatggcaacattgtccaccattggtggtcttgtatctgctatgggaccttctgttgaaaagtcaagcaagggtattttggcagatgtgctgaagtgtcttggtgacaataagaagcacatgcgagaatgcacattgactgctctagattcgttggttgctgcagcccaacttgaaaagatggttccatatattatagtgtctttgggtgatcagaaaacagttcagaagggcgaaaagatctctttgattggttgtctaagcatgtttcaaaaataggtgattcatctgaggctttgccattgttgaagccatctgcatcttctttgatggataaatcttctaaagttcgcaaagctgctgaatccttaatgaatgaaattctcaggatctgtggccaagaaatggtgggacggaacttgaaagatttgccatcacctactttggccattgtatcagaaaggctgaaactgtctactttgaaagatttgccatcacctactttggccattgtatcagaaaggctgaaactgtctactgcacatgaaggattttctgaatctgttaaggtggtgtcaacaagcatgagtttgccatcaaaagcaggtttaaagaacaataaacatggtcctaacgatcgtggttctaatgtgggcaaacctgtgtcccaagtataaaaatggcaagaccaatttccaatatatttatttacacaaatgcacatccaacacatccttcacaagtagcatgtctgtatggatctcctttgctttcataatatattaccgtctgattttaagtgtaggattgcactatcccatttaaacaaggtttatttatgtgatatataggaaccgtaacaacgtgcgaacacctaacaattattcataaaaatcgtatctctactcctattaagtggcagaggagggcgtgcacaagggcgaggccatgacctagcccagaagccccctcgaccgtcgtcctcgcctgctcgtccccctagaaacctcgatgtcgcccctcgtgcgaacttcgcgccgacagtttcgcccgttcggctcgctcgccgtttggtttcgttccccaattcttcttgcacgcatctgattgcgaccctcgcctcccacacaactgaaactgccctccccccctcccccgcactgc

SEQ ID NO: 68065 - DNA, 1130 bp, Zea Mays
cttcaccctgataaggtggcaacacaagtatctgaaaaattgactaaatcatataaacacctagccagacagaaagcgtgctttaatttccaaaatgtatggttatgcaactctatcaatgtcagtttaacatctaaaaaacagactgtccatgggtgcaaaaacaaaaagaacctagcagtgccatggaataacttctaagaaattgactaaatacagtacaccccccataaacattgtaaacagaaagtaaagctgtaagaggaccaacctggctgattcgtaagcgaatactctcaggataatgatagaagttatgcacagctgcaaaacctagcagttcaaattttgaaccagcctcttgtgttgccttttttactaccagaagcatttcccatccatgttctccaatatctataggcgtggaacctagagtgcaatgatataagcaaatagaagtcatgagtaaaacaaactatcatatttcaaaaccttcagttaccttcaaccagaagaagtacaagaggtaccagacgagaataaaagaaatgcagcagcaccttggagttcaactcgaacaatctgggaattatatacaaatcaatctcaaaattaatgggaactgaatgggaaaacatttagaacagagaacaagttgaatgtaaattttcatggatctaacgtattcatactacataccagattaaacattctgaacatggaaaatacatgtgttttaacggagtaagtgattgggctttatatttattgagaaaatatagtcatctatactacctattaagaacgcaaggggtaggctgcctcccctggttctgcctccgggtaatctggaccgtccgtatctactgcccacgatctactgcatcgacatcgtctaacccacgtagcatcccgcagtcgttgcctcccaccgccctgcgccgcgcgagtcgtggccggccctcaccccccgaccccgtgcgctgctcaaggacccatccggggatgctaggtctccgcagtcgccacctcccgcctccctacgccgatccgcccctcgcgccgccatcatcggatccgccccagccgtgcccccttccatcctctccgcgacggacgcctccctctcc

SEQ ID NO: 68066 - DNA, 1313 bp, Zea Mays
tgttataaattatttataagtttgaaatatatgctagcttaagggaccatcctcaataagaagtatagaagagttacttagacttataagaaggccgagcccaccggcacttaacatcatcaacaacagcacaaagttataacctgaaaaacaacagggaataaaaccctgagtaacactaggttagtgttgttaggtgacgtccacttgatgatcatccttgtgctagcacttgatcgggcaggttcgtcttccagcaccaccatacggagtagcccgcgcttggggtcgacttggcttgtcttccgcattacgccattaattaacgtatctgaatgaaatgcattatgcatatgaatgcatatagataggaatatcataaaccatagagaaccgtttacgagcactctatctctcttgactagagcacaatatctaaacttagactaaaaatagaaatcattacattaacttctagaattactattctcagctattatgcagcataagttccactaaattaaatatttcatttatcctgcattttagtcctaaggtgcaccatattacacatttatttcacacgattacattaccggaggggctgaggtattttagcaaacatctaacacaaacatgacgcatctgctaaacacgaaaattattacgactaatgagtctagttaatccaattcgattaaccgaaataatatattggcctaccaagaccaaatggattcgatatccgctagggcgatgacaattttataacttagacctttgatcgagtcctaagagagcgcttataggcctcgcttctctcgaacatcagggatttctcatccaaagcaactctgactcaaagcttgcgagaatgtcgacagtctccgaataaaatcttcgatcgaacacctggcgagcattgaactgagcttcacttcgacgaccgccagatcgatatcgggactcgacggcaacgcaacaccaccacgagatagaggcaaactggctacgacggcctaggacgagtgcggaggctgacagcaggggacttcacgatgggcagtgaggctcaacggcgaacgacgtgacgacgaaacaatgacgaactagcaagttgagccacggcgagcaatgtcgacaacaagaccagggctgcacagatccggggctgctgcacgcacgacgtgataacgaacgacgacaatcggcgaggtcgacgacgcaatagggattaaggccgagcgagccgagagggcgcgctggcgagcagaaagccgcgtgagcacaggacagggaaaacgacgggctcg

SEQ ID NO: 68067 - DNA, 622 bp, Zea Mays
acttacaattttgtctaaaagaaactaaatcactgctaagtttggagtagcatatctttggtgaatacttgctagtgaattggtttccgctatagtatatatatataagtatacactcttataggattatagtatatatatataagtatacactcttctaggatcaatcgtgaggagttcattaaattgtcttgcgacatggagtacagaaagagggtggatgcgctagtgtttttctcgttacttctcctcggatactttgctgctcatgcacatgggaagggtcatgtcacagatgatgtcagtgtttctactccagctaaagaaggaattatgcaaggaaacggagcatggtgcgttgtagggtttcctccatgcaaagataacaagtgctactgctgcattggggggcgaactcatgctcgctactctacgatggctgagtgtagacatgcctgcttctaaacaaaaattaagatcgctgttattatatacattgtaatggtaggtaatgctattaataatatatgggaattttagttttgaagcaggcatgtctacactcagccatcgtagagtagcgagcatgagttcgccccccaatgcagcagtagcacttgtt

SEQ ID NO: 68068 - DNA, 124 bp, Zea Mays
agcgggcaacatcggctttaggagccacttcccctgatgaggcatgtcgcatccaaaagcctctagcatctgtctgagtggacatctaaaaccaccttgagcatcaggttgccaccgctccgac

SEQ ID NO: 68069 - DNA, 1065 bp, Zea Mays
gtcatgaactagacaagatcagaagtttaaagaggttttaaatcgagtacaagatcgccataaggaagtacaagtctttgaggaaagtgaccttatgaaaagtttgagcaaatcaacttgtgtgcgagaagttttgtctacttgtgctgatcagtcataccttggaatattgctgaactgttgcctttgttgctcattggcttcaatacttcatacaccatcaaatgagtcatgtgcaaaattcttcgaagcatcagttcttgctctagaagaacttcatcagaggcggggtcgaatcagcaactacggctgacatgacgctacccatccagttgctcactgctcaggttatagcgaagaacattgttttagctggatacaaggagatgcagaagctctgagttttgaggatggatctatggatggttacactatcacatttgggatcagaaatgtgacgcacattgagaaagctctatcagaagcttacagttgatggttctaaagcaagggtggaggttcctatgcttggagttgagtcatgtggatgtccctatttttaaatagatagctggttgatggtgatcggcagatagaagacgggcaacatgctaaccaggcatgtgaaccttgaaccttggcaggaaaagtttgctcagatgattcaggaagccggattccagagggtggaatatgaaaacctcctgagcggtgtagttgccattcattctggactgaaactgtagagctgaatacggatggatgttttttcatgggtgcaccgcttctacaattagtagtatttgttgttttttaatgaattctataataggttcggtggcttgtaaaagcagctggtgctggctgtcagcattagcacaatatgtagaataagtagtatttgcgagaagtatgtgctggagcagtagcgtcagtggctattttggcttttaagccagctgacctcttccatttgtaaagcttttttcttggaaacgtgaaaccatccagaacatcaaattagtcttatcacatacctcctgcaatacattttttgttctaaaa

SEQ ID NO: 68070 - DNA, 1600 bp, Zea Mays
agagcttcaactaagtcaacttgttgagtcgcttgttacatatcttttgcatatgggaaaaaataatagataagaggtagtgtgagacacatattggcaactgaccaaatgacttcagatatttggggtctcatcgatgttcaaacagagaatgcacaaagtagtcagaaatgatgcttgtcaattgtcaaacttattttggttggcttattttcaagattaaatgatctctggtaactgaggagaatgctgtagatgttgattttccttttaggaaggtgaagctctccgatgtggaatggaaaatgtgcatatatgcttctgattgcagtgagattagcctcgtccaagttatgggatctgccatgaactagacaagattataagtttacagaggccttacatcaagagagtacaagattgccataaggaagtaaagtctttgaggaaagtgaccttatgagaagcttgagaaaatcaacttgtgtgtgagaagttttgtctacttgtgctaattagtcatatgatatttttagtcatgaactagacaagatcagaagtttaaagaggttttaaatcgagtacaagatcgccataaggaagtacaagtctttgaggaaagtgaccttatgaaaagtttgagcaaatcaacttgtgtgcgagaagttttgtctacttgtgctgatcagtcataccttggaatattgctgaactgttgcctttgttgctcattggcttcaatacttcatacaccatcaaatgagtcatgtgcaaaattcttcgaagcatcagttcttgctctagaagaacttcatcagaggcggggtcgaatcagcaactacggctgacatgacgctacccatccagttgctcactgctcaggttatagcgaagaacattgttttagctggatacaaggagatgcagaagctctgagttttgaggatggatctatggatggttacactatcacatttgggatcagaaatgtgacgcacattgagaaagctctatcagaagcttacagttgatggttctaaagcaagggtggaggttcctatgcttggagttgagtcatgtggatgtccctatttttaaatagatagctggttgatggtgatcggcagatagaagacgggcaacatgctaaccaggcatgtgaaccttgaaccttggcaggaaaagtttgctcagatgattcaggaagccggattccagagggtggaatatgaaaacctcctgagcggtgtagttgccattcattctggactgaaactgtagagctgaatacggatggatgttttttcatgggtgcaccgcttctacaattagtagtatttgttgttttttaatgaattctataataggttcggtggcttgtaaaagcagctggtgctggctgtcagcattagcacaatatgtagaataagtagtatttgcgagaagtatgtgctggagcagtagcgtcagtggctattttggcttttaagccagctgacctcttccatttgtaaagcttttttcttggaaacgtgaaaccatccagaacatcaaattagtcttatcacatacctcctgcaatacattttttgttctaaaa

SEQ ID NO: 68071 - DNA, 2738 bp, Zea Mays
caacgccgcagccgccgcgaaatccgcacccacccgcgcgacctctactgccgcaaggccgcagccgccgcgaaatttgcacccacccgcgcgccgcagccctttgtccgcgccggagcctagcaccgaaccgccgcggattcgccactacatcaccggccatggcttcgggcatgccacccgcgccctcgaggtggtgaggcacctggtcaccgcagggcacgacgtgcacgtggtcatcgccgcgcccgagttcgtcttcaccaccgagatcgcctcccccagcctctccgacaagctcgcgtccccgtccacatccgagatgctcgcgcccgcgccttggatggaagcccagaatcgccttccatcgaggattctacaccacgcgtcgcgccccctccccgcacgcaagcccccgcctgcacattctccgccaccccatcccctgtccggcgcgtgtgccacggcctccctcgaccagcggcacgcgtacgccatcaccccctccctactgctcccatccgcggtgctcaccttcgccatcgcgcaatccatcaaggtcctcaccacctggtataaggagaaccggtgggacgcgaagcagctggtgggctccggtgggatgccgtcctcgcactcagccaccgtcacagcgctcgctgtcgccgtcggcctgtaagaggggctcgccagctcgttgttcgccaccgccgtcgtctttgtcttcgtggcacaataagccacttcaggcttcagtctgttctgtgatcagcagaacattatgggctctaaagcaggaggacttttgagatttacagagcttcaactaagtcaacttgttgagtcgcttgttacatatcttttgcatatgggaaaaaataatagataagaggtagtgtgagacacatattggcaactgaccaaatgacttcagatatttggggtctcatcgatgttcaaacagagaatgcacaaagtagtcagaaatggtaattatattgtcattgttgttgctggtagtgatgttactgttctactatcacgaaggagaaatttgatccaattggtgggcctttgcctaaactttcacaagctgattccaagcaatgtgtctaaaatctttttcttgtgttggtaaccaccagatgcttgtcaattgtcaaacttattttggttggcttattttcaagattaaatgatctctggtaactgaggagaatgctgtagatgttgattttccttttaggaaggtgaagctctccgatgtggtagggggaatggaaaatgtgcatatatgcttctgattgcagtgagattagcctcgtccaagttatgggatctgccatgaactagacaagattataagtttacagaggccttacatcaagagagtacaagattgccataaggaagtaaagtctttgaggaaagtgaccttatgagaagcttgagaaaatcaacttgtgtgtgagaagttttgtctacttgtgctaattagtcatatgatatttttagtcatgaactagacaagatcagaagtttaaagaggttttaaatcgagtacaagatcgccataaggaagtacaagtctttgaggaaagtgaccttatgaaaagtttgagcaaatcaacttgtgtgcgagaagttttgtctacttgtgctgatcagtcataccttggaatattgctgaactgttgcctttgttgctcattggcttcaatacttcatacaccatcaaatgagtcatgtgcaaaattcttcgaagcatcagttcttgctctagaagaacttcatcaggttatagcgaagaacattgttttagctggatacaaggagatgcagaagctctgagttttgaggatggatctatggatggttacactatcacatttgggatcagaaatgtgacgcacattgagaaagctctatcagaagcttacaggtcggctaatttagaaccctaacaattattattgctcatgtttaaattattactgtttgaacttcagtatatgtgtctattcttcgtgattaagtttttttgtcttcgtgtgcagtatcatggattaagcttttttatattttaccatgtttgtttagttgatggttctgaaatgtcattactgtcatatcaattggcatatttcaaaatcttttttgcttagttgatggttctaaagcaagggtggaggttcctatgcttggagttgagtcatgtggatgtccctatttttaaatagatagctggttgatggtgatcggcagatagaagacgggcaacatgctaaccaggcatgtgaaccttgaaccttggcaggaaaagtttgctcagatgattcaggaagccggattccagagggtggaatatgaaaacctcctgagcggtgtagttgccattcattctggactgaaactgtagagctgaatacggatggatgttttttcatgggtgcaccgcttctacaattagtagtatttgttgttttttaatgaattctataataggttcggtggcttgtaaaagcagctggtgctggctgtcagcattagcacaatatgtagaataagtagtatttgcgagaagtatgtgctggagcagtagcgtcagtggctattttggcttttaagccagctgacctcttccatttgtaaagcttttttcttggaaacgtgaaaccatccagaacatcaaattagtcttatcacatacctcctgcaatacattttttgttctaaaa

SEQ ID NO: 68072 - DNA, 2983 bp, Zea Mays
caacgccgcagccgccgcgaaatccgcacccacccgcgcgacctctactgccgcaaggccgcagccgccgcgaaatttgcacccacccgcgcgccgcagccctttgtccgcgccggagcctagcaccgaaccgccgcggattcgccactacatcaccggccatggcttcgggcatgccacccgcgccctcgaggtggtgaggcacctggtcaccgcagggcacgacgtgcacgtggtcatcgccgcgcccgagttcgtcttcaccaccgagatcgcctcccccagcctctccgacaagctcgcgtccccgtccacatccgagatgctcgcgcccgcgccttggatggaagcccagaatcgccttccatcgaggattctacaccacgcgtcgcgccccctccccgcacgcaagcccccgcctgcacattctccgccaccccatcccctgtccggcgcgtgtgccacggcctccctcgaccagcggcacgcgtacgccatcaccccctccctactgctcccatccgcggtgctcaccttcgccatcgcgcaatccatcaaggtcctcaccacctggtataaggagaaccggtgggacgcgaagcagctggtgggctccggtgggatgccgtcctcgcactcagccaccgtcacagcgctcgctgtcgccgtcggcctgtaagaggggctcgccagctcgttgttcgccaccgccgtcgtctttgtcttcgtggcacaataagccacttcaggcttcagtctgttctgtgatcagcagaacattatgggctctaaagcaggaggacttttgagatttacagagcttcaactaagtcaacttgttgagtcgcttgttacatatcttttgcatatgggaaaaaataatagataagaggtagtgtgagacacatattggcaactgaccaaatgacttcagatatttggggtctcatcgatgttcaaacagagaatgcacaaagtagtcagaaatggtaattatattgtcattgttgttgctggtagtgatgttactgttctactatcacgaaggagaaatttgatccaattggtgggcctttgcctaaactttcacaagctgattccaagcaatgtgtctaaaatctttttcttgtgttggtaaccaccagatgcttgtcaattgtcaaacttattttggttggcttattttcaagattaaatgatctctggtaactgaggagaatgctgtagatgttgattttccttttaggaaggtgaagctctccgatgtggtagggggaatggaaaatgtgcatatatgcttctgattgcagtgagattagcctcgtccaagttatgggatctgccatgaactagacaagattataagtttacagaggccttacatcaagagagtacaagattgccataaggaagtaaagtctttgaggaaagtgaccttatgagaagcttgagaaaatcaacttgtgtgtgagaagttttgtctacttgtgctaattagtcatatgatatttttagtcatgaactagacaagatcagaagtttaaagaggttttaaatcgagtacaagatcgccataaggaagtacaagtctttgaggaaagtgaccttatgaaaagtttgagcaaatcaacttgtgtgcgagaagttttgtctacttgtgctgatcagtcataccttggaatattgctgaactgttgcctttgttgctcattggcttcaatacttcatacaccatcaaatgagtcatgtgcaaaattcttcgaagcatcagttcttgctctagaagaacttcatcaggtgattactcttttgctttcctttattgaataattagcacatgtgcgttcaaaaaaattgccacatgaatgaaatgatatattctcgaattattctattgagttttttgtttttatcacaacaccaccctggcgcgctagaggcggggtcgaatcagcaactacggctgacatgacgctacccatccagttgctcactgctcaggttatagcgaagaacattgttttagctggatacaaggagatgcagaagctctgagttttgaggatggatctatggatggttacactatcacatttgggatcagaaatgtgacgcacattgagaaagctctatcagaagcttacaggtcggctaatttagaaccctaacaattattattgctcatgtttaaattattactgtttgaacttcagtatatgtgtctattcttcgtgattaagtttttttgtcttcgtgtgcagtatcatggattaagcttttttatattttaccatgtttgtttagttgatggttctgaaatgtcattactgtcatatcaattggcatatttcaaaatcttttttgcttagttgatggttctaaagcaagggtggaggttcctatgcttggagttgagtcatgtggatgtccctatttttaaatagatttatgatgcttactcgttttctatgattccggctattgaagagctggttgatggtgatcggcagatagaagacgggcaacatgctaaccaggcatgtgaaccttgaaccttggcaggaaaagtttgctcagatgattcaggaagccggattccagagggtggaatatgaaaacctcctgagcggtgtagttgccattcattctggactgaaactgtagagctgaatacggatggatgttttttcatgggtgcaccgcttctacaattagtagtatttgttgttttttaatgaattctataataggttcggtggcttgtaaaagcagctggtgctggctgtcagcattagcacaatatgtagaataagtagtatttgcgagaagtatgtgctggagcagtagcgtcagtggctattttggcttttaagccagctgacctcttccatttgtaaagcttttttcttggaaacgtgaaaccatccagaacatcaaattagtcttatcacatacctcctgcaatacattttttgttctaaaa

SEQ ID NO: 68073 - DNA, 2612 bp, Zea Mays
caacgccgcagccgccgcgaaatccgcacccacccgcgcgacctctactgccgcaaggccgcagccgccgcgaaatttgcacccacccgcgcgccgcagccctttgtccgcgccggagcctagcaccgaaccgccgcggattcgccactacatcaccggccatggcttcgggcatgccacccgcgccctcgaggtggtgaggcacctggtcaccgcagggcacgacgtgcacgtggtcatcgccgcgcccgagttcgtcttcaccaccgagatcgcctcccccagcctctccgacaagctcgcgtccccgtccacatccgagatgctcgcgcccgcgccttggatggaagcccagaatcgccttccatcgaggattctacaccacgcgtcgcgccccctccccgcacgcaagcccccgcctgcacattctccgccaccccatcccctgtccggcgcgtgtgccacggcctccctcgaccagcggcacgcgtacgccatcaccccctccctactgctcccatccgcggtgctcaccttcgccatcgcgcaatccatcaaggtcctcaccacctggtataaggagaaccggtgggacgcgaagcagctggtgggctccggtgggatgccgtcctcgcactcagccaccgtcacagcgctcgctgtcgccgtcggcctgtaagaggggctcgccagctcgttgttcgccaccgccgtcgtctttgtcttcgtggcacaataagccacttcaggcttcagtctgttctgtgatcagcagaacattatgggctctaaagcaggaggacttttgagatttacagagcttcaactaagtcaacttgttgagtcgcttgttacatatcttttgcatatgggaaaaaataatagataagaggtagtgtgagacacatattggcaactgaccaaatgacttcagatatttggggtctcatcgatgttcaaacagagaatgcacaaagtagtcagaaatgatgcttgtcaattgtcaaacttattttggttggcttattttcaagattaaatgatctctggtaactgaggagaatgctgtagatgttgattttccttttaggaaggtgaagctctccgatgtggtagggggaatggaaaatgtgcatatatgcttctgattgcagtgagattagcctcgtccaagttatgggatctgacaagattataagtttacagaggccttacatcaagagagtacaagattgccataaggaagtaaagtctttgaggaaagtgaccttatgagaagcttgagaaaatcaacttgtgtgtgagaagttttgtctacttgtgctaattagtcatatgatatttttagtcatgaactagacaagatcagaagtttaaagaggttttaaatcgagtacaagatcgccataaggaagtacaagtctttgaggaaagtgaccttatgaaaagtttgagcaaatcaacttgtgtgcgagaagttttgtctacttgtgctgatcagtcataccttggaatattgctgaactgttgcctttgttgctcattggcttcaatacttcatacaccatcaaatgagtcatgtgcaaaattcttcgaagcatcagttcttgctctagaagaacttcatcaggttatagcgaagaacattgttttagctggatacaaggagatgcagaagctctgagttttgaggatggatctatggatggttacactatcacatttgggatcagaaatgtgacgcacattgagaaagctctatcagaagcttacaggtcggctaatttagaaccctaacaattattattgctcatgtttaaattattactgtttgaacttcagtatatgtgtctattcttcgtgattaagtttttttgtcttcgtgtgcagtatcatggattaagcttttttatattttaccatgtttgtttagttgatggttctgaaatgtcattactgtcatatcaattggcatatttcaaaatcttttttgcttagttgatggttctaaagcaagggtggaggttcctatgcttggagttgagtcatgtggatgtccctatttttaaatagatttatgatgcttactcgttttctatgattccggctattgaagagctggttgatggtgatcggcagatagaagacgggcaacatgctaaccaggcatgtgaaccttgaaccttggcaggaaaagtttgctcagatgattcaggaagccggattccagagggtggaatatgaaaacctcctgagcggtgtagttgccattcattctggactgaaactgtagagctgaatacggatggatgttttttcatgggtgcaccgcttctacaattagtagtatttgttgttttttaatgaattctataataggttcggtggcttgtaaaagcagctggtgctggctgtcagcattagcacaatatgtagaataagtagtatttgcgagaagtatgtgctggagcagtagcgtcagtggctattttggcttttaagccagctgacctcttccatttgtaaagcttttttcttggaaacgtgaaaccatccagaacatcaaattagtcttatcacatacctcctgcaatacattttttgttctaaaa

SEQ ID NO: 68074 - DNA, 3251 bp, Zea Mays
gactgcccccgctccttgcccaacgaaacccccgctcccgcacgccccgccgacctctgctgccgcaacgccgcagccgccgcgaaatccgcacccacccgcgcgacctctactgccgcaaggccgcagccgccgcgaaatttgcacccacccgcgcgccgcagccctttgtccgcgccggagcctagcaccgaaccgccgcggattcgccactacatcaccggccatggcttcgggcatgccacccgcgccctcgaggtggtgaggcacctggtcaccgcagggcacgacgtgcacgtggtcatcgccgcgcccgagttcgtcttcaccaccgagatcgcctcccccagcctctccgacaagctcgcgtccccgtccacatccgagatgctcgcgcccgcgccttggatggaagcccagaatcgccttccatcgaggattctacaccacgcgtcgcgccccctccccgcacgcaagcccccgcctgcacattctccgccaccccatcccctgtccggcgcgtgtgccacggcctccctcgaccagcggcacgcgtacgccatcaccccctccctactgctcccatccgcggtgctcaccttcgccatcgcgcaatccatcaaggtcctcaccacctggtataaggagaaccggtgggacgcgaagcagctggtgggctccggtgggatgccgtcctcgcactcagccaccgtcacagcgctcgctgtcgccgtcggcctgtaagaggggctcgccagctcgttgttcgccaccgccgtcgtctttgtcttcgtggttggttccccttcccactccccctctccctttcgacaccaaaaaaaacgcgctgaccatctttggcaagctgtcgcccaccccaccccaaaaccctagctctattccatcgctcccgtactccctattgcggcggttgagaacagtggcgacaagatctcatggagagaagctatgcggaccccaggaaaggtgaaatcgtcgtgcgatggtggagatggccgatgggaggctccaccagccctagggtgtggccaacaagacgctactcgccactgcgtgggtcggcagtgagatctcagggagagaagccatgcaaccccatgaaaggcgaaactgtcgcacgatggtggagacgaccggcggtaggatgcaagtatgagcatttggcaaagagagtattcctccccatgctcccgctccctcctgcaccccacgctcgccgacgagccgctcgacctcgtcgcagcttgccgagccatcatgcgccccggtgcggtggtcaacatcaatccacgccgtcaatcgcgtgttggtcctacgctcagtgcatgagtccttcaactggcggtggtggagcaaccgtactaccacagcgcatacacaggacgtagagaacaactccagaaggcacaataagccacttcaggcttcagtctgttctgtgatcagcagaacattatgggctctaaagcaggaggacttttgagatttacagagcttcaactaagtcaacttgttgagtcgcttgttacatatcttttgcatatgggaaaaaataatagataagaggtagtgtgagacacatattggcaactgaccaaatgacttcagatatttggggtctcatcgatgttcaaacagagaatgcacaaagtagtcagaaatggtaattatattgtcattgttgttgctggtagtgatgttactgttctactatcacgaaggagaaatttgatccaattggtgggcctttgcctaaactttcacaagctgattccaagcaatgtgtctaaaatctttttcttgtgttggtaaccaccagatgcttgtcaattgtcaaacttattttggttggcttattttcaagattaaatgatctctggtaactgaggagaatgctgtagatgttgattttccttttaggaaggtgaagctctccgatgtggtagggggaatggaaaatgtgcatatatgcttctgattgcagtgagattagcctcgtccaagttatgggatctgccatgaactagacaagattataagtttacagaggccttacatcaagagagtacaagattgccataaggaagtaaagtctttgaggaaagtgaccttatgagaagcttgagaaaatcaacttgtgtgtgagaagttttgtctacttgtgctaattagtcatatgatatttttagtcatgaactagacaagatcagaagtttaaagaggttttaaatcgagtacaagatcgccataaggaagtacaagtctttgaggaaagtgaccttatgaaaagtttgagcaaatcaacttgtgtgcgagaagttttgtctacttgtgctgatcagtcataccttggaatattgctgaactgttgcctttgttgctcattggcttcaatacttcatacaccatcaaatgagtcatgtgcaaaattcttcgaagcatcagttcttgctctagaagaacttcatcaggttatagcgaagaacattgttttagctggatacaaggagatgcagaagctctgagttttgaggatggatctatggatggttacactatcacatttgggatcagaaatgtgacgcacattgagaaagctctatcagaagcttacagttgatggttctaaagcaagggtggaggttcctatgcttggagttgagtcatgtggatgtccctatttttaaatagatttatgatgcttactcgttttctatgattccggctattgaagagctggttgatggtgatcggcagatagaagacgggcaacatgctaaccaggcatgtgaaccttgaaccttggcaggaaaagtttgctcagatgattcaggaagccggattccagagggtggaatatgaaaacctcctgagcggtgtagttgccattcattctggactgaaactgtagagctgaatacggatggatgttttttcatgggtgcaccgcttctacaattagtagtatttgttgttttttaatgaattctataataggttcggtggcttgtaaaagcagctggtgctggctgtcagcattagcacaatatgtagaataagtagtatttgcgagaagtatgtgctggagcagtagcgtcagtggctattttggcttttaagccagctgacctcttccatttgtaaagcttttttcttggaaacgtgaaaccatccagaacatcaaattagtcttatcacatacctcctgcaatacattttttgttctaaaa

SEQ ID NO: 68075 - DNA, 2621 bp, Zea Mays
gactgcccccgctccttgcccaacgaaacccccgctcccgcacgccccgccgacctctgctgccgcaacgccgcagccgccgcgaaatccgcacccacccgcgcgacctctactgccgcaaggccgcagccgccgcgaaatttgcacccacccgcgcgccgcagccctttgtccgcgccggagcctagcaccgaaccgccgcggattcgccactacatcaccggccatggcttcgggcatgccacccgcgccctcgaggtccgccgccgctctctccgcccgcttgcagcttgcctgcctggtgccggcgcgtactgtttcctgaccccatcgtctccaggtggtgaggcacctggtcaccgcagggcacgacgtgcacgtggtcatcgccgcgcccgagttcgtcttcaccaccgagatcgcctcccccagcctctccgacaagctcgcgtccccgtccacatccgagatgctcgcgcccgcgccttggatggaagcccagaatcgccttccatcgaggattctacaccacgcgtcgcgccccctccccgcacgcaagcccccgcctgcacattctccgccaccccatcccctgtccggcgcgtgtgccacggcctccctcgaccagcggcacgcgtacgccatcaccccctccctactgctcccatccgcggtgctcaccttcgccatcgcgcaatccatcaaggtcctcaccacctggtataaggagaaccggtgggacgcgaagcagctggtgggctccggtgggatgccgtcctcgcactcagccaccgtcacagcgctcgctgtcgccgtcggcctgtaagaggggctcgccagctcgttgttcgccaccgccgtcgtctttgtcttcgtggcacaataagccacttcaggcttcagtctgttctgtgatcagcagaacattatgggctctaaagcaggaggacttttgagatgcttgtcaattgtcaaacttattttggttggcttattttcaagattaaatgatctctggtaactgaggagaatgctgtagatgttgattttccttttaggaaggtgaagctctccgatgtggtagggggttagtacccctttcctctcctctagcatgcttaaggaggtattgttgggcttttttatactcatactcagttgtatatatgtttctcaggaatggaaaatgtgcatatatgcttctgattgcagtgagattagcctcgtccaagttatgggatctgccatgaactagacaagattataagtttacagaggccttacatcaagagagtacaagattgccataaggaagtaaagtctttgaggaaagtgaccttatgagaagcttgagaaaatcaacttgtgtgtgagaagttttgtctacttgtgctaattagtcatatgatatttttagtcatgaactagacaagatcagaagtttaaagaggttttaaatcgagtacaagatcgccataaggaagtacaagtctttgaggaaagtgaccttatgaaaagtttgagcaaatcaacttgtgtgcgagaagttttgtctacttgtgctgatcagtcataccttggaatattgctgaactgttgcctttgttgctcattggcttcaatacttcatacaccatcaaatgagtcatgtgcaaaattcttcgaagcatcagttcttgctctagaagaacttcatcaggtgattactcttttgctttcctttattgaataattagcacatgtgcgttcaaaaaaattgccacatgaatgaaatgatatattctcgaattattctattgagttttttgtttttatcacaacaccaccctggcgcgctagaggcggggtcgaatcagcaactacggctgacatgacgctacccatccagttgctcactgctcaggttatagcgaagaacattgttttagctggatacaaggagatgcagaagctctgagttttgaggatggatctatggatggttacactatcacatttgggatcagaaatgtgacgcacattgagaaagctctatcagaagcttacagttgatggttctaaagcaagggtggaggttcctatgcttggagttgagtcatgtggatgtccctatttttaaatagatagctggttgatggtgatcggcagatagaagacgggcaacatgctaaccaggcatgtgaaccttgaaccttggcaggaaaagtttgctcagatgattcaggaagccggattccagagggtggaatatgaaaacctcctgagcggtgtagttgccattcattctggactgaaactgtagagctgaatacggatggatgttttttcatgggtgcaccgcttctacaattagtagtatttgttgttttttaatgaattctataataggttcggtggcttgtaaaagcagctggtgctggctgtcagcattagcacaatatgtagaataagtagtatttgcgagaagtatgtgctggagcagtagcgtcagtggctattttggcttttaagccagctgacctcttccatttgtaaagcttttttcttggaaacgtgaaaccatccagaacatcaaattagtcttatcacatacctcctgcaatacattttttgttctaaaa

SEQ ID NO: 68076 - DNA, 2305 bp, Zea Mays
gactgcccccgctccttgcccaacgaaacccccgctcccgcacgccccgccgacctctgctgccgcaacgccgcagccgccgcgaaatccgcacccacccgcgcgacctctactgccgcaaggccgcagccgccgcgaaatttgcacccacccgcgcgccgcagccctttgtccgcgccggagcctagcaccgaaccgccgcggattcgccactacatcaccggccatggcttcgggcatgccacccgcgccctcgaggtggtgaggcacctggtcaccgcagggcacgacgtgcacgtggtcatcgccgcgcccgagttcgtcttcaccaccgagatcgcctcccccagcctctccgacaagctcgcgtccccgtccacatccgagatgctcgcgcccgcgccttggatggaagcccagaatcgccttccatcgaggattctacaccacgcgtcgcgccccctccccgcacgcaagcccccgcctgcacattctccgccaccccatcccctgtccggcgcgtgtgccacggcctccctcgaccagcggcacgcgtacgccatcaccccctccctactgctcccatccgcggtgctcaccttcgccatcgcgcaatccatcaaggtcctcaccacctggtataaggagaaccggtgggacgcgaagcagctggtgggctccggtgggatgccgtcctcgcactcagccaccgtcacagcgctcgctgtcgccgtcggcctgtaagaggggctcgccagctcgttgttcgccaccgccgtcgtctttgtcttcgtggcacaataagccacttcaggcttcagtctgttctgtgatcagcagaacattatgggctctaaagcaggaggacttttgagattaaatgatctctggtaactgaggagaatgctgtagatgttgattttccttttaggaaggtgaagctctccgatgtggtagggggaatggaaaatgtgcatatatgcttctgattgcagtgagattagcctcgtccaagttatgggatctgccatgaactagacaagattataagtttacagaggccttacatcaagagagtacaagattgccataaggaagtaaagtctttgaggaaagtgaccttatgagaagcttgagaaaatcaacttgtgtgtgagaagttttgtctacttgtgctaattagtcatatgatatttttagtcatgaactagacaagatcagaagtttaaagaggttttaaatcgagtacaagatcgccataaggaagtacaagtctttgaggaaagtgaccttatgaaaagtttgagcaaatcaacttgtgtgcgagaagttttgtctacttgtgctgatcagtcataccttggaatattgctgaactgttgcctttgttgctcattggcttcaatacttcatacaccatcaaatgagtcatgtgcaaaattcttcgaagcatcagttcttgctctagaagaacttcatcagaggcggggtcgaatcagcaactacggctgacatgacgctacccatccagttgctcactgctcaggttatagcgaagaacattgttttagctggatacaaggagatgcagaagctctgagttttgaggatggatctatggatggttacactatcacatttgggatcagaaatgtgacgcacattgagaaagctctatcagaagcttacagttgatggttctaaagcaagggtggaggttcctatgcttggagttgagtcatgtggatgtccctatttttaaatagatttatgatgcttactcgttttctatgattccggctattgaagagctggttgatggtgatcggcagatagaagacgggcaacatgctaaccaggcatgtgaaccttgaaccttggcaggaaaagtttgctcagatgattcaggaagccggattccagagggtggaatatgaaaacctcctgagcggtgtagttgccattcattctggactgaaactgtagagctgaatacggatggatgttttttcatgggtgcaccgcttctacaattagtagtatttgttgttttttaatgaattctataataggttcggtggcttgtaaaagcagctggtgctggctgtcagcattagcacaatatgtagaataagtagtatttgcgagaagtatgtgctggagcagtagcgtcagtggctattttggcttttaagccagctgacctcttccatttgtaaagcttttttcttggaaacgtgaaaccatccagaacatcaaattagtcttatcacatacctcctgcaatacattttttgttctaaaa

SEQ ID NO: 68077 - DNA, 2245 bp, Zea Mays
gactgcccccgctccttgcccaacgaaacccccgctcccgcacgccccgccgacctctgctgccgcaacgccgcagccgccgcgaaatccgcacccacccgcgcgacctctactgccgcaaggccgcagccgccgcgaaatttgcacccacccgcgcgccgcagccctttgtccgcgccggagcctagcaccgaaccgccgcggattcgccactacatcaccggccatggcttcgggcatgccacccgcgccctcgaggtggtgaggcacctggtcaccgcagggcacgacgtgcacgtggtcatcgccgcgcccgagttcgtcttcaccaccgagatcgcctcccccagcctctccgacaagctcgcgtccccgtccacatccgagatgctcgcgcccgcgccttggatggaagcccagaatcgccttccatcgaggattctacaccacgcgtcgcgccccctccccgcacgcaagcccccgcctgcacattctccgccaccccatcccctgtccggcgcgtgtgccacggcctccctcgaccagcggcacgcgtacgccatcaccccctccctactgctcccatccgcggtgctcaccttcgccatcgcgcaatccatcaaggtcctcaccacctggtataaggagaaccggtgggacgcgaagcagctggtgggctccggtgggatgccgtcctcgcactcagccaccgtcacagcgctcgctgtcgccgtcggcctgtaagaggggctcgccagctcgttgttcgccaccgccgtcgtctttgtcttcgtggcacaataagccacttcaggcttcagtctgttctgtgatcagcagaacattatgggctctaaagcaggaggacttttgagatgcttgtcaattgtcaaacttattttggttggcttattttcaagattaaatgatctctggtaactgaggagaatgctgtagatgttgattttccttttaggaaggtgaagctctccgatgtggtagggggaatggaaaatgtgcatatatgcttctgattgcagtgagattagcctcgtccaagttatgggatctgccatgaactagacaagattataagtttacagaggccttacatcaagagagtacaagattgccataaggaagtaaagtctttgaggaaagtgaccttatgagaagcttgagaaaatcaacttgtgtgtgagaagttttgtctacttgtgctaattagtcatatgatatttttagtcatgaactagacaagatcagaagtttaaagaggttttaaatcgagtacaagatcgccataaggaagtacaagtctttgaggaaagtgaccttatgaaaagtttgagcaaatcaacttgtgtgcgagaagttttgtctacttgtgctgatcagtcataccttggaatattgctgaactgttgcctttgttgctcattggcttcaatacttcatacaccatcaaatgagtcatgtgcaaaattcttcgaagcatcagttcttgctctagaagaacttcatcaggttatagcgaagaacattgttttagctggatacaaggagatgcagaagctctgagttttgaggatggatctatggatggttacactatcacatttgggatcagaaatgtgacgcacattgagaaagctctatcagaagcttacagttgatggttctaaagcaagggtggaggttcctatgcttggagttgagtcatgtggatgtccctatttttaaatagatagctggttgatggtgatcggcagatagaagacgggcaacatgctaaccaggcatgtgaaccttgaaccttggcaggaaaagtttgctcagatgattcaggaagccggattccagagggtggaatatgaaaacctcctgagcggtgtagttgccattcattctggactgaaactgtagagctgaatacggatggatgttttttcatgggtgcaccgcttctacaattagtagtatttgttgttttttaatgaattctataataggttcggtggcttgtaaaagcagctggtgctggctgtcagcattagcacaatatgtagaataagtagtatttgcgagaagtatgtgctggagcagtagcgtcagtggctattttggcttttaagccagctgacctcttccatttgtaaagcttttttcttggaaacgtgaaaccatccagaacatcaaattagtcttatcacatacctcctgcaatacattttttgttctaaaa

SEQ ID NO: 68078 - DNA, 2290 bp, Zea Mays
gactgcccccgctccttgcccaacgaaacccccgctcccgcacgccccgccgacctctgctgccgcaacgccgcagccgccgcgaaatccgcacccacccgcgcgacctctactgccgcaaggccgcagccgccgcgaaatttgcacccacccgcgcgccgcagccctttgtccgcgccggagcctagcaccgaaccgccgcggattcgccactacatcaccggccatggcttcgggcatgccacccgcgccctcgaggtggtgaggcacctggtcaccgcagggcacgacgtgcacgtggtcatcgccgcgcccgagttcgtcttcaccaccgagatcgcctcccccagcctctccgacaagctcgcgtccccgtccacatccgagatgctcgcgcccgcgccttggatggaagcccagaatcgccttccatcgaggattctacaccacgcgtcgcgccccctccccgcacgcaagcccccgcctgcacattctccgccaccccatcccctgtccggcgcgtgtgccacggcctccctcgaccagcggcacgcgtacgccatcaccccctccctactgctcccatccgcggtgctcaccttcgccatcgcgcaatccatcaaggtcctcaccacctggtataaggagaaccggtgggacgcgaagcagctggtgggctccggtgggatgccgtcctcgcactcagccaccgtcacagcgctcgctgtcgccgtcggcctgtaagaggggctcgccagctcgttgttcgccaccgccgtcgtctttgtcttcgtggcacaataagccacttcaggcttcagtctgttctgtgatcagcagaacattatgggctctaaagcaggaggacttttgagattaaatgatctctggtaactgaggagaatgctgtagatgttgattttccttttaggaaggtgaagctctccgatgtggtagggggttagtacccctttcctctcctctagcatgcttaaggaggtattgttgggcttttttatactcatactcagttgtatatatgtttctcaggaatggaaaatgtgcatatatgcttctgattgcagtgagattagcctcgtccaagttatgggatctgccatgaactagacaagattataagtttacagaggccttacatcaagagagtacaagattgccataaggaagtaaagtctttgaggaaagtgaccttatgagaagcttgagaaaatcaacttgtgtgtgagaagttttgtctacttgtgctaattagtcatatgatatttttagtcatgaactagacaagatcagaagtttaaagaggttttaaatcgagtacaagatcgccataaggaagtacaagtctttgaggaaagtgaccttatgaaaagtttgagcaaatcaacttgtgtgcgagaagttttgtctacttgtgctgatcagtcataccttggaatattgctgaactgttgcctttgttgctcattggcttcaatacttcatacaccatcaaatgagtcatgtgcaaaattcttcgaagcatcagttcttgctctagaagaacttcatcaggttatagcgaagaacattgttttagctggatacaaggagatgcagaagctctgagttttgaggatggatctatggatggttacactatcacatttgggatcagaaatgtgacgcacattgagaaagctctatcagaagcttacagttgatggttctaaagcaagggtggaggttcctatgcttggagttgagtcatgtggatgtccctatttttaaatagatagctggttgatggtgatcggcagatagaagacgggcaacatgctaaccaggcatgtgaaccttgaaccttggcaggaaaagtttgctcagatgattcaggaagccggattccagagggtggaatatgaaaacctcctgagcggtgtagttgccattcattctggactgaaactgtagagctgaatacggatggatgttttttcatgggtgcaccgcttctacaattagtagtatttgttgttttttaatgaattctataataggttcggtggcttgtaaaagcagctggtgctggctgtcagcattagcacaatatgtagaataagtagtatttgcgagaagtatgtgctggagcagtagcgtcagtggctattttggcttttaagccagctgacctcttccatttgtaaagcttttttcttggaaacgtgaaaccatccagaacatcaaattagtcttatcacatacctcctgcaatacattttttgttctaaaa

SEQ ID NO: 68079 - DNA, 2117 bp, Zea Mays
gactgcccccgctccttgcccaacgaaacccccgctcccgcacgccccgccgacctctgctgccgcaacgccgcagccgccgcgaaatccgcacccacccgcgcgacctctactgccgcaaggccgcagccgccgcgaaatttgcacccacccgcgcgccgcagccctttgtccgcgccggagcctagcaccgaaccgccgcggattcgccactacatcaccggccatggcttcgggcatgccacccgcgccctcgaggtccgccgccgctctctccgcccgcttgcagcttgcctgcctggtgccggcgcgtactgtttcctgaccccatcgtctccaggtggtgaggcacctggtcaccgcagggcacgacgtgcacgtggtcatcgccgcgcccgagttcgtcttcaccaccgagatcgcctcccccagcctctccgacaagctcgcgtccccgtccacatccgagatgctcgcgcccgcgccttggatggaagcccagaatcgccttccatcgaggattctacaccacgcgtcgcgccccctccccgcacgcaagcccccgcctgcacattctccgccaccccatcccctgtccggcgcgtgtgccacggcctccctcgaccagcggcacgcgtacgccatcaccccctccctactgctcccatccgcggtgctcaccttcgccatcgcgcaatccatcaaggtcctcaccacctggtataaggagaaccggtgggacgcgaagcagctggtgggctccggtgggatgccgtcctcgcactcagccaccgtcacagcgctcgctgtcgccgtcggcctgtaagaggggctcgccagctcgttgttcgccaccgccgtcgtctttgtcttcgtggaatggaaaatgtgcatatatgcttctgattgcagtgagattagcctcgtccaagttatgggatctgccatgaactagacaagattataagtttacagaggccttacatcaagagagtacaagattgccataaggaagtaaagtctttgaggaaagtgaccttatgagaagcttgagaaaatcaacttgtgtgtgagaagttttgtctacttgtgctaattagtcatatgatatttttagtcatgaactagacaagatcagaagtttaaagaggttttaaatcgagtacaagatcgccataaggaagtacaagtctttgaggaaagtgaccttatgaaaagtttgagcaaatcaacttgtgtgcgagaagttttgtctacttgtgctgatcagtcataccttggaatattgctgaactgttgcctttgttgctcattggcttcaatacttcatacaccatcaaatgagtcatgtgcaaaattcttcgaagcatcagttcttgctctagaagaacttcatcaggttatagcgaagaacattgttttagctggatacaaggagatgcagaagctctgagttttgaggatggatctatggatggttacactatcacatttgggatcagaaatgtgacgcacattgagaaagctctatcagaagcttacagttgatggttctaaagcaagggtggaggttcctatgcttggagttgagtcatgtggatgtccctatttttaaatagatagctggttgatggtgatcggcagatagaagacgggcaacatgctaaccaggcatgtgaaccttgaaccttggcaggaaaagtttgctcagatgattcaggaagccggattccagagggtggaatatgaaaacctcctgagcggtgtagttgccattcattctggactgaaactgtagagctgaatacggatggatgttttttcatgggtgcaccgcttctacaattagtagtatttgttgttttttaatgaattctataataggttcggtggcttgtaaaagcagctggtgctggctgtcagcattagcacaatatgtagaataagtagtatttgcgagaagtatgtgctggagcagtagcgtcagtggctattttggcttttaagccagctgacctcttccatttgtaaagcttttttcttggaaacgtgaaaccatccagaacatcaaattagtcttatcacatacctcctgcaatacattttttgttctaaaa

SEQ ID NO: 68080 - DNA, 2781 bp, Zea Mays
gactgcccccgctccttgcccaacgaaacccccgctcccgcacgccccgccgacctctgctgccgcaacgccgcagccgccgcgaaatccgcacccacccgcgcgacctctactgccgcaaggccgcagccgccgcgaaatttgcacccacccgcgcgccgcagccctttgtccgcgccggagcctagcaccgaaccgccgcggattcgccactacatcaccggccatggcttcgggcatgccacccgcgccctcgaggtggtgaggcacctggtcaccgcagggcacgacgtgcacgtggtcatcgccgcgcccgagttcgtcttcaccaccgagatcgcctcccccagcctctccgacaagctcgcgtccccgtccacatccgagatgctcgcgcccgcgccttggatggaagcccagaatcgccttccatcgaggattctacaccacgcgtcgcgccccctccccgcacgcaagcccccgcctgcacattctccgccaccccatcccctgtccggcgcgtgtgccacggcctccctcgaccagcggcacgcgtacgccatcaccccctccctactgctcccatccgcggtgctcaccttcgccatcgcgcaatccatcaaggtcctcaccacctggtataaggagaaccggtgggacgcgaagcagctggtgggctccggtgggatgccgtcctcgcactcagccaccgtcacagcgctcgctgtcgccgtcggcctgtaagaggggctcgccagctcgttgttcgccaccgccgtcgtctttgtcttcgtggaaaggtgaaatcgtcgtgcgatggtggagatggccgatgggaggctccaccagccctagggtgtggccaacaagacgctactcgccactgcgtgggtcggcagtgagatctcagggagagaagccatgcaaccccatgaaaggcgaaactgtcgcacgatggtggagacgaccggcggtaggatgcaagtatgagcatttggcaaagagagtattcctccccatgctcccgctccctcctgcaccccacgctcgccgacgagccgctcgacctcgtcgcagcttgccgagccatcatgcgccccggtgcggtggtcaacatcaatccacgccgtcaatcgcgtgttggtcctacgctcagtgcatgagtccttcaactggcggtggtggagcaaccgtactaccacagcgcatacacaggacgtagagaacaactccagaaggtgagccccagatctccgctgccgtcttctcgcctgaaaaaagaggggcatctctatcgccaccaaccactagcaggcggcggacgctgctcgcagcaggaatggaaaatgtgcatatatgcttctgattgcagtgagattagcctcgtccaagttatgggatctgccatgaactagacaagattataagtttacagaggccttacatcaagagagtacaagattgccataaggaagtaaagtctttgaggaaagtgaccttatgagaagcttgagaaaatcaacttgtgtgtgagaagttttgtctacttgtgctaattagtcatatgatatttttagtcatgaactagacaagatcagaagtttaaagaggttttaaatcgagtacaagatcgccataaggaagtacaagtctttgaggaaagtgaccttatgaaaagtttgagcaaatcaacttgtgtgcgagaagttttgtctacttgtgctgatcagtcataccttggaatattgctgaactgttgcctttgttgctcattggcttcaatacttcatacaccatcaaatgagtcatgtgcaaaattcttcgaagcatcagttcttgctctagaagaacttcatcaggtgattactcttttgctttcctttattgaataattagcacatgtgcgttcaaaaaaattgccacatgaatgaaatgatatattctcgaattattctattgagttttttgtttttatcacaacaccaccctggcgcgctagaggcggggtcgaatcagcaactacggctgacatgacgctacccatccagttgctcactgctcaggttatagcgaagaacattgttttagctggatacaaggagatgcagaagctctgagttttgaggatggatctatggatggttacactatcacatttgggatcagaaatgtgacgcacattgagaaagctctatcagaagcttacagttgatggttctaaagcaagggtggaggttcctatgcttggagttgagtcatgtggatgtccctatttttaaatagatagctggttgatggtgatcggcagatagaagacgggcaacatgctaaccaggcatgtgaaccttgaaccttggcaggaaaagtttgctcagatgattcaggaagccggattccagagggtggaatatgaaaacctcctgagcggtgtagttgccattcattctggactgaaactgtagagctgaatacggatggatgttttttcatgggtgcaccgcttctacaattagtagtatttgttgttttttaatgaattctataataggttcggtggcttgtaaaagcagctggtgctggctgtcagcattagcacaatatgtagaataagtagtatttgcgagaagtatgtgctggagcagtagcgtcagtggctattttggcttttaagccagctgacctcttccatttgtaaagcttttttcttggaaacgtgaaaccatccagaacatcaaattagtcttatcacatacctcctgcaatacattttttgttctaaaa

SEQ ID NO: 68081 - DNA, 2764 bp, Zea Mays
gactgcccccgctccttgcccaacgaaacccccgctcccgcacgccccgccgacctctgctgccgcaacgccgcagccgccgcgaaatccgcacccacccgcgcgacctctactgccgcaaggccgcagccgccgcgaaatttgcacccacccgcgcgccgcagccctttgtccgcgccggagcctagcaccgaaccgccgcggattcgccactacatcaccggccatggcttcgggcatgccacccgcgccctcgaggtggtgaggcacctggtcaccgcagggcacgacgtgcacgtggtcatcgccgcgcccgagttcgtcttcaccaccgagatcgcctcccccagcctctccgacaagctcgcgtccccgtccacatccgagatgctcgcgcccgcgccttggatggaagcccagaatcgccttccatcgaggattctacaccacgcgtcgcgccccctccccgcacgcaagcccccgcctgcacattctccgccaccccatcccctgtccggcgcgtgtgccacggcctccctcgaccagcggcacgcgtacgccatcaccccctccctactgctcccatccgcggtgctcaccttcgccatcgcgcaatccatcaaggtcctcaccacctggtataaggagaaccggtgggacgcgaagcagctggtgggctccggtgggatgccgtcctcgcactcagccaccgtcacagcgctcgctgtcgccgtcggcctgtaagaggggctcgccagctcgttgttcgccaccgccgtcgtctttgtcttcgtggttggttccccttcccactccccctctccctttcgacaccaaaaaaaacgcgctgaccatctttggcaagctgtcgcccaccccaccccaaaaccctagctctattccatcgctcccgtactccctattgcggcggttgagaacagtggcgacaagatctcatggagagaagctatgcggaccccaggaaaggtgaaatcgtcgtgcgatggtggagatggccgatgggaggctccaccagccctagggtgtggccaacaagacgctactcgccactgcgtgggtcggcagtgagatctcagggagagaagccatgcaaccccatgaaaggcgaaactgtcgcacgatggtggagacgaccggcggtaggatgcaagtatgagcatttggcaaagagagtattcctccccatgctcccgctccctcctgcaccccacgctcgccgacgagccgctcgacctcgtcgcagcttgccgagccatcatgcgccccggtgcggtggtcaacatcaatccacgccgtcaatcgcgtgttggtcctacgctcagtgcatgagtccttcaactggcggtggtggagcaaccgtactaccacagcgcatacacaggacgtagagaacaactccagaaggtgagccccagatctccgctgccgtcttctcgcctgaaaaaagaggggcatctctatcgccaccaaccactagcaggcggcggacgctgctcgcagcaggaatggaaaatgtgcatatatgcttctgattgcagtgagattagcctcgtccaagttatgggatctgccatgaactagacaagattataagtttacagaggccttacatcaagagagtacaagattgccataaggaagtaaagtctttgaggaaagtgaccttatgagaagcttgagaaaatcaacttgtgtgtgagaagttttgtctacttgtgctaattagtcatatgatatttttagtcatgaactagacaagatcagaagtttaaagaggttttaaatcgagtacaagatcgccataaggaagtacaagtctttgaggaaagtgaccttatgaaaagtttgagcaaatcaacttgtgtgcgagaagttttgtctacttgtgctgatcagtcataccttggaatattgctgaactgttgcctttgttgctcattggcttcaatacttcatacaccatcaaatgagtcatgtgcaaaattcttcgaagcatcagttcttgctctagaagaacttcatcaggttatagcgaagaacattgttttagctggatacaaggagatgcagaagctctgagttttgaggatggatctatggatggttacactatcacatttgggatcagaaatgtgacgcacattgagaaagctctatcagaagcttacagttgatggttctaaagcaagggtggaggttcctatgcttggagttgagtcatgtggatgtccctatttttaaatagatagctggttgatggtgatcggcagatagaagacgggcaacatgctaaccaggcatgtgaaccttgaaccttggcaggaaaagtttgctcagatgattcaggaagccggattccagagggtggaatatgaaaacctcctgagcggtgtagttgccattcattctggactgaaactgtagagctgaatacggatggatgttttttcatgggtgcaccgcttctacaattagtagtatttgttgttttttaatgaattctataataggttcggtggcttgtaaaagcagctggtgctggctgtcagcattagcacaatatgtagaataagtagtatttgcgagaagtatgtgctggagcagtagcgtcagtggctattttggcttttaagccagctgacctcttccatttgtaaagcttttttcttggaaacgtgaaaccatccagaacatcaaattagtcttatcacatacctcctgcaatacattttttgttctaaaa

SEQ ID NO: 68082 - DNA, 2446 bp, Zea Mays
gactgcccccgctccttgcccaacgaaacccccgctcccgcacgccccgccgacctctgctgccgcaacgccgcagccgccgcgaaatccgcacccacccgcgcgacctctactgccgcaaggccgcagccgccgcgaaatttgcacccacccgcgcgccgcagccctttgtccgcgccggagcctagcaccgaaccgccgcggattcgccactacatcaccggccatggcttcgggcatgccacccgcgccctcgaggtccgccgccgctctctccgcccgcttgcagcttgcctgcctggtgccggcgcgtactgtttcctgaccccatcgtctccaggtggtgaggcacctggtcaccgcagggcacgacgtgcacgtggtcatcgccgcgcccgagttcgtcttcaccaccgagatcgcctcccccagcctctccgacaagctcgcgtccccgtccacatccgagatgctcgcgcccgcgccttggatggaagcccagaatcgccttccatcgaggattctacaccacgcgtcgcgccccctccccgcacgcaagcccccgcctgcacattctccgccaccccatcccctgtccggcgcgtgtgccacggcctccctcgaccagcggcacgcgtacgccatcaccccctccctactgctcccatccgcggtgctcaccttcgccatcgcgcaatccatcaaggtcctcaccacctggtataaggagaaccggtgggacgcgaagcagctggtgggctccggtgggatgccgtcctcgcactcagccaccgtcacagcgctcgctgtcgccgtcggcctgtaagaggggctcgccagctcgttgttcgccaccgccgtcgtctttgtcttcgtggcacaataagccacttcaggcttcagtctgttctgtgatcagcagaacattatgggctctaaagcaggaggacttttgagatttacagagcttcaactaagtcaacttgttgagtcgcttgttacatatcttttgcatatgggaaaaaataatagataagaggtagtgtgagacacatattggcaactgaccaaatgacttcagatatttggggtctcatcgatgttcaaacagagaatgcacaaagtagtcagaaatgatgcttgtcaattgtcaaacttattttggttggcttattttcaagattaaatgatctctggtaactgaggagaatgctgtagatgttgattttccttttaggaaggtgaagctctccgatgtggtagggggaatggaaaatgtgcatatatgcttctgattgcagtgagattagcctcgtccaagttatgggatctgccatgaactagacaagattataagtttacagaggccttacatcaagagagtacaagattgccataaggaagtaaagtctttgaggaaagtgaccttatgagaagcttgagaaaatcaacttgtgtgtgagaagttttgtctacttgtgctaattagtcatatgatatttttagtcatgaactagacaagatcagaagtttaaagaggttttaaatcgagtacaagatcgccataaggaagtacaagtctttgaggaaagtgaccttatgaaaagtttgagcaaatcaacttgtgtgcgagaagttttgtctacttgtgctgatcagtcataccttggaatattgctgaactgttgcctttgttgctcattggcttcaatacttcatacaccatcaaatgagtcatgtgcaaaattcttcgaagcatcagttcttgctctagaagaacttcatcagttgctcactgctcaggttatagcgaagaacattgttttagctggatacaaggagatgcagaagctctgagttttgaggatggatctatggatggttacactatcacatttgggatcagaaatgtgacgcacattgagaaagctctatcagaagcttacagttgatggttctaaagcaagggtggaggttcctatgcttggagttgagtcatgtggatgtccctatttttaaatagatgaaaagtttgctcagatgattcaggaagccggattccagagggtggaatatgaaaacctcctgagcggtgtagttgccattcattctggactgaaactgtagagctgaatacggatggatgttttttcatgggtgcaccgcttctacaattagtagtatttgttgttttttaatgaattctataataggttcggtggcttgtaaaagcagctggtgctggctgtcagcattagcacaatatgtagaataagtagtatttgcgagaagtatgtgctggagcagtagcgtcagtggctattttggcttttaagccagctgacctcttccatttgtaaagcttttttcttggaaacgtgaaaccatccagaacatcaaattagtcttatcacatacctcctgcaatacattttttgttctaaaa

SEQ ID NO: 68083 - DNA, 3098 bp, Zea Mays
gactgcccccgctccttgcccaacgaaacccccgctcccgcacgccccgccgacctctgctgccgcaacgccgcagccgccgcgaaatccgcacccacccgcgcgacctctactgccgcaaggccgcagccgccgcgaaatttgcacccacccgcgcgccgcagccctttgtccgcgccggagcctagcaccgaaccgccgcggattcgccactacatcaccggccatggcttcgggcatgccacccgcgccctcgaggtggtgaggcacctggtcaccgcagggcacgacgtgcacgtggtcatcgccgcgcccgagttcgtcttcaccaccgagatcgcctcccccagcctctccgacaagctcgcgtccccgtccacatccgagatgctcgcgcccgcgccttggatggaagcccagaatcgccttccatcgaggattctacaccacgcgtcgcgccccctccccgcacgcaagcccccgcctgcacattctccgccaccccatcccctgtccggcgcgtgtgccacggcctccctcgaccagcggcacgcgtacgccatcaccccctccctactgctcccatccgcggtgctcaccttcgccatcgcgcaatccatcaaggtcctcaccacctggtataaggagaaccggtgggacgcgaagcagctggtgggctccggtgggatgccgtcctcgcactcagccaccgtcacagcgctcgctgtcgccgtcggcctgtaagaggggctcgccagctcgttgttcgccaccgccgtcgtctttgtcttcgtggttggttccccttcccactccccctctccctttcgacaccaaaaaaaacgcgctgaccatctttggcaagctgtcgcccaccccaccccaaaaccctagctctattccatcgctcccgtactccctattgcggcggttgagaacagtggcgacaagatctcatggagagaagctatgcggaccccaggaaaggtgaaatcgtcgtgcgatggtggagatggccgatgggaggctccaccagccctagggtgtggccaacaagacgctactcgccactgcgtgggtcggcagtgagatctcagggagagaagccatgcaaccccatgaaaggcgaaactgtcgcacgatggtggagacgaccggcggtaggatgcaagtatgagcatttggcaaagagagtattcctccccatgctcccgctccctcctgcaccccacgctcgccgacgagccgctcgacctcgtcgcagcttgccgagccatcatgcgccccggtgcggtggtcaacatcaatccacgccgtcaatcgcgtgttggtcctacgctcagtgcatgagtccttcaactggcggtggtggagcaaccgtactaccacagcgcatacacaggacgtagagaacaactccagaaggtgagccccagatctccgctgccgtcttctcgcctgaaaaaagaggggcatctctatcgccaccaaccactagcaggcggcggacgctgctcgcagcagatgcttgtcaattgtcaaacttattttggttggcttattttcaagattaaatgatctctggtaactgaggagaatgctgtagatgttgattttccttttaggaaggtgaagctctccgatgtggtagggggaatggaaaatgtgcatatatgcttctgattgcagtgagattagcctcgtccaagttatgggatctgccatgaactagacaagattataagtttacagaggccttacatcaagagagtacaagattgccataaggaagtaaagtctttgaggaaagtgaccttatgagaagcttgagaaaatcaacttgtgtgtgagaagttttgtctacttgtgctaattagtcatatgatatttttagtcatgaactagacaagatcagaagtttaaagaggttttaaatcgagtacaagatcgccataaggaagtacaagtctttgaggaaagtgaccttatgaaaagtttgagcaaatcaacttgtgtgcgagaagttttgtctacttgtgctgatcagtcataccttggaatattgctgaactgttgcctttgttgctcattggcttcaatacttcatacaccatcaaatgagtcatgtgcaaaattcttcgaagcatcagttcttgctctagaagaacttcatcaggtgattactcttttgctttcctttattgaataattagcacatgtgcgttcaaaaaaattgccacatgaatgaaatgatatattctcgaattattctattgagttttttgtttttatcacaacaccaccctggcgcgctagaggcggggtcgaatcagcaactacggctgacatgacgctacccatccagttgctcactgctcaggttatagcgaagaacattgttttagctggatacaaggagatgcagaagctctgagttttgaggatggatctatggatggttacactatcacatttgggatcagaaatgtgacgcacattgagaaagctctatcagaagcttacagttgatggttctaaagcaagggtggaggttcctatgcttggagttgagtcatgtggatgtccctatttttaaatagatagctggttgatggtgatcggcagatagaagacgggcaacatgctaaccaggcatgtgaaccttgaaccttggcaggaaaagtttgctcagatgattcaggaagccggattccagagggtggaatatgaaaacctcctgagcggtgtagttgccattcattctggactgaaactgtagagctgaatacggatggatgttttttcatgggtgcaccgcttctacaattagtagtatttgttgttttttaatgaattctataataggttcggtggcttgtaaaagcagctggtgctggctgtcagcattagcacaatatgtagaataagtagtatttgcgagaagtatgtgctggagcagtagcgtcagtggctattttggcttttaagccagctgacctcttccatttgtaaagcttttttcttggaaacgtgaaaccatccagaacatcaaattagtcttatcacatacctcctgcaatacattttttgttctaaaa

SEQ ID NO: 68084 - DNA, 1405 bp, Zea Mays
catcgttccattctcctctaaaccctagccgcctagcgcctcgatctgagcagcctgtctcgcggaggtagttctggttgatttggtcctagatggcggaggaaaaagtggggcggatcttcgtcggcgggctgtcgtggaacaccacggagcgcacgctcgagcgcaccttcggtcagtacggcaaggtcatcgaggctcagagactgcagtcagttcaatttctgcatgttaggaagttagcaaagttgcaggaaaagaaattcactaatcatttgagctcactggttagcattttttgcgatgatgggttcagtaaagatcaattggaggcatatacactgttagattcagttttgctaggtgtgatctgttttgtggacagaaccagatacctgtttttgccttgttagcacttaagataactgcttccagctttagaacacaaaagaatcatcaccggcatggttaatgaactccagtcaagtaaacatggttgccagcactggactgaacttgtggcaaaatttggttgtgtcattctggatcagtttgataagaaaggcagagaaaccatttgtcctttcagtagcgaggcagcaatggtgatgctgaagaatgttgtatgctcatctttgcctacacttgcttcaaagagcattattcccagtgtccatcactccattgtgcatttccatgggaaatgcttagttctttgcgccaaaggaaagccaggattaaaaaatgcatttagacttccggattatatttttctggtactgaaggatatggcagggtaactaaaatctacctggtcatggtatagttcacctctagttttgtgcccatacaattgcccaaaagtaactggtctcagttcagttctctggattggatactggttcttgcagcacgtggccctcacctggaactgttcagactcatcattgtcgtctgtgatcacgtgcttgattcttcagttttgacttctgacctttggctgtagtaatcattaatgttcttaaccagtgaatggtcaagcagattttgatttgcattcaaatttgagttgtggcataaggaattaaggattgaccaaactcttgtacagttgggatgatttcactcgttttgcacaatgtttattagctgtttgatttgataccctaatttgcatgttgttcctactgatagaatttttggttgctcactattatatatagtttctgtcttcccattggttcattttcactgtatgtataggttgtagtggaaagggagacaggccgctctaggggatttggatttgtcacattttcagaacctcgggctgtggatgctgccattcggggaatgcataacggagaactggatggccgcaatatttctgtgaacaaagctgaac

SEQ ID NO: 68085 - DNA, 447 bp, Zea Mays
ctggcatcgttccattctcctctaaaccctagccgcctagcgcctcgatctgagcagcctgtctcgcggaggtagttctggttgatttggtcctagatggcggaggaaaaagtggggcggatcttcgtcggcgggctgtcgtggaacaccacggagcgcacgctcgagcgcaccttcggtcagtacggcaaggtcatcgaggctcagctgctgattcacagagactgcagtcagttcaatttctgcatgttaggaagttagcaaagttgcaggaaaagaaattcactaatcatttgagctcactggttgtagtggaaagggagacaggccgctctaggggatttggatttgtcacattttcagaacctcgggctgtggatgctgccattcggggaatgcataacggagaactggatggccgcaatatttctgtgaacaaagctgaac

SEQ ID NO: 68086 - DNA, 1400 bp, Zea Mays
ctggcatcgttccattctcctctaaaccctagccgcctagcgcctcgatctgagcagcctgtctcgcggaggtagttctggttgatttggtcctagatggcggaggaaaaagtggggcggatcttcgtcggcgggctgtcgtggaacaccacggagcgcacgctcgagcgcaccttcggtcagtacggcaaggtcatcgaggctcagtcagttcaatttctgcatgttaggaagttagcaaagttgcaggaaaagaaattcactaatcatttgagctcactggttagcattttttgcgatgatgggttcagtaaagatcaattggaggcatatacactgttagattcagttttgctaggtgtgatctgttttgtggacagaaccagatacctgtttttgccttgttagcacttaagataactgcttccagctttagaacacaaaagaatcatcaccggcatggttaatgaactccagtcaagtaaacatggttgccagcactggactgaacttgtggcaaaatttggttgtgtcattctggatcagtttgataagaaaggcagagaaaccatttgtcctttcagtagcgaggcagcaatggtgatgctgaagaatgttgtatgctcatctttgcctacacttgcttcaaagagcattattcccagtgtccatcactccattgtgcatttccatgggaaatgcttagttctttgcgccaaaggaaagccaggattaaaaaatgcatttagacttccggattatatttttctggtactgaaggatatggcagggtaactaaaatctacctggtcatggtatagttcacctctagttttgtgcccatacaattgcccaaaagtaactggtctcagttcagttctctggattggatactggttcttgcagcacgtggccctcacctggaactgttcagactcatcattgtcgtctgtgatcacgtgcttgattcttcagttttgacttctgacctttggctgtagtaatcattaatgttcttaaccagtgaatggtcaagcagattttgatttgcattcaaatttgagttgtggcataaggaattaaggattgaccaaactcttgtacagttgggatgatttcactcgttttgcacaatgtttattagctgtttgatttgataccctaatttgcatgttgttcctactgatagaatttttggttgctcactattatatatagtttctgtcttcccattggttcattttcactgtatgtataggttgtagtggaaagggagacaggccgctctaggggatttggatttgtcacattttcagaacctcgggctgtggatgctgccattcggggaatgcataacggagaactggatggccgcaatatttctgtgaacaaagctgaac

SEQ ID NO: 68087 - DNA, 1423 bp, Zea Mays
ctggcatcgttccattctcctctaaaccctagccgcctagcgcctcgatctgagcagcctgtctcgcggaggtagttctggttgatttggtcctagatggcggaggaaaaagtggggcggatcttcgtcggcgggctgtcgtggaacaccacggagcgcacgctcgagcgcaccttcggtcagtacggcaaggtcatcgaggctcagctgctgattcacagagactgcagtcagttcaatttctgcatgttaggaagttagcaaagttgcaggaaaagaaattcactaatcatttgagctcactggttagcattttttgcgatgatgggttcagtaaagatcaattggaggcatatacactgttagattcagttttgctaggtgtgatctgttttgtggacagaaccagatacctgtttttgccttgttagcacttaagataactgcttccagctttagaacacaaaagaatcatcaccggcatggttaatgaactccagtcaagtaaacatggttgccagcactggactgaacttgtggcaaaatttggttgtgtcattctggatcagtttgataagaaaggcagagaaaccatttgtcctttcagtagcgaggcagcaatggtgatgctgaagaatgttgtatgctcatctttgcctacacttgcttcaaagagcattattcccagtgtccatcactccattgtgcatttccatgggaaatgcttagttctttgcgccaaaggaaagccaggattaaaaaatgcatttagacttccggattatatttttctggtactgaaggatatggcagggtaactaaaatctacctggtcatggtatagttcacctctagttttgtgcccatacaattgcccaaaagtaactggtctcagttcagttctctggattggatactggttcttgcagcacgtggccctcacctggaactgttcagactcatcattgtcgtctgtgatcacgtgcttgattcttcagttttgacttctgacctttggctgtagtaatcattaatgttcttaaccagtgaatggtcaagcagattttgatttgcattcaaatttgagttgtggcataaggaattaaggattgaccaaactcttgtacagttgggatgatttcactcgttttgcacaatgtttattagctgtttgatttgataccctaatttgcatgttgttcctactgatagaatttttggttgctcactattatatatagtttctgtcttcccattggttcattttcactgtatgtataggttgtagtggaaagggagacaggccgctctaggggatttggatttgtcacattttcagaacctcgggctgtggatgctgccattcggggaatgcataacggagaactggatggccgcaatatttctgtgaacaaagctgaac

SEQ ID NO: 68088 - DNA, 686 bp, Zea Mays
cctgattggcctagtaacacctcccacggatcgtcttcccagctccccatcggccgtccgtgccactatcgatccggccgtccatcgcgtttgcacacggatcgaggggcccaccaccccacccttttcgcggggttttaaaagcaccccacctcgcatcccctctggcatcacacactcgactctcctctctcgcatccgcagcctttcgagctctactccaccccctcgatctcgaatacctggccgccgaggtgctggagctggccggcaacgctgccaaggacaacaagaagacccgcatcatcccgcgccacgtgctccttgccatccgcaacgacgaggagctcggcaagctgctgtccggcgtcaccatcgcccacggcggcgtcctccccaacatcaacccggtgctcctgcccaagaagaccgctgagaaggcggcggccaaggaggccaagtcgcccaagaaggccgccaagtcccccaagaaggcatagaggggcgggcgcctttaccgctgtgatgttgaatgctcgtgttcagtagatctttacgtctgtagtgtcgtcgttgttattggaactggttagtagatctgtgcattgtggttgaaacgtgattccctgatttcagaaatctaatttgcaatttgggtgcacaaatatactcgcaatggtttatat

SEQ ID NO: 68089 - DNA, 610 bp, Zea Mays
ggcagaccgcggcggcgacaggaaccagctggaagcttctcgcgtcctggggtcccaccagcaggccgccgcagccgaggccctgccgtgtgcatggacatgcaagcacggcaacaacgagggagagggagccgcggaggaggtggttgtggtggtggcggcactggcgggcatggctagctagctagctggtttggctggctggctgtgaaggcaagctaaggacgatgcctccgatccatcacaaggaaaaggaaggtagctagctagcttgcttgcttgcttgagcggagggagaggcgcggtcgcacgcggcggcaagcttagcacatgttcgtcgtatatatgaggatggcatggcgcgccgcggaggccatgggccatggcatgctctcttgtgcgagggcgggcgggcgatgcttggcatggcgaggaaggaaagcatgcgtgttttggcgatacactggaaattgattagatggagtggagtggattagtggcgccatagtggagtggagaatcaggggacccacaggatcgatggcgaagaagtgcagtgcagtcgccaatgatgcatcaatcctgaggcgagatctcggggctcgtcctg

SEQ ID NO: 68090 - DNA, 4349 bp, Zea Mays
gtttgctatgtggttaacatagatactcgcatatattttatagcttgaaagaattgtgctctagatttcatggctcttcttcataactgttacctgatttttatgattcctggcaaatctatgtatgattgctgactctacctcacgatgggctgaggcattgtgtgagatttcatggagtttgcttatttcaatgatgctcagcgccaggctaccaatgatgctggtaggattgaagggcttgtggttatgaggattatcaatgagcccactgctgcggccttgtcatatggaatgaacagcaaggagggccttgtcggtgaagtgtgttcgtgccggagagcgtggagtgcgaggcctcatgacgcgaagcaagttcggtctgctcgtgcatgtcacccgtcgcgtgcgcgtgtgccggagagcgaggaggagtgcaaggcctcacgacgcgctgccaggtccgtgctgctcgtgcgcgtcacccattgctgatgatataccacaaatgttttcgacctaacaaagagggcatagaaagtagaagttggttgctcctttaaagcatcagtttcaagtagccatcagctgaaatctaccattgctgaaacaaggtgaaaaaaatgcagaatggactacttagagatagctacactatcgatgcatctacatcattttggactatatgggacaccatcagtaatggttgatcttgtctactgtgctttggagttcctttcaactttgcttggagcctttcatgccactgatggagtcatatgcctctgcccagaaattcagtttctgactgaactaaacggtggtggtttgaatcatcgtggttcactggttttcacaatattgggattcttggcaaccatgaggacattatgagattcttggctaccatgaggacaaattgttcaattacattttctacgtctatttcgaagcgtcgatggcggatgtccgcacacaaaatgccttgaagggtctggaggaagttgcaagtttcctgcgtgtccttggctactatccgtgcaacacaataacgatatgagctgttgcgtcacactgtctatcttggttgctccgccttggaagaccagagtgggagatggttgctatttctgctcaagttagcgagaataaatactttgtttcgatggcatatcggttgtggttctattatgacatatataacatactgatgttattattactcacattatctatgctatgttgaataatcatgtttttagttatatttctccttcaattctattctttcgtactaattatgtcttgtagcgttaagcaagggcaatatacaaattggtttcaatgattcattgcatcatattactcctgtctttaagcaatatagtttggattcacattagccttgtaacaaaagtaatttctaaacgttattatgatactcctaattggattgttacgctagacaatgtgacatacaactaagtcatttgaattttgcatgcagttgaataaaaggttcctcttcccttgtttggaagagattatggtcattatacactcccgactgaatatgaacactcttgaaatacattgcgaagctgcagaggatcgtcattagaattgcatgaaggttgtatgcgaaaccactggattgaacaattcgagaaatctacagaggaagtcgtgaacagctatgcacaagattgagtctaaggtataggcatctgatggaggacatgttgtctctactcccgcatatgaaggacaaccaggacaaggtcgagtccaagcagagcaaggggaacacgccgagcaagctgcttgagctcaggagttgctccagctgcctttcttcgagattctggctgttgaccatgcgtcggatgagggcgcgattgtaccaattggttcgcagcatgatgcacatttgaccaaactgatgaatatggaaaatgaccaacctttgttgccggcaccaccagttaatctggaatcagccatccttgagcaaaatgcaaatatggtggctctcaaggaaggctgttctgtgggaagtgagctgccacctggtctgcagggtaattttggtggtaacaaagcaaacacgtgtacttcagcactgcattctattgatgaaggtgaagaaataacttgtggtttcattaaacatgagaggagttatgatttacagaatttgactatggataagtcaattcaagtgtctaatgaaacaaagtacaagtttcttgctcataagcccagagtaggctgtgaaactgctattcaaaactgtgagttggcttctgcattgccagatacagaatttcatggccctgttgcaaccatttcaactacgggtcaatcagaaggatctgacactgagattaatgttccaaactattctgacctagaagcactggtacatatagttattttcttcattgagtgtacatagctttacattccttggtgattctgactttctcaaaaaaaaaaaaaaatccagatacttgatctggacctgattccatgggatcaagaatctgacttcatccaaccagaagtttcaaggtttcagtatcctgaaagcaggaaggatttgataagattagagaaaggtgtctgctcttatatgaaccgatctatcatgtctaagggtgctttcgcaattctttatggccaacgcacgaaatactacataagagagcccgaggtaagtcttgggagagaaacagaagaagtacatgttgatatcgatttgagtaaagaaggaaaggcaaacaaaatatcccgtcgacaggcagttattaagatggacgatggtggatctttctacataaacaatactgggaagttttcaattttcgtgaatagcaaagaagtaccctgcagtaaacgtataaacttaatgtcagactcattaattgaggtatggccttccaatcctttctttgttcttacactaggaattccaaataaccgcgctatactaaatatccatgccctgtttaattctatgtactggttcctttttttaatctaacttcgaactagtaggctgtagagctattaattgttcatatttgtatgaaaaatgtgcttccatattgtaccataagattgaagtaatcaagcattcttagtcattcagatatagctggatgagagcatggttacttcactagctactgtttcatttgtggttccttagttcacatcacacatgatatgatataggcgcgtaggaaaacactaatcaggaaagtgagttgtaggtagaaagatacagtaagcttttcttttgcaactcattgaatatttgatgccactctgttgtgaattagtctagagttaaatcaggatctgccatttgagatctctattggttcatatgtgaaatgaaatgccactggaaccagagataatttttttatttgggattaatagataatactccatccatctcaaaatataagcatttctagttttgttctcaaaatataacatttctagttttgtttaagtcaagctattctaagtttgaccaagtttataaagaagtttagttacatctatcacatcaaagaagcaaactatgaaaatatgtcccaatgaatctaatgatgtccatttgatatcataaaaatttattgttctttttctataaacttggtcaaacttaggtcatgtttggaagcaactcagtttttaagaaaccattttttatttttagttaggagtgactagctttttggtttttaagaaactgtgaattcaatttttataaactggcataaactggtatttttggaaccacctcagtttccataaaccagtttcttaaaaactgggtggttccaaacaggctcttagtatagtttgacataacaaacccagaaattcttatgttgggacgggagaagtaacgtatagcaattggatctaggtaatgtaacaatggttactagttatggttcattttgttagttttaaactaatgcttctaccctacatatttcacggatatagggtaaaggattcatgtagcattttgacctcttgcgaagttgttttttttttgttaccgacagataaggaacctgaaattcatttttcacgtgaaccacgaggctgcaaggcaatacatagttcgaaaaaggagaggaagctcccaaggcgggatcacggcgtttgattggagtcagaacccatgagtagttaacgttatgatcaaggttgtttataatctgcgatagctacctctctcttcaagaaagtattggataagcgtaaagttatttataatttccgatagctaatatttctctcttccagttagcactgtt

SEQ ID NO: 68091 - DNA, 3676 bp, Zea Mays
cctgccctatagtccagaactagaagaattctaatttttccttttagtaatccatgtagatttgagctttgtttggtaagaaatgcatttggattttccacaaattccagtctttcacatacccatctacttgctatcctgctactggacgaggtggcatcgcacgggcacgaatagtttcatatatgcctatgcattttttacagactttgtgtgagaatattattctcactttctttgctttctgtttttactcatatataggcaaactgaagtggaatatttgatgcacacctcttttgcctcagatttaaaaatccctatttttaatcattttgcgaggaaaactctagatttaaaatgctccaattcttgagagtttgctatgtggttaacatagatactcgcatatattttatagcttgaaagaattgtgctctagatttcatggctcttcttcataactgttacctgatttttatgattcctggcaaatctatgtatgattgctgactctacctcacgatgggctgaggcattgtgtgagatttcatggagtttgcttatttcaatgatgctcagcgccaggctaccaatgatgctggtaggattgaagggcttgtggttatgaggattatcaatgagcccactgctgcggccttgtcatatggaatgaacagcaaggagggccttgtcggtgaagtgtgttcgtgccggagagcgtggagtgcgaggcctcatgacgcgaagcaagttcggtctgctcgtgcatgtcacccgtcgcgtgcgcgtgtgccggagagcgaggaggagtgcaaggcctcacgacgcgctgccaggtccgtgctgctcgtgcgcgtcacccattgctgttgaaatccatcccaccccaatgtttccaagtagagtaacagatatccgatctcggaatgaggatagtgactgggccatgggaatttgatcgagaaagaaagggaaaggtagagatagtggggacaatcgatttaattgtagctggaacatttctaaaggtattagtaggtgacttgctgcagcaaacttgaacacacaagcaacaaacatatgcttcaggtccttgatgctaccaacagatgatataccacaaatgttttcgacctaacaaagagggcatagaaagtagaagttggttgctcctttaaagcatcagtttcaagtagccatcagctgaaatctaccattgctgaaacaaggtgaaaaaaatgcagaatggactacttagagatagctacactatcgatgcatctacatcattttggactatatgggacaccatcagtaatggttgatcttgtctactgtgctttggagttcctttcaactttgcttggagcctttcatgccactgatggagtcatatgcctctgcccagaaattcagtttctgactgaactaaacggtggtggtttgaatcatcgtggttcactggttttcacaatattgggattcttggcaaccatgaggacattatgagattcttggctaccatgaggacaagttgattgttcaattacattttctacgtctatttcgaagcgtcgatggcggatgtccgcacacaaaatgccttgaagggtctggaggaagttgcaagtttcctgcgtgtccttggctactatccgtgcaacacaataacgatatgagctgttgcgtcacactgtctatcttggttgctccgccttggaagaccagagtgggagatggttgctatttctgctcaagttagcgagaataaatactttgtttcgatggcatatcggttgtggttctattatgacatatataacatactgatgttattattactcacattatctatgctatgttgaataatcatgtttttagttatatttctccttcaattctattctttcgtactaattatgtcttgtagcgttaagcaagggcaatatacaaattggtttcaatgattcattgcatcatattactcctgtctttaagcaatatagtttggattcacattagccttgtaacaaaagtaatttctaaacgttattatgatactcctaattggattgttacgctagacaatgtgacatacaactaagtcatttgaattttgcatgcagttgaataaaaggttcctcttcccttgtttggaagagattatggtcattatacactcccgactgaatatgaacactcttgaaatacattgcgaagctgcagaggatcgtcattagaattgcatgaaggttgtatgcgaaaccactggattgaacaattcgagaaatctacagaggaagtcgtgaacagctatgcacaagattgagtctaaggtataggcatctgatggaggacatgttgtctctactcccgcatatgaaggacaaccaggacaaggtcgagtccaagcagagcaaggggaacacgccgagcaagctgcttgagctcaggagttgctccagctgcctttcttcgagattctggctgttgaccatgcgtcggatgagggcgcgattgtaccaattggttcgcagcatgatgcacatttgaccaaactgatgaatatggaaaatgaccaacctttgttgccggcaccaccagttaatctggaatcagccatccttgagcaaaatgcaaatatggtggctctcaaggaaggctgttctgtgggaagtgagctgccacctggtctgcagggtaattttggtggtaacaaagcaaacacgtgtacttcagcactgcattctattgatgaaggtgaagaaataacttgtggtttcattaaacatgagaggagttatgatttacagaatttgactatggataagtcaattcaagtgtctaatgaaacaaagtacaagtttcttgctcataagcccagagtaggctgtgaaactgctattcaaaactgtgagttggcttctgcattgccagatacagaatttcatggccctgttgcaaccatttcaactacgggtcaatcagaaggatctgacactgagattaatgttccaaactattctgacctagaagcactgatacttgatctggacctgattccatgggatcaagaatctgacttcatccaaccagaaggtttcagtatcctgaaagcaggaaggatttgataagattagagaaaggtgtctgctcttatatgaaccgatctatcatgtctaagggtgctttcgcaattctttatggccaacgcacgaaatactacataagagagcccgaggtaagtcttgggagagaaacagaagaagtacatgttgatatcgatttgagtaaagaaggaaaggcaaacaaaatatcccgtcgacaggcagttattaagatggacgatggtggatctttctacataaacaatactgggaagttttcaattttcgtgaatagcaaagaagtaccctgcagtaaacgtataaacttaatgtcagactcattaattgaggctgcaaggcaatacatagttcgaaaaaggagaggaagctcccaaggcgggatcacggcgtttgattggagtcagaacccatgagtagttaacgttatgatcaaggttgtttataatctgcgatagctacctctctcttcaagaaagtattggataagcgtaaagttatttataatttccgatagctaatatttctctcttccagttagcactgtt

SEQ ID NO: 68092 - DNA, 2830 bp, Zea Mays
ttctatactgctgtcttcctcatccatttctgcttcctctgctgtaactactactagttcttagttgaatcaatacctattgtgagtaggtcgctgactggtagccgcctcgggcgtggcgggatggaccgtggaggacgacgtcctcctcgccatcgagcgccaggctaccaatgatgctggtaggattgaagggcttgtggttatgaggattatcaatgagcccactgctgcggccttgtcatatggaatgaacagcaaggagggccttgtcggtgaagtgtgttcgtgccggagagcgtggagtgcgaggcctcatgacgcgaagcaagttcggtctgctcgtgcatgtcacccgtcgcgtgcgcgtgtgccggagagcgaggaggagtgcaaggcctcacgacgcgctgccaggtccgtgctgctcgtgcgcgtcacccattgctgttgaaatccatcccaccccaatgtttccaagtagagtaacagatatccgatctcggaatgaggatagtgactgggccatgggaatttgatcgagaaagaaagggaaaggtagagatagtggggacaatcgatttaattgtagctggaacatttctaaaggtattagtaggtgacttgctgcagcaaacttgaacacacaagcaacaaacatatgcttcaggtccttgatgctaccaacagaatggactacttagagatagctacactatcgatgcatctacatcattttggactatatgggacaccatcagtaatggttgatcttgtctactgtgctttggagttcctttcaactttgcttggagcctttcatgccactgatggagtcatatgcctctgcccagaaattcagtttctgactgaactaaacggtggtggtttgaatcatcgtggttcactggttttcacaatattgggattcttggcaaccatgaggacattatgagattcttggctaccatgaggacaaattgttcaattacattttctacgtctatttcgaagcgtcgatggcggatgtccgcacacaaaatgccttgaagggtctggaggaagttgcaagtttcctgcgtgtccttggctactatccgtgcaacacaataacgatatgagctgttgcgtcacactgtctatcttggttgctccgccttggaagaccagagtgggagatggttgctatttctgctcaagttagcgagaataaatactttgtttcgatggcatatcgttgaataaaaggttcctcttcccttgtttggaagagattatggtcattatacactcccgactgaatatgaacactcttgaaatacattgcgaagctgcagaggatcgtcattagaattgcatgaaggttgtatgcgaaaccactggattgaacaattcgagaaatctacagaggaagtcgtgaacagctatgcacaagattgagtctaaggtataggcatctgatggaggacatgttgtctctactcccgcatatgaaggacaaccaggacaaggtcgagtccaagcagagcaaggggaacacgccgagcaagctgcttgagctcaggagttgctccagctgcctttcttcgagattctggctgttgaccatgcgtcggatgagggcgcgattgtaccaattggttcgcagcatgatgcacatttgaccaaactgatgaatatggaaaatgaccaacctttgttgccggcaccaccagttaatctggaatcagccatccttgagcaaaatgcaaatatggtggctctcaaggaaggctgttctgtgggaagtgagctgccacctggtctgcagggtaattttggtggtaacaaagcaaacacgtgtacttcagcactgcattctattgatgaaggtgaagaaataacttgtggtttcattaaacatgagaggagttatgatttacagaatttgactatggataagtcaattcaagtgtctaatgaaacaaagtacaagtttcttgctcataagcccagagtaggctgtgaaactgctattcaaaactgtgagttggcttctgcattgccagatacagaatttcatggccctgttgcaaccatttcaactacgggtcaatcagaaggatctgacactgagattaatgttccaaactattctgacctagaagcactgatacttgatctggacctgattccatgggatcaagaatctgacttcatccaaccagaagtttcaaggtttcagtatcctgaaagcaggaaggatttgataagattagagaaaggtgtctgctcttatatgaaccgatctatcatgtctaagggtgctttcgcaattctttatggccaacgcacgaaatactacataagagagcccgaggtaagtcttgggagagaaacagaagaagtacatgttgatatcgatttgagtaaagaaggaaaggcaaacaaaatatcccgtcgacaggcagttattaagatggacgatggtggatctttctacataaacaatactgggaagttttcaattttcgtgaatagcaaagaagtaccctgcagtaaacgtataaacttaatgtcagactcattaattgagataaggaacctgaaattcatttttcacgtgaaccacgaggctgcaaggcaatacatagttcgaaaaaggagaggaagctcccaaggcgggatcacggcgtttgattggagtcagaacccatgagtagttaacgttatgatcaaggttgtttataatctgcgatagctacctctctcttcaagaaagtattggataagcgtaaagttatttataatttccgatagctaatatttctctcttccagttagcactgtt

SEQ ID NO: 68093 - DNA, 2610 bp, Zea Mays
ttctatactgctgtcttcctcatccatttctgcttcctctgctgtaactactactagttcttagttgaatcaatacctattgtgagtaggtcgctgactggtagccgcctcgggcgtggcgggatggaccgtggaggacgacgtcctcctcgccatcgagcgccaggctaccaatgatgctggtaggattgaagggcttgtggttatgaggattatcaatgagcccactgctgcggccttgtcatatggaatgaacagcaaggagggccttgtcggtgaagtgtgttcgtgccggagagcgtggagtgcgaggcctcatgacgcgaagcaagttcggtctgctcgtgcatgtcacccgtcgcgtgcgcgtgtgccggagagcgaggaggagtgcaaggcctcacgacgcgctgccaggtccgtgctgctcgtgcgcgtcacccattgctgttgaaatccatcccaccccaatgtttccaagtagagtaacagatatccgatctcggaatgaggatagtgactgggccatgggaatttgatcgagaaagaaagggaaaggtagagatagtggggacaatcgatttaattgtagctggaacatttctaaaggtattagtaggtgacttgctgcagcaaacttgaacacacaagcaacaaacatatgcttcaggtccttgatgctaccaacagaaattcagtttctgactgaactaaacggtggtggtttgaatcatcgtggttcactggttttcacaatattgggattcttggcaaccatgaggacattatgagattcttggctaccatgaggacaaattgttcaattacattttctacgtctatttcgaagcgtcgatggcggatgtccgcacacaaaatgccttgaagggtctggaggaagttgcaagtttcctgcgtgtccttggctactatccgtgcaacacaataacgatatgagctgttgcgtcacactgtctatcttggttgctccgccttggaagaccagagtgggagatgttgaataaaaggttcctcttcccttgtttggaagagattatggtcattatacactcccgactgaatatgaacactcttgaaatacattgcgaagctgcagaggatcgtcattagaattgcatgaaggttgtatgcgaaaccactggattgaacaattcgagaaatctacagaggaagtcgtgaacagctatgcacaagattgagtctaaggtataggcatctgatggaggacatgttgtctctactcccgcatatgaaggacaaccaggacaaggtcgagtccaagcagagcaaggggaacacgccgagcaagctgcttgagctcaggagttgctccagctgcctttcttcgagattctggctgttgaccatgcgtcggatgagggcgcgattgtaccaattggttcgcagcatgatgcacatttgaccaaactgatgaatatggaaaatgaccaacctttgttgccggcaccaccagttaatctggaatcagccatccttgagcaaaatgcaaatatggtggctctcaaggaaggctgttctgtgggaagtgagctgccacctggtctgcagggtaattttggtggtaacaaagcaaacacgtgtacttcagcactgcattctattgatgaaggtgaagaaataacttgtggtttcattaaacatgagaggagttatgatttacagaatttgactatggataagtcaattcaagtgtctaatgaaacaaagtacaagtttcttgctcataagcccagagtaggctgtgaaactgctattcaaaactgtgagttggcttctgcattgccagatacagaatttcatggccctgttgcaaccatttcaactacgggtcaatcagaaggatctgacactgagattaatgttccaaactattctgacctagaagcactgatacttgatctggacctgattccatgggatcaagaatctgacttcatccaaccagaagtttcaaggtttcagtatcctgaaagcaggaaggatttgataagattagagaaaggtgtctgctcttatatgaaccgatctatcatgtctaagggtgctttcgcaattctttatggccaacgcacgaaatactacataagagagcccgaggtaagtcttgggagagaaacagaagaagtacatgttgatatcgatttgagtaaagaaggaaaggcaaacaaaatatcccgtcgacaggcagttattaagatggacgatggtggatctttctacataaacaatactgggaagttttcaattttcgtgaatagcaaagaagtaccctgcagtaaacgtataaacttaatgtcagactcattaattgagataaggaacctgaaattcatttttcacgtgaaccacgaggctgcaaggcaatacatagttcgaaaaaggagaggaagctcccaaggcgggatcacggcgtttgattggagtcagaacccatgagtagttaacgttatgatcaaggttgtttataatctgcgatagctacctctctcttcaagaaagtattggataagcgtaaagttatttataatttccgatagctaatatttctctcttccagttagcactgtt

SEQ ID NO: 68094 - DNA, 2287 bp, Zea Mays
ttctatactgctgtcttcctcatccatttctgcttcctctgctgtaactactactagttcttagttgaatcaatacctattgtgagtaggtcgctgactggtagccgcctcgggcgtggcgggatggaccgtggaggacgacgtcctcctcgccatcgagcgccaggctaccaatgatgctggtaggattgaagggcttgtggttatgaggattatcaatgagcccactgctgcggccttgtcatatggaatgaacagcaaggagggccttgtcggtgaagtgtgttcgtgccggagagcgtggagtgcgaggcctcatgacgcgaagcaagttcggtctgctcgtgcatgtcacccgtcgcgtgcgcgtgtgccggagagcgaggaggagtgcaaggcctcacgacgcgctgccaggtccgtgctgctcgtgcgcgtcacccattgctgaatggactacttagagatagctacactatcgatgcatctacatcattttggactatatgggacaccatcagtaatgaaattcagtttctgactgaactaaacggtggtggtttgaatcatcgtggttcactggttttcacaatattgggattcttggcaaccatgaggacattatgagattcttggctaccatgaggacaaattgttcaattacattttctacgtctatttcgaagcgtcgatggcggatgtccgcacacaaaatgccttgaagggtctggaggaagttgcaagtttcctgcgtgtccttggctactatccgtgcaacacaataacgatatgagctgttgcgtcacactgtctatcttggttgctccgccttggaagaccagagtgggagatggttgctatttctgctcaattgaataaaaggttcctcttcccttgtttggaagagattatggtcattatacactcccgactgaatatgaacactcttgaaatacattgcgaagctgcagaggatcgtcattagaattgcatgaaggttgtatgcgaaaccactggattgaacaattcgagaaatctacagaggaagtcgtgaacagctatgcacaagattgagtctaaggtataggcatctgatggaggacatgttgtctctactcccgcatatgaaggacaaccaggacaaggtcgagtccaagcagagcaaggggaacacgccgagcaagctgcttgagctcaggagttgctccagctgcctttcttcgagattctggctgttgaccatgcgtcggatgagggcgcgattgtaccaattggttcgcagcatgatgcacatttgaccaaactgatgaatatggaaaatgaccaacctttgttgccggcaccaccagttaatctggaatcagccatccttgagcaaaatgcaaatatggtggctctcaaggaaggctgttctgtgggaagtgagctgccacctggtctgcagggtaattttggtggtaacaaagcaaacacgtgtacttcagcactgcattctattgatgaagatacagaatttcatggccctgttgcaaccatttcaactacgggtcaatcagaaggatctgacactgagattaatgttccaaactattctgacctagaagcactgatacttgatctggacctgattccatgggatcaagaatctgacttcatccaaccagaagtttcaaggtttcagtatcctgaaagcaggaaggatttgataagattagagaaaggtgtctgctcttatatgaaccgatctatcatgtctaagggtgctttcgcaattctttatggccaacgcacgaaatactacataagagagcccgaggtaagtcttgggagagaaacagaagaagtacatgttgatatcgatttgagtaaagaaggaaaggcaaacaaaatatcccgtcgacaggcagttattaagatggacgatggtggatctttctacataaacaatactgggaagttttcaattttcgtgaatagcaaagaagtaccctgcagtaaacgtataaacttaatgtcagactcattaattgagataaggaacctgaaattcatttttcacgtgaaccacgaggctgcaaggcaatacatagttcgaaaaaggagaggaagctcccaaggcgggatcacggcgtttgattggagtcagaacccatgagtagttaacgttatgatcaaggttgtttataatctgcgatagctacctctctcttcaagaaagtattggataagcgtaaagttatttataatttccgatagctaatatttctctcttccagttagcactgtt

SEQ ID NO: 68095 - DNA, 2637 bp, Zea Mays
ttctatactgctgtcttcctcatccatttctgcttcctctgctgtaactactactagttcttagttgaatcaatacctattgtgagtaggtcgctgactggtagccgcctcgggcgtggcgggatggaccgtggaggacgacgtcctcctcgccatcgagcgccaggctaccaatgatgctggtaggattgaagggcttgtggttatgaggattatcaatgagcccactgctgcggccttgtcatatggaatgaacagcaaggagggccttgtcggtgaagtgtgttcgtgccggagagcgtggagtgcgaggcctcatgacgcgaagcaagttcggtctgctcgtgcatgtcacccgtcgcgtgcgcgtgtgccggagagcgaggaggagtgcaaggcctcacgacgcgctgccaggtccgtgctgctcgtgcgcgtcacccattgctgatgatataccacaaatgttttcgacctaacaaagagggcatagaaagtagaagttggttgctcctttaaagcatcagtttcaagtagccatcagctgaaatctaccattgctgaaacaaggtgaaaaaaatgcagaatggactacttagagatagctacactatcgatgcatctacatcattttggactatatgggacaccatcagtaatgaaattcagtttctgactgaactaaacggtggtggtttgaatcatcgtggttcactggttttcacaatattgggattcttggcaaccatgaggacattatgagattcttggctaccatgaggacaaattgttcaattacattttctacgtctatttcgaagcgtcgatggcggatgtccgcacacaaaatgccttgaagggtctggaggaagttgcaagtttcctgcgtgtccttggctactatccgtgcaacacaataacgatatgagctgttgcgtcacactgtctatcttggttgctccgccttggaagaccagagtgggagatggttgctatttctgctcaagttagcgagaataaatactttgtttcgatggcatatcgttgaataaaaggttcctcttcccttgtttggaagagattatggtcattatacactcccgactgaatatgaacactcttgaaatacattgcgaagctgcagaggatcgtcattagaattgcatgaaggttgtatgcgaaaccactggattgaacaattcgagaaatctacagaggaagtcgtgaacagctatgcacaagattgagtctaaggtataggcatctgatggaggacatgttgtctctactcccgcatatgaaggacaaccaggacaaggtcgagtccaagcagagcaaggggaacacgccgagcaagctgcttgagctcaggagttgctccagctgcctttcttcgagattctggctgttgaccatgcgtcggatgagggcgcgattgtaccaattggttcgcagcatgatgcacatttgaccaaactgatgaatatggaaaatgaccaacctttgttgccggcaccaccagttaatctggaatcagccatccttgagcaaaatgcaaatatggtggctctcaaggaaggctgttctgtgggaagtgagctgccacctggtctgcagggtaattttggtggtaacaaagcaaacacgtgtacttcagcactgcattctattgatgaaggtgaagaaataacttgtggtttcattaaacatgagaggagttatgatttacagaatttgactatggataagtcaattcaagtgtctaatgaaacaaagtacaagtttcttgctcataagcccagagtaggctgtgaaactgctattcaaaactgtgagttggcttctgcattgccagatacagaatttcatggccctgttgcaaccatttcaactacgggtcaatcagaaggatctgacactgagattaatgttccaaactattctgacctagaagcactgatacttgatctggacctgattccatgggatcaagaatctgacttcatccaaccagaagtttcaaggtttcagtatcctgaaagcaggaaggatttgataagattagagaaaggtgtctgctcttatatgaaccgatctatcatgtctaagggtgctttcgcaattctttatggccaacgcacgaaatactacataagagagcccgaggtaagtcttgggagagaaacagaagaagtacatgttgatatcgatttgagtaaagaaggaaaggcaaacaaaatatcccgtcgacaggcagttattaagatggacgatggtggatctttctacataaacaatactgggaagttttcaattttcgtgaatagcaaagaagtaccctgcagtaaacgtataaacttaatgtcagactcattaattgagataaggaacctgaaattcatttttcacgtgaaccacgaggctgcaaggcaatacatagttcgaaaaaggagaggaagctcccaaggcgggatcacggcgtttgattggagtcagaacccatgagtagttaacgttatgatcaaggttgtttataatctgcgatagctacctctctcttcaagaaagtattggataagcgtaaagttatttataatttccgatagctaatatttctctcttccagttagcactgtt

SEQ ID NO: 68096 - DNA, 2789 bp, Zea Mays
ttctatactgctgtcttcctcatccatttctgcttcctctgctgtaactactactagttcttagttgaatcaatacctattgtgagtaggtcgctgactggtagccgcctcgggcgtggcgggatggaccgtggaggacgacgtcctcctcgccatcgagcgccaggctaccaatgatgctggtaggattgaagggcttgtggttatgaggattatcaatgagcccactgctgcggccttgtcatatggaatgaacagcaaggagggccttgtcggtgaagtgtgttcgtgccggagagcgtggagtgcgaggcctcatgacgcgaagcaagttcggtctgctcgtgcatgtcacccgtcgcgtgcgcgtgtgccggagagcgaggaggagtgcaaggcctcacgacgcgctgccaggtccgtgctgctcgtgcgcgtcacccattgctgttgaaatccatcccaccccaatgtttccaagtagagtaacagatatccgatctcggaatgaggatagtgactgggccatgggaatttgatcgagaaagaaagggaaaggtagagatagtggggacaatcgatttaattgtagctggaacatttctaaaggtattagtaggtgacttgctgcagcaaacttgaacacacaagcaacaaacatatgcttcaggtccttgatgctaccaacaggtgaaaaaaatgcagaatggactacttagagatagctacactatcgatgcatctacatcattttggactatatgggacaccatcagtaatggttgatcttgtctactgtgctttggagttcctttcaactttgcttggagcctttcatgccactgatggagtcatatgcctctgcccagaaattcagtttctgactgaactaaacggtggtggtttgaatcatcgtggttcactggttttcacaatattgggattcttggcaaccatgaggacattatgagattcttggctaccatgaggacaaattgttcaattacattttctacgtctatttcgaagcgtcgatggcggatgtccgcacacaaaatgccttgaagggtctggaggaagttgcaagtttcctgcgtgtccttggctactatccgtgcaacacaataacgatatgagctgttgcgtcacactgtctatcttggttgctccgccttggaagaccagagtgggagatgttgaataaaaggttcctcttcccttgtttggaagagattatggtcattatacactcccgactgaatatgaacactcttgaaatacattgcgaagctgcagaggatcgtcattagaattgcatgaaggttgtatgcgaaaccactggattgaacaattcgagaaatctacagaggaagtcgtgaacagctatgcacaagattgagtctaaggtataggcatctgatggaggacatgttgtctctactcccgcatatgaaggacaaccaggacaaggtcgagtccaagcagagcaaggggaacacgccgagcaagctgcttgagctcaggagttgctccagctgcctttcttcgagattctggctgttgaccatgcgtcggatgagggcgcgattgtaccaattggttcgcagcatgatgcacatttgaccaaactgatgaatatggaaaatgaccaacctttgttgccggcaccaccagttaatctggaatcagccatccttgagcaaaatgcaaatatggtggctctcaaggaaggctgttctgtgggaagtgagctgccacctggtctgcagggtaattttggtggtaacaaagcaaacacgtgtacttcagcactgcattctattgatgaaggtgaagaaataacttgtggtttcattaaacatgagaggagttatgatttacagaatttgactatggataagtcaattcaagtgtctaatgaaacaaagtacaagtttcttgctcataagcccagagtaggctgtgaaactgctattcaaaactgtgagttggcttctgcattgccagatacagaatttcatggccctgttgcaaccatttcaactacgggtcaatcagaaggatctgacactgagattaatgttccaaactattctgacctagaagcactgatacttgatctggacctgattccatgggatcaagaatctgacttcatccaaccagaagtttcaaggtttcagtatcctgaaagcaggaaggatttgataagattagagaaaggtgtctgctcttatatgaaccgatctatcatgtctaagggtgctttcgcaattctttatggccaacgcacgaaatactacataagagagcccgaggtaagtcttgggagagaaacagaagaagtacatgttgatatcgatttgagtaaagaaggaaaggcaaacaaaatatcccgtcgacaggcagttattaagatggacgatggtggatctttctacataaacaatactgggaagttttcaattttcgtgaatagcaaagaagtaccctgcagtaaacgtataaacttaatgtcagactcattaattgagataaggaacctgaaattcatttttcacgtgaaccacgaggctgcaaggcaatacatagttcgaaaaaggagaggaagctcccaaggcgggatcacggcgtttgattggagtcagaacccatgagtagttaacgttatgatcaaggttgtttataatctgcgatagctacctctctcttcaagaaagtattggataagcgtaaagttatttataatttccgatagctaatatttctctcttccagttagcactgtt

SEQ ID NO: 68097 - DNA, 2792 bp, Zea Mays
ttctatactgctgtcttcctcatccatttctgcttcctctgctgtaactactactagttcttagttgaatcaatacctattgtgagtaggtcgctgactggtagccgcctcgggcgtggcgggatggaccgtggaggacgacgtcctcctcgccatcgagcgccaggctaccaatgatgctggtaggattgaagggcttgtggttatgaggattatcaatgagcccactgctgcggccttgtcatatggaatgaacagcaaggagggccttgtcggtgaagtgtgttcgtgccggagagcgtggagtgcgaggcctcatgacgcgaagcaagttcggtctgctcgtgcatgtcacccgtcgcgtgcgcgtgtgccggagagcgaggaggagtgcaaggcctcacgacgcgctgccaggtccgtgctgctcgtgcgcgtcacccattgctgttgaaatccatcccaccccaatgtttccaagtagagtaacagatatccgatctcggaatgaggatagtgactgggccatgggaatttgatcgagaaagaaagggaaaggtagagatagtggggacaatcgatttaattgtagctggaacatttctaaaggtattagtaggtgacttgctgcagcaaacttgaacacacaagcaacaaacatatgcttcaggtccttgatgctaccaacagaatggactacttagagatagctacactatcgatgcatctacatcattttggactatatgggacaccatcagtaatggttgatcttgtctactgtgctttggagttcctttcaactttgcttggagcctttcatgccactgatggagtcatatgcctctgcccagaaattcagtttctgactgaactaaacggtggtggtttgaatcatcgtggttcactggttttcacaatattgggattcttggcaaccatgaggacattatgagattcttggctaccatgaggacaaattgttcaattacattttctacgtctatttcgaagcgtcgatggcggatgtccgcacacaaaatgccttgaagggtctggaggaagttgcaagtttcctgcgtgtccttggctactatccgtgcaacacaataacgatatgagctgttgcgtcacactgtctatcttggttgctccgccttggaagaccagagtgggagatggttgctatttctgctcaattgaataaaaggttcctcttcccttgtttggaagagattatggtcattatacactcccgactgaatatgaacactcttgaaatacattgcgaagctgcagaggatcgtcattagaattgcatgaaggttgtatgcgaaaccactggattgaacaattcgagaaatctacagaggaagtcgtgaacagctatgcacaagattgagtctaaggtataggcatctgatggaggacatgttgtctctactcccgcatatgaaggacaaccaggacaaggtcgagtccaagcagagcaaggggaacacgccgagcaagctgcttgagctcaggagttgctccagctgcctttcttcgagattctggctgttgaccatgcgtcggatgagggcgcgattgtaccaattggttcgcagcatgatgcacatttgaccaaactgatgaatatggaaaatgaccaacctttgttgccggcaccaccagttaatctggaatcagccatccttgagcaaaatgcaaatatggtggctctcaaggaaggctgttctgtgggaagtgagctgccacctggtctgcagggtaattttggtggtaacaaagcaaacacgtgtacttcagcactgcattctattgatgaaggtgaagaaataacttgtggtttcattaaacatgagaggagttatgatttacagaatttgactatggataagtcaattcaagtgtctaatgaaacaaagtacaagtttcttgctcataagcccagagtaggctgtgaaactgctattcaaaactgtgagttggcttctgcattgccagatacagaatttcatggccctgttgcaaccatttcaactacgggtcaatcagaaggatctgacactgagattaatgttccaaactattctgacctagaagcactgatacttgatctggacctgattccatgggatcaagaatctgacttcatccaaccagaagtttcaaggtttcagtatcctgaaagcaggaaggatttgataagattagagaaaggtgtctgctcttatatgaaccgatctatcatgtctaagggtgctttcgcaattctttatggccaacgcacgaaatactacataagagagcccgaggtaagtcttgggagagaaacagaagaagtacatgttgatatcgatttgagtaaagaaggaaaggcaaacaaaatatcccgtcgacaggcagttattaagatggacgatggtggatctttctacataaacaatactgggaagttttcaattttcgtgaatagcaaagaagtaccctgcagtaaacgtataaacttaatgtcagactcattaattgagataaggaacctgaaattcatttttcacgtgaaccacgaggctgcaaggcaatacatagttcgaaaaaggagaggaagctcccaaggcgggatcacggcgtttgattggagtcagaacccatgagtagttaacgttatgatcaaggttgtttataatctgcgatagctacctctctcttcaagaaagtattggataagcgtaaagttatttataatttccgatagctaatatttctctcttccagttagcactgtt

SEQ ID NO: 68098 - DNA, 2821 bp, Zea Mays
ttctatactgctgtcttcctcatccatttctgcttcctctgctgtaactactactagttcttagttgaatcaatacctattgtgagtaggtcgctgactggtagccgcctcgggcgtggcgggatggaccgtggaggacgacgtcctcctcgccatcgagcgccaggctaccaatgatgctggtaggattgaagggcttgtggttatgaggattatcaatgagcccactgctgcggccttgtcatatggaatgaacagcaaggagggccttgtcggtgaagtgtgttcgtgccggagagcgtggagtgcgaggcctcatgacgcgaagcaagttcggtctgctcgtgcatgtcacccgtcgcgtgcgcgtgtgccggagagcgaggaggagtgcaaggcctcacgacgcgctgccaggtccgtgctgctcgtgcgcgtcacccattgctgttgaaatccatcccaccccaatgtttccaagtagagtaacagatatccgatctcggaatgaggatagtgactgggccatgggaatttgatcgagaaagaaagggaaaggtagagatagtggggacaatcgatttaattgtagctggaacatttctaaaggtattagtaggtgacttgctgcagcaaacttgaacacacaagcaacaaacatatgcttcaggtccttgatgctaccaacagatgatataccacaaatgttttcgacctaacaaagagggcatagaaagtagaagttggttgctcctttaaagcatcagtttcaagtagccatcagctgaaatctaccattgctgaaacaaggtgaaaaaaatgcagaatggactacttagagatagctacactatcgatgcatctacatcattttggactatatgggacaccatcagtaatgaaattcagtttctgactgaactaaacggtggtggtttgaatcatcgtggttcactggttttcacaatattgggattcttggcaaccatgaggacattatgagattcttggctaccatgaggacaaattgttcaattacattttctacgtctatttcgaagcgtcgatggcggatgtccgcacacaaaatgccttgaagggtctggaggaagttgcaagtttcctgcgtgtccttggctactatccgtgcaacacaataacgatatgagctgttgcgtcacactgtctatcttggttgctccgccttggaagaccagagtgggagatgttgaataaaaggttcctcttcccttgtttggaagagattatggtcattatacactcccgactgaatatgaacactcttgaaatacattgcgaagctgcagaggatcgtcattagaattgcatgaaggttgtatgcgaaaccactggattgaacaattcgagaaatctacagaggaagtcgtgaacagctatgcacaagattgagtctaaggtataggcatctgatggaggacatgttgtctctactcccgcatatgaaggacaaccaggacaaggtcgagtccaagcagagcaaggggaacacgccgagcaagctgcttgagctcaggagttgctccagctgcctttcttcgagattctggctgttgaccatgcgtcggatgagggcgcgattgtaccaattggttcgcagcatgatgcacatttgaccaaactgatgaatatggaaaatgaccaacctttgttgccggcaccaccagttaatctggaatcagccatccttgagcaaaatgcaaatatggtggctctcaaggaaggctgttctgtgggaagtgagctgccacctggtctgcagggtaattttggtggtaacaaagcaaacacgtgtacttcagcactgcattctattgatgaaggtgaagaaataacttgtggtttcattaaacatgagaggagttatgatttacagaatttgactatggataagtcaattcaagtgtctaatgaaacaaagtacaagtttcttgctcataagcccagagtaggctgtgaaactgctattcaaaactgtgagttggcttctgcattgccagatacagaatttcatggccctgttgcaaccatttcaactacgggtcaatcagaaggatctgacactgagattaatgttccaaactattctgacctagaagcactgatacttgatctggacctgattccatgggatcaagaatctgacttcatccaaccagaagtttcaaggtttcagtatcctgaaagcaggaaggatttgataagattagagaaaggtgtctgctcttatatgaaccgatctatcatgtctaagggtgctttcgcaattctttatggccaacgcacgaaatactacataagagagcccgaggtaagtcttgggagagaaacagaagaagtacatgttgatatcgatttgagtaaagaaggaaaggcaaacaaaatatcccgtcgacaggcagttattaagatggacgatggtggatctttctacataaacaatactgggaagttttcaattttcgtgaatagcaaagaagtaccctgcagtaaacgtataaacttaatgtcagactcattaattgagataaggaacctgaaattcatttttcacgtgaaccacgaggctgcaaggcaatacatagttcgaaaaaggagaggaagctcccaaggcgggatcacggcgtttgattggagtcagaacccatgagtagttaacgttatgatcaaggttgtttataatctgcgatagctacctctctcttcaagaaagtattggataagcgtaaagttatttataatttccgatagctaatatttctctcttccagttagcactgtt

SEQ ID NO: 68099 - DNA, 2362 bp, Zea Mays
ttctatactgctgtcttcctcatccatttctgcttcctctgctgtaactactactagttcttagttgaatcaatacctattgtgagtaggtcgctgactggtagccgcctcgggcgtggcgggatggaccgtggaggacgacgtcctcctcgccatcgagcgccaggctaccaatgatgctggtaggattgaagggcttgtggttatgaggattatcaatgagcccactgctgcggccttgtcatatggaatgaacagcaaggagggccttgtcggtgaagtgtgttcgtgccggagagcgtggagtgcgaggcctcatgacgcgaagcaagttcggtctgctcgtgcatgtcacccgtcgcgtgcgcgtgtgccggagagcgaggaggagtgcaaggcctcacgacgcgctgccaggtccgtgctgctcgtgcgcgtcacccattgctgaatggactacttagagatagctacactatcgatgcatctacatcattttggactatatgggacaccatcagtaatgaaattcagtttctgactgaactaaacggtggtggtttgaatcatcgtggttcactggttttcacaatattgggattcttggcaaccatgaggacattatgagattcttggctaccatgaggacaaattgttcaattacattttctacgtctatttcgaagcgtcgatggcggatgtccgcacacaaaatgccttgaagggtctggaggaagttgcaagtttcctgcgtgtccttggctactatccgtgcaacacaataacgatatgagctgttgcgtcacactgtctatcttggttgctccgccttggaagaccagagtgggagatgttgaataaaaggttcctcttcccttgtttggaagagattatggtcattatacactcccgactgaatatgaacactcttgaaatacattgcgaagctgcagaggatcgtcattagaattgcatgaaggtataggcatctgatggaggacatgttgtctctactcccgcatatgaaggacaaccaggacaaggtcgagtccaagcagagcaaggggaacacgccgagcaagctgcttgagctcaggagttgctccagctgcctttcttcgagattctggctgttgaccatgcgtcggatgagggcgcgattgtaccaattggttcgcagcatgatgcacatttgaccaaactgatgaatatggaaaatgaccaacctttgttgccggcaccaccagttaatctggaatcagccatccttgagcaaaatgcaaatatggtggctctcaaggaaggctgttctgtgggaagtgagctgccacctggtctgcagggtaattttggtggtaacaaagcaaacacgtgtacttcagcactgcattctattgatgaaggtgaagaaataacttgtggtttcattaaacatgagaggagttatgatttacagaatttgactatggataagtcaattcaagtgtctaatgaaacaaagtacaagtttcttgctcataagcccagagtaggctgtgaaactgctattcaaaactgtgagttggcttctgcattgccagatacagaatttcatggccctgttgcaaccatttcaactacgggtcaatcagaaggatctgacactgagattaatgttccaaactattctgacctagaagcactgatacttgatctggacctgattccatgggatcaagaatctgacttcatccaaccagaagtttcaaggtttcagtatcctgaaagcaggaaggatttgataagattagagaaaggtgtctgctcttatatgaaccgatctatcatgtctaagggtgctttcgcaattctttatggccaacgcacgaaatactacataagagagcccgaggtaagtcttgggagagaaacagaagaagtacatgttgatatcgatttgagtaaagaaggaaaggcaaacaaaatatcccgtcgacaggcagttattaagatggacgatggtggatctttctacataaacaatactgggaagttttcaattttcgtgaatagcaaagaagtaccctgcagtaaacgtataaacttaatgtcagactcattaattgagataaggaacctgaaattcatttttcacgtgaaccacgaggctgcaaggcaatacatagttcgaaaaaggagaggaagctcccaaggcgggatcacggcgtttgattggagtcagaacccatgagtagttaacgttatgatcaaggttgtttataatctgcgatagctacctctctcttcaagaaagtattggataagcgtaaagttatttataatttccgatagctaatatttctctcttccagttagcactgtt

SEQ ID NO: 68100 - DNA, 2446 bp, Zea Mays
ttctatactgctgtcttcctcatccatttctgcttcctctgctgtaactactactagttcttagttgaatcaatacctattgtgagtaggtcgctgactggtagccgcctcgggcgtggcgggatggaccgtggaggacgacgtcctcctcgccatcgagcgccaggctaccaatgatgctggtaggattgaagggcttgtggttatgaggattatcaatgagcccactgctgcggccttgtcatatggaatgaacagcaaggagggccttgtcggtgaagtgtgttcgtgccggagagcgtggagtgcgaggcctcatgacgcgaagcaagttcggtctgctcgtgcatgtcacccgtcgcgtgcgcgtgtgccggagagcgaggaggagtgcaaggcctcacgacgcgctgccaggtccgtgctgctcgtgcgcgtcacccattgctgaatggactacttagagatagctacactatcgatgcatctacatcattttggactatatgggacaccatcagtaatgaaattcagtttctgactgaactaaacggtggtggtttgaatcatcgtggttcactggttttcacaatattgggattcttggcaaccatgaggacattatgagattcttggctaccatgaggacaaattgttcaattacattttctacgtctatttcgaagcgtcgatggcggatgtccgcacacaaaatgccttgaagggtctggaggaagttgcaagtttcctgcgtgtccttggctactatccgtgcaacacaataacgatatgagctgttgcgtcacactgtctatcttggttgctccgccttggaagaccagagtgggagatgttgaataaaaggttcctcttcccttgtttggaagagattatggtcattatacactcccgactgaatatgaacactcttgaaatacattgcgaagctgcagaggatcgtcattagaattgcatgaaggttgtatgcgaaaccactggattgaacaattcgagaaatctacagaggaagtcgtgaacagctatgcacaagattgagtctaaggtataggcatctgatggaggacatgttgtctctactcccgcatatgaaggacaaccaggacaaggtcgagtccaagcagagcaaggggaacacgccgagcaagctgcttgagctcaggagttgctccagctgcctttcttcgagattctggctgttgaccatgcgtcggatgagggcgcgattgtaccaattggttcgcagcatgatgcacatttgaccaaactgatgaatatggaaaatgaccaacctttgttgccggcaccaccagttaatctggaatcagccatccttgagcaaaatgcaaatatggtggctctcaaggaaggctgttctgtgggaagtgagctgccacctggtctgcagggtaattttggtggtaacaaagcaaacacgtgtacttcagcactgcattctattgatgaaggtgaagaaataacttgtggtttcattaaacatgagaggagttatgatttacagaatttgactatggataagtcaattcaagtgtctaatgaaacaaagtacaagtttcttgctcataagcccagagtaggctgtgaaactgctattcaaaactgtgagttggcttctgcattgccagatacagaatttcatggccctgttgcaaccatttcaactacgggtcaatcagaaggatctgacactgagattaatgttccaaactattctgacctagaagcactgatacttgatctggacctgattccatgggatcaagaatctgacttcatccaaccagaagtttcaaggtttcagtatcctgaaagcaggaaggatttgataagattagagaaaggtgtctgctcttatatgaaccgatctatcatgtctaagggtgctttcgcaattctttatggccaacgcacgaaatactacataagagagcccgaggtaagtcttgggagagaaacagaagaagtacatgttgatatcgatttgagtaaagaaggaaaggcaaacaaaatatcccgtcgacaggcagttattaagatggacgatggtggatctttctacataaacaatactgggaagttttcaattttcgtgaatagcaaagaagtaccctgcagtaaacgtataaacttaatgtcagactcattaattgagataaggaacctgaaattcatttttcacgtgaaccacgaggctgcaaggcaatacatagttcgaaaaaggagaggaagctcccaaggcgggatcacggcgtttgattggagtcagaacccatgagtagttaacgttatgatcaaggttgtttataatctgcgatagctacctctctcttcaagaaagtattggataagcgtaaagttatttataatttccgatagctaatatttctctcttccagttagcactgtt

SEQ ID NO: 68101 - DNA, 4221 bp, Zea Mays
ttctatactgctgtcttcctcatccatttctgcttcctctgctgtaactactactagttcttagttgaatcaatacctattgtgagtaggtcgctgactggtagccgcctcgggcgtggcgggatggaccgtggaggacgacgtcctcctcgccatcgagcgccaggctaccaatgatgctggtaggattgaagggcttgtggttatgaggattatcaatgagcccactgctgcggccttgtcatatggaatgaacagcaaggagggccttgtcggtgaagtgtgttcgtgccggagagcgtggagtgcgaggcctcatgacgcgaagcaagttcggtctgctcgtgcatgtcacccgtcgcgtgcgcgtgtgccggagagcgaggaggagtgcaaggcctcacgacgcgctgccaggtccgtgctgctcgtgcgcgtcacccattgctgatgatataccacaaatgttttcgacctaacaaagagggcatagaaagtagaagttggttgctcctttaaagcatcagtttcaagtagccatcagctgaaatctaccattgctgaaacaaggtgaaaaaaatgcagaatggactacttagagatagctacactatcgatgcatctacatcattttggactatatgggacaccatcagtaatggttgatcttgtctactgtgctttggagttcctttcaactttgcttggagcctttcatgccactgatggagtcatatgcctctgcccagaaattcagtttctgactgaactaaacggtggtggtttgaatcatcgtggttcactggttttcacaatattgggattcttggcaaccatgaggacattatgagattcttggctaccatgaggacaaattgttcaattacattttctacgtctatttcgaagcgtcgatggcggatgtccgcacacaaaatgccttgaagggtctggaggaagttgcaagtttcctgcgtgtccttggctactatccgtgcaacacaataacgatatgagctgttgcgtcacactgtctatcttggttgctccgccttggaagaccagagtgggagatggttgctatttctgctcaagttagcgagaataaatactttgtttcgatggcatatcggttgtggttctattatgacatatataacatactgatgttattattactcacattatctatgctatgttgaataatcatgtttttagttatatttctccttcaattctattctttcgtactaattatgtcttgtagcgttaagcaagggcaatatacaaattggtttcaatgattcattgcatcatattactcctgtctttaagcaatatagtttggattcacattagccttgtaacaaaagtaatttctaaacgttattatgatactcctaattggattgttacgctagacaatgtgacatacaactaagtcatttgaattttgcatgcagttgaataaaaggttcctcttcccttgtttggaagagattatggtcattatacactcccgactgaatatgaacactcttgaaatacattgcgaagctgcagaggatcgtcattagaattgcatgaaggtataggcatctgatggaggacatgttgtctctactcccgcatatgaaggacaaccaggacaaggtcgagtccaagcagagcaaggggaacacgccgagcaagctgcttgagctcaggagttgctccagctgcctttcttcgagattctggctgttgaccatgcgtcggatgagggcgcgattgtaccaattggttcgcagcatgatgcacatttgaccaaactgatgaatatggaaaatgaccaacctttgttgccggcaccaccagttaatctggaatcagccatccttgagcaaaatgcaaatatggtggctctcaaggaaggctgttctgtgggaagtgagctgccacctggtctgcagggtaattttggtggtaacaaagcaaacacgtgtacttcagcactgcattctattgatgaaggtgaagaaataacttgtggtttcattaaacatgagaggagttatgatttacagaatttgactatggataagtcaattcaagtgtctaatgaaacaaagtacaagtttcttgctcataagcccagagtaggctgtgaaactgctattcaaaactgtgagttggcttctgcattgccagatacagaatttcatggccctgttgcaaccatttcaactacgggtcaatcagaaggatctgacactgagattaatgttccaaactattctgacctagaagcactggtacatatagttattttcttcattgagtgtacatagctttacattccttggtgattctgactttctcaaaaaaaaaaaaaaatccagatacttgatctggacctgattccatgggatcaagaatctgacttcatccaaccagaagtttcaaggtttcagtatcctgaaagcaggaaggatttgataagattagagaaaggtgtctgctcttatatgaaccgatctatcatgtctaagggtgctttcgcaattctttatggccaacgcacgaaatactacataagagagcccgaggtaagtcttgggagagaaacagaagaagtacatgttgatatcgatttgagtaaagaaggaaaggcaaacaaaatatcccgtcgacaggcagttattaagatggacgatggtggatctttctacataaacaatactgggaagttttcaattttcgtgaatagcaaagaagtaccctgcagtaaacgtataaacttaatgtcagactcattaattgaggtatggccttccaatcctttctttgttcttacactaggaattccaaataaccgcgctatactaaatatccatgccctgtttaattctatgtactggttcctttttttaatctaacttcgaactagtaggctgtagagctattaattgttcatatttgtatgaaaaatgtgcttccatattgtaccataagattgaagtaatcaagcattcttagtcattcagatatagctggatgagagcatggttacttcactagctactgtttcatttgtggttccttagttcacatcacacatgatatgatataggcgcgtaggaaaacactaatcaggaaagtgagttgtaggtagaaagatacagtaagcttttcttttgcaactcattgaatatttgatgccactctgttgtgaattagtctagagttaaatcaggatctgccatttgagatctctattggttcatatgtgaaatgaaatgccactggaaccagagataatttttttatttgggattaatagataatactccatccatctcaaaatataagcatttctagttttgttctcaaaatataacatttctagttttgtttaagtcaagctattctaagtttgaccaagtttataaagaagtttagttacatctatcacatcaaagaagcaaactatgaaaatatgtcccaatgaatctaatgatgtccatttgatatcataaaaatttattgttctttttctataaacttggtcaaacttaggtcatgtttggaagcaactcagtttttaagaaaccattttttatttttagttaggagtgactagctttttggtttttaagaaactgtgaattcaatttttataaactggcataaactggtatttttggaaccacctcagtttccataaaccagtttcttaaaaactgggtggttccaaacaggctcttagtatagtttgacataacaaacccagaaattcttatgttgggacgggagaagtaacgtatagcaattggatctaggtaatgtaacaatggttactagttatggttcattttgttagttttaaactaatgcttctaccctacatatttcacggatatagggtaaaggattcatgtagcattttgacctcttgcgaagttgttttttttttgttaccgacagataaggaacctgaaattcatttttcacgtgaaccacgaggctgcaaggcaatacatagttcgaaaaaggagaggaagctcccaaggcgggatcacggcgtttgattggagtcagaacccatgagtagttaacgttatgatcaaggttgtttataatctgcgatagctacctctctcttcaagaaagtattggataagcgtaaagttatttataatttccgatagctaatatttctctcttccagttagcactgtt

SEQ ID NO: 68102 - DNA, 2719 bp, Zea Mays
ttctatactgctgtcttcctcatccatttctgcttcctctgctgtaactactactagttcttagttgaatcaatacctattgtgagtaggtcgctgactggtagccgcctcgggcgtggcgggatggaccgtggaggacgacgtcctcctcgccatcgagcgccaggctaccaatgatgctggtaggattgaagggcttgtggttatgaggattatcaatgagcccactgctgcggccttgtcatatggaatgaacagcaaggagggccttgtcggtgaagtgtgttcgtgccggagagcgtggagtgcgaggcctcatgacgcgaagcaagttcggtctgctcgtgcatgtcacccgtcgcgtgcgcgtgtgccggagagcgaggaggagtgcaaggcctcacgacgcgctgccaggtccgtgctgctcgtgcgcgtcacccattgctgttgaaatccatcccaccccaatgtttccaagtagagtaacagatatccgatctcggaatgaggatagtgactgggccatgggaatttgatcgagaaagaaagggaaaggtagagatagtggggacaatcgatttaattgtagctggaacatttctaaaggtattagtaggtgacttgctgcagcaaacttgaacacacaagcaacaaacatatgcttcaggtccttgatgctaccaacaggtgaaaaaaatgcagaatggactacttagagatagctacactatcgatgcatctacatcattttggactatatgggacaccatcagtaatgaaattcagtttctgactgaactaaacggtggtggtttgaatcatcgtggttcactggttttcacaatattgggattcttggcaaccatgaggacattatgagattcttggctaccatgaggacaaattgttcaattacattttctacgtctatttcgaagcgtcgatggcggatgtccgcacacaaaatgccttgaagggtctggaggaagttgcaagtttcctgcgtgtccttggctactatccgtgcaacacaataacgatatgagctgttgcgtcacactgtctatcttggttgctccgccttggaagaccagagtgggagatggttgctatttctgctcaattgaataaaaggttcctcttcccttgtttggaagagattatggtcattatacactcccgactgaatatgaacactcttgaaatacattgcgaagctgcagaggatcgtcattagaattgcatgaaggttgtatgcgaaaccactggattgaacaattcgagaaatctacagaggaagtcgtgaacagctatgcacaagattgagtctaaggtataggcatctgatggaggacatgttgtctctactcccgcatatgaaggacaaccaggacaaggtcgagtccaagcagagcaaggggaacacgccgagcaagctgcttgagctcaggagttgctccagctgcctttcttcgagattctggctgttgaccatgcgtcggatgagggcgcgattgtaccaattggttcgcagcatgatgcacatttgaccaaactgatgaatatggaaaatgaccaacctttgttgccggcaccaccagttaatctggaatcagccatccttgagcaaaatgcaaatatggtggctctcaaggaaggctgttctgtgggaagtgagctgccacctggtctgcagggtaattttggtggtaacaaagcaaacacgtgtacttcagcactgcattctattgatgaaggtgaagaaataacttgtggtttcattaaacatgagaggagttatgatttacagaatttgactatggataagtcaattcaagtgtctaatgaaacaaagtacaagtttcttgctcataagcccagagtaggctgtgaaactgctattcaaaactgtgagttggcttctgcattgccagatacagaatttcatggccctgttgcaaccatttcaactacgggtcaatcagaaggatctgacactgagattaatgttccaaactattctgacctagaagcactgatacttgatctggacctgattccatgggatcaagaatctgacttcatccaaccagaagtttcaaggtttcagtatcctgaaagcaggaaggatttgataagattagagaaaggtgtctgctcttatatgaaccgatctatcatgtctaagggtgctttcgcaattctttatggccaacgcacgaaatactacataagagagcccgaggtaagtcttgggagagaaacagaagaagtacatgttgatatcgatttgagtaaagaaggaaaggcaaacaaaatatcccgtcgacaggcagttattaagatggacgatggtggatctttctacataaacaatactgggaagttttcaattttcgtgaatagcaaagaagtaccctgcagtaaacgtataaacttaatgtcagactcattaattgagataaggaacctgaaattcatttttcacgtgaaccacgaggctgcaaggcaatacatagttcgaaaaaggagaggaagctcccaaggcgggatcacggcgtttgattggagtcagaacccatgagtagttaacgttatgatcaaggttgtttataatctgcgatagctacctctctcttcaagaaagtattggataagcgtaaagttatttataatttccgatagctaatatttctctcttccagttagcactgtt

SEQ ID NO: 68103 - DNA, 2687 bp, Zea Mays
ttctatactgctgtcttcctcatccatttctgcttcctctgctgtaactactactagttcttagttgaatcaatacctattgtgagtaggtcgctgactggtagccgcctcgggcgtggcgggatggaccgtggaggacgacgtcctcctcgccatcgagcgccaggctaccaatgatgctggtaggattgaagggcttgtggttatgaggattatcaatgagcccactgctgcggccttgtcatatggaatgaacagcaaggagggccttgtcggtgaagtgtgttcgtgccggagagcgtggagtgcgaggcctcatgacgcgaagcaagttcggtctgctcgtgcatgtcacccgtcgcgtgcgcgtgtgccggagagcgaggaggagtgcaaggcctcacgacgcgctgccaggtccgtgctgctcgtgcgcgtcacccattgctgatgatataccacaaatgttttcgacctaacaaagagggcatagaaagtagaagttggttgctcctttaaagcatcagtttcaagtagccatcagctgaaatctaccattgctgaaacaaggtgaaaaaaatgcagaatggactacttagagatagctacactatcgatgcatctacatcattttggactatatgggacaccatcagtaatggttgatcttgtctactgtgctttggagttcctttcaactttgcttggagcctttcatgccactgatggagtcatatgcctctgcccagaaattcagtttctgactgaactaaacggtggtggtttgaatcatcgtggttcactggttttcacaatattgggattcttggcaaccatgaggacattatgagattcttggctaccatgaggacaaattgttcaattacattttctacgtctatttcgaagcgtcgatggcggatgtccgcacacaaaatgccttgaagggtctggaggaagttgcaagtttcctgcgtgtccttggctactatccgtgcaacacaataacgatatgagctgttgcgtcacactgtctatcttggttgctccgccttggaagaccagagtgggagatggttgctatttctgctcaattgaataaaaggttcctcttcccttgtttggaagagattatggtcattatacactcccgactgaatatgaacactcttgaaatacattgcgaagctgcagaggatcgtcattagaattgcatgaaggttgtatgcgaaaccactggattgaacaattcgagaaatctacagaggaagtcgtgaacagctatgcacaagattgagtctaaggtataggcatctgatggaggacatgttgtctctactcccgcatatgaaggacaaccaggacaaggtcgagtccaagcagagcaaggggaacacgccgagcaagctgcttgagctcaggagttgctccagctgcctttcttcgagattctggctgttgaccatgcgtcggatgagggcgcgattgtaccaattggttcgcagcatgatgcacatttgaccaaactgatgaatatggaaaatgaccaacctttgttgccggcaccaccagttaatctggaatcagccatccttgagcaaaatgcaaatatggtggctctcaaggaaggctgttctgtgggaagtgagctgccacctggtctgcagggtaattttggtggtaacaaagcaaacacgtgtacttcagcactgcattctattgatgaaggtgaagaaataacttgtggtttcattaaacatgagaggagttatgatttacagaatttgactatggataagtcaattcaagtgtctaatgaaacaaagtacaagtttcttgctcataagcccagagtaggctgtgaaactgctattcaaaactgtgagttggcttctgcattgccagatacagaatttcatggccctgttgcaaccatttcaactacgggtcaatcagaaggatctgacactgagattaatgttccaaactattctgacctagaagcactgatacttgatctggacctgattccatgggatcaagaatctgacttcatccaaccagaagtttcaaggtttcagtatcctgaaagcaggaaggatttgataagattagagaaaggtgtctgctcttatatgaaccgatctatcatgtctaagggtgctttcgcaattctttatggccaacgcacgaaatactacataagagagcccgaggtaagtcttgggagagaaacagaagaagtacatgttgatatcgatttgagtaaagaaggaaaggcaaacaaaatatcccgtcgacaggcagttattaagatggacgatggtggatctttctacataaacaatactgggaagttttcaattttcgtgaatagcaaagaagtaccctgcagtaaacgtataaacttaatgtcagactcattaattgagataaggaacctgaaattcatttttcacgtgaaccacgaggctgcaaggcaatacatagttcgaaaaaggagaggaagctcccaaggcgggatcacggcgtttgattggagtcagaacccatgagtagttaacgttatgatcaaggttgtttataatctgcgatagctacctctctcttcaagaaagtattggataagcgtaaagttatttataatttccgatagctaatatttctctcttccagttagcactgtt

SEQ ID NO: 68104 - DNA, 2641 bp, Zea Mays
ttctatactgctgtcttcctcatccatttctgcttcctctgctgtaactactactagttcttagttgaatcaatacctattgtgagtaggtcgctgactggtagccgcctcgggcgtggcgggatggaccgtggaggacgacgtcctcctcgccatcgagcgccaggctaccaatgatgctggtaggattgaagggcttgtggttatgaggattatcaatgagcccactgctgcggccttgtcatatggaatgaacagcaaggagggccttgtcggtgaagtgtgttcgtgccggagagcgtggagtgcgaggcctcatgacgcgaagcaagttcggtctgctcgtgcatgtcacccgtcgcgtgcgcgtgtgccggagagcgaggaggagtgcaaggcctcacgacgcgctgccaggtccgtgctgctcgtgcgcgtcacccattgctgatgatataccacaaatgttttcgacctaacaaagagggcatagaaagtagaagttggttgctcctttaaagcatcagtttcaagtagccatcagctgaaatctaccattgctgaaacaaggtgaaaaaaatgcagaatggactacttagagatagctacactatcgatgcatctacatcattttggactatatgggacaccatcagtaatggttgatcttgtctactgtgctttggagttcctttcaactttgcttggagcctttcatgccactgatggagtcatatgcctctgcccagaaattcagtttctgactgaactaaacggtggtggtttgaatcatcgtggttcactggttttcacaatattgggattcttggcaaccatgaggacattatgagattcttggctaccatgaggacaaattgttcaattacattttctacgtctatttcgaagcgtcgatggcggatgtccgcacacaaaatgccttgaagggtctggaggaagttgcaagtttcctgcgtgtccttggctactatccgtgcaacacaataacgatatgagctgttgcgtcacactgtctatcttggttgctccgccttggaagaccagagtgggagatggttgctatttctgctcaagttagcgagaataaatactttgtttcgatggcatatcgttgaataaaaggttcctcttcccttgtttggaagagattatggtcattatacactcccgactgaatatgaacactcttgaaatacattgcgaagctgcagaggatcgtcattagaattgcatgaaggtataggcatctgatggaggacatgttgtctctactcccgcatatgaaggacaaccaggacaaggtcgagtccaagcagagcaaggggaacacgccgagcaagctgcttgagctcaggagttgctccagctgcctttcttcgagattctggctgttgaccatgcgtcggatgagggcgcgattgtaccaattggttcgcagcatgatgcacatttgaccaaactgatgaatatggaaaatgaccaacctttgttgccggcaccaccagttaatctggaatcagccatccttgagcaaaatgcaaatatggtggctctcaaggaaggctgttctgtgggaagtgagctgccacctggtctgcagggtaattttggtggtaacaaagcaaacacgtgtacttcagcactgcattctattgatgaaggtgaagaaataacttgtggtttcattaaacatgagaggagttatgatttacagaatttgactatggataagtcaattcaagtgtctaatgaaacaaagtacaagtttcttgctcataagcccagagtaggctgtgaaactgctattcaaaactgtgagttggcttctgcattgccagatacagaatttcatggccctgttgcaaccatttcaactacgggtcaatcagaaggatctgacactgagattaatgttccaaactattctgacctagaagcactgatacttgatctggacctgattccatgggatcaagaatctgacttcatccaaccagaagtttcaaggtttcagtatcctgaaagcaggaaggatttgataagattagagaaaggtgtctgctcttatatgaaccgatctatcatgtctaagggtgctttcgcaattctttatggccaacgcacgaaatactacataagagagcccgaggtaagtcttgggagagaaacagaagaagtacatgttgatatcgatttgagtaaagaaggaaaggcaaacaaaatatcccgtcgacaggcagttattaagatggacgatggtggatctttctacataaacaatactgggaagttttcaattttcgtgaatagcaaagaagtaccctgcagtaaacgtataaacttaatgtcagactcattaattgagataaggaacctgaaattcatttttcacgtgaaccacgaggctgcaaggcaatacatagttcgaaaaaggagaggaagctcccaaggcgggatcacggcgtttgattggagtcagaacccatgagtagttaacgttatgatcaaggttgtttataatctgcgatagctacctctctcttcaagaaagtattggataagcgtaaagttatttataatttccgatagctaatatttctctcttccagttagcactgtt

SEQ ID NO: 68105 - DNA, 2581 bp, Zea Mays
ttctatactgctgtcttcctcatccatttctgcttcctctgctgtaactactactagttcttagttgaatcaatacctattgtgagtaggtcgctgactggtagccgcctcgggcgtggcgggatggaccgtggaggacgacgtcctcctcgccatcgagcgccaggctaccaatgatgctggtaggattgaagggcttgtggttatgaggattatcaatgagcccactgctgcggccttgtcatatggaatgaacagcaaggagggccttgtcggtgaagtgtgttcgtgccggagagcgtggagtgcgaggcctcatgacgcgaagcaagttcggtctgctcgtgcatgtcacccgtcgcgtgcgcgtgtgccggagagcgaggaggagtgcaaggcctcacgacgcgctgccaggtccgtgctgctcgtgcgcgtcacccattgctgatgatataccacaaatgttttcgacctaacaaagagggcatagaaagtagaagttggttgctcctttaaagcatcagtttcaagtagccatcagctgaaatctaccattgctgaaacaaggtgaaaaaaatgcagaatggactacttagagatagctacactatcgatgcatctacatcattttggactatatgggacaccatcagtaatgaaattcagtttctgactgaactaaacggtggtggtttgaatcatcgtggttcactggttttcacaatattgggattcttggcaaccatgaggacattatgagattcttggctaccatgaggacaaattgttcaattacattttctacgtctatttcgaagcgtcgatggcggatgtccgcacacaaaatgccttgaagggtctggaggaagttgcaagtttcctgcgtgtccttggctactatccgtgcaacacaataacgatatgagctgttgcgtcacactgtctatcttggttgctccgccttggaagaccagagtgggagatgttgaataaaaggttcctcttcccttgtttggaagagattatggtcattatacactcccgactgaatatgaacactcttgaaatacattgcgaagctgcagaggatcgtcattagaattgcatgaaggttgtatgcgaaaccactggattgaacaattcgagaaatctacagaggaagtcgtgaacagctatgcacaagattgagtctaaggtataggcatctgatggaggacatgttgtctctactcccgcatatgaaggacaaccaggacaaggtcgagtccaagcagagcaaggggaacacgccgagcaagctgcttgagctcaggagttgctccagctgcctttcttcgagattctggctgttgaccatgcgtcggatgagggcgcgattgtaccaattggttcgcagcatgatgcacatttgaccaaactgatgaatatggaaaatgaccaacctttgttgccggcaccaccagttaatctggaatcagccatccttgagcaaaatgcaaatatggtggctctcaaggaaggctgttctgtgggaagtgagctgccacctggtctgcagggtaattttggtggtaacaaagcaaacacgtgtacttcagcactgcattctattgatgaaggtgaagaaataacttgtggtttcattaaacatgagaggagttatgatttacagaatttgactatggataagtcaattcaagtgtctaatgaaacaaagtacaagtttcttgctcataagcccagagtaggctgtgaaactgctattcaaaactgtgagttggcttctgcattgccagatacagaatttcatggccctgttgcaaccatttcaactacgggtcaatcagaaggatctgacactgagattaatgttccaaactattctgacctagaagcactgatacttgatctggacctgattccatgggatcaagaatctgacttcatccaaccagaagtttcaaggtttcagtatcctgaaagcaggaaggatttgataagattagagaaaggtgtctgctcttatatgaaccgatctatcatgtctaagggtgctttcgcaattctttatggccaacgcacgaaatactacataagagagcccgaggtaagtcttgggagagaaacagaagaagtacatgttgatatcgatttgagtaaagaaggaaaggcaaacaaaatatcccgtcgacaggcagttattaagatggacgatggtggatctttctacataaacaatactgggaagttttcaattttcgtgaatagcaaagaagtaccctgcagtaaacgtataaacttaatgtcagactcattaattgagataaggaacctgaaattcatttttcacgtgaaccacgaggctgcaaggcaatacatagttcgaaaaaggagaggaagctcccaaggcgggatcacggcgtttgattggagtcagaacccatgagtagttaacgttatgatcaaggttgtttataatctgcgatagctacctctctcttcaagaaagtattggataagcgtaaagttatttataatttccgatagctaatatttctctcttccagttagcactgtt

SEQ ID NO: 68106 - DNA, 2927 bp, Zea Mays
ttctatactgctgtcttcctcatccatttctgcttcctctgctgtaactactactagttcttagttgaatcaatacctattgtgagtaggtcgctgactggtagccgcctcgggcgtggcgggatggaccgtggaggacgacgtcctcctcgccatcgagcgccaggctaccaatgatgctggtaggattgaagggcttgtggttatgaggattatcaatgagcccactgctgcggccttgtcatatggaatgaacagcaaggagggccttgtcggtgaagtgtgttcgtgccggagagcgtggagtgcgaggcctcatgacgcgaagcaagttcggtctgctcgtgcatgtcacccgtcgcgtgcgcgtgtgccggagagcgaggaggagtgcaaggcctcacgacgcgctgccaggtccgtgctgctcgtgcgcgtcacccattgctgttgaaatccatcccaccccaatgtttccaagtagagtaacagatatccgatctcggaatgaggatagtgactgggccatgggaatttgatcgagaaagaaagggaaaggtagagatagtggggacaatcgatttaattgtagctggaacatttctaaaggtattagtaggtgacttgctgcagcaaacttgaacacacaagcaacaaacatatgcttcaggtccttgatgctaccaacagatgatataccacaaatgttttcgacctaacaaagagggcatagaaagtagaagttggttgctcctttaaagcatcagtttcaagtagccatcagctgaaatctaccattgctgaaacaaggtgaaaaaaatgcagaatggactacttagagatagctacactatcgatgcatctacatcattttggactatatgggacaccatcagtaatggttgatcttgtctactgtgctttggagttcctttcaactttgcttggagcctttcatgccactgatggagtcatatgcctctgcccagaaattcagtttctgactgaactaaacggtggtggtttgaatcatcgtggttcactggttttcacaatattgggattcttggcaaccatgaggacattatgagattcttggctaccatgaggacaaattgttcaattacattttctacgtctatttcgaagcgtcgatggcggatgtccgcacacaaaatgccttgaagggtctggaggaagttgcaagtttcctgcgtgtccttggctactatccgtgcaacacaataacgatatgagctgttgcgtcacactgtctatcttggttgctccgccttggaagaccagagtgggagatggttgctatttctgctcaattgaataaaaggttcctcttcccttgtttggaagagattatggtcattatacactcccgactgaatatgaacactcttgaaatacattgcgaagctgcagaggatcgtcattagaattgcatgaaggttgtatgcgaaaccactggattgaacaattcgagaaatctacagaggaagtcgtgaacagctatgcacaagattgagtctaaggtataggcatctgatggaggacatgttgtctctactcccgcatatgaaggacaaccaggacaaggtcgagtccaagcagagcaaggggaacacgccgagcaagctgcttgagctcaggagttgctccagctgcctttcttcgagattctggctgttgaccatgcgtcggatgagggcgcgattgtaccaattggttcgcagcatgatgcacatttgaccaaactgatgaatatggaaaatgaccaacctttgttgccggcaccaccagttaatctggaatcagccatccttgagcaaaatgcaaatatggtggctctcaaggaaggctgttctgtgggaagtgagctgccacctggtctgcagggtaattttggtggtaacaaagcaaacacgtgtacttcagcactgcattctattgatgaaggtgaagaaataacttgtggtttcattaaacatgagaggagttatgatttacagaatttgactatggataagtcaattcaagtgtctaatgaaacaaagtacaagtttcttgctcataagcccagagtaggctgtgaaactgctattcaaaactgtgagttggcttctgcattgccagatacagaatttcatggccctgttgcaaccatttcaactacgggtcaatcagaaggatctgacactgagattaatgttccaaactattctgacctagaagcactgatacttgatctggacctgattccatgggatcaagaatctgacttcatccaaccagaagtttcaaggtttcagtatcctgaaagcaggaaggatttgataagattagagaaaggtgtctgctcttatatgaaccgatctatcatgtctaagggtgctttcgcaattctttatggccaacgcacgaaatactacataagagagcccgaggtaagtcttgggagagaaacagaagaagtacatgttgatatcgatttgagtaaagaaggaaaggcaaacaaaatatcccgtcgacaggcagttattaagatggacgatggtggatctttctacataaacaatactgggaagttttcaattttcgtgaatagcaaagaagtaccctgcagtaaacgtataaacttaatgtcagactcattaattgagataaggaacctgaaattcatttttcacgtgaaccacgaggctgcaaggcaatacatagttcgaaaaaggagaggaagctcccaaggcgggatcacggcgtttgattggagtcagaacccatgagtagttaacgttatgatcaaggttgtttataatctgcgatagctacctctctcttcaagaaagtattggataagcgtaaagttatttataatttccgatagctaatatttctctcttccagttagcactgtt

SEQ ID NO: 68107 - DNA, 3747 bp, Zea Mays
ttctatactgctgtcttcctcatccatttctgcttcctctgctgtaactactactagttcttagttgaatcaatacctattgtgagtaggtcgctgactggtagccgcctcgggcgtggcgggatggaccgtggaggacgacgtcctcctcgccatcgagcgccaggctaccaatgatgctggtaggattgaagggcttgtggttatgaggattatcaatgagcccactgctgcggccttgtcatatggaatgaacagcaaggagggccttgtcggtgaagtgtgttcgtgccggagagcgtggagtgcgaggcctcatgacgcgaagcaagttcggtctgctcgtgcatgtcacccgtcgcgtgcgcgtgtgccggagagcgaggaggagtgcaaggcctcacgacgcgctgccaggtccgtgctgctcgtgcgcgtcacccattgctgatgatataccacaaatgttttcgacctaacaaagagggcatagaaagtagaagttggttgctcctttaaagcatcagtttcaagtagccatcagctgaaatctaccattgctgaaacaaggtgaaaaaaatgcagaatggactacttagagatagctacactatcgatgcatctacatcattttggactatatgggacaccatcagtaatgaaattcagtttctgactgaactaaacggtggtggtttgaatcatcgtggttcactggttttcacaatattgggattcttggcaaccatgaggacattatgagattcttggctaccatgaggacaagttgattgttcaattacattttctacgtctatttcgaagcgtcgatggcggatgtccgcacacaaaatgccttgaagggtctggaggaagttgcaagtttcctgcgtgtccttggctactatccgtgcaacacaataacgatatgagctgttgcgtcacactgtctatcttggttgctccgccttggaagaccagagtgggagatgttgaataaaaggttcctcttcccttgtttggaagagattatggtcattatacactcccgactgaatatgaacactcttgaaatacattgcgaagctgcagaggatcgtcattagaattgcatgaaggttgtatgcgaaaccactggattgaacaattcgagaaatctacagaggaagtcgtgaacagctatgcacaagattgagtctaaggtataggcatctgatggaggacatgttgtctctactcccgcatatgaaggacaaccaggacaaggtcgagtccaagcagagcaaggggaacacgccgagcaagctgcttgagctcaggagttgctccagctgcctttcttcgagattctggctgttgaccatgcgtcggatgagggcgcgattgtaccaattggttcgcagcatgatgcacatttgaccaaactgatgaatatggaaaatgaccaacctttgttgccggcaccaccagttaatctggaatcagccatccttgagcaaaatgcaaatatggtggctctcaaggaaggctgttctgtgggaagtgagctgccacctggtctgcagggtaattttggtggtaacaaagcaaacacgtgtacttcagcactgcattctattgatgaaggtgaagaaataacttgtggtttcattaaacatgagaggagttatgatttacagaatttgactatggataagtcaattcaagtgtctaatgaaacaaagtacaagtttcttgctcataagcccagagtaggctgtgaaactgctattcaaaactgtgagttggcttctgcattgccagatacagaatttcatggccctgttgcaaccatttcaactacgggtcaatcagaaggatctgacactgagattaatgttccaaactattctgacctagaagcactggtacttgatctggacctgattccatgggatcaagaatctgacttcatccaaccagaagtttcaaggtttcagtatcctgaaagcaggaaggatttgataagattagagaaaggtgtctgctcttatatgaaccgatctatcatgtctaagggtgctttcgcaattctttatggccaacgcacgaaatactacataagagagcccgaggtaagtcttgggagagaaacagaagaagtacatgttgatatcgatttgagtaaagaaggaaaggcaaacaaaatatcccgtcgacaggcagttattaagatggacgatggtggatctttctacataaacaatactgggaagttttcaattttcgtgaatagcaaagaagtaccctgcagtaaacgtataaacttaatgtcagactcattaattgaggtatggccttccaatcctttctttgttcttacactaggaattccaaataaccgcgctatactaaatatccatgccctgtttaattctatgtactggttcctttttttaatctaacttcgaactagtaggctgtagagctattaattgttcatatttgtatgaaaaatgtgcttccatattgtaccataagattgaagtaatcaagcattcttagtcattcagatatagctggatgagagcatggttacttcactagctactgtttcatttgtggttccttagttcacatcacacatgatatgatataggcgcgtaggaaaacactaatcaggaaagtgagttgtaggtagaaagatacagtaagcttttcttttgcaactcattgaatatttgatgccactctgttgtgaattagtctagagttaaatcaggatctgccatttgagatctctattggttcatatgtgaaatgaaatgccactggaaccagagataatttttttatttgggattaatagataatactccatccatctcaaaatataagcatttctagttttgttctcaaaatataacatttctagttttgtttaagtcaagctattctaagtttgaccaagtttataaagaagtttagttacatctatcacatcaaagaagcaaactatgaaaatatgtcccaatgaatctaatgatgtccatttgatatcataaaaatttattgttctttttctataaacttggtcaaacttaggtcatgtttggaagcaactcagtttttaagaaaccattttttatttttagttaggagtgactagctttttggtttttaagaaactgtgaattcaatttttataaactggcataaactggtatttttggaaccacctcagtttccataaaccagtttcttaaaaactgggtggttccaaacaggctcttagtatagtttgacataacaaacccagaaattcttatgttgggacgggagaagtaacgtatagcaattggatctaggtaatgtaacaatggttactagttatggttcattttgttagttttaaactaatgcttctaccctacatatttcacggatatagggtaaaggattcatgtagcattttgacctcttgcgaagttgttttttttttgttaccgacagataaggaacctgaaattcatttttcacgtgaaccacgaggctgcaaggcaatacatagttcgaaaaaggagaggaagctcccaaggcgggatcacggcgtttgattggagtcagaacccatgagtagttaacgttatgatcaaggttgtttataatctgcgatagctacctctctcttcaagaaagtattggataagcgtaaagttatttataatttccgatagctaatatttctctcttccagttagcactgtt

SEQ ID NO: 68108 - DNA, 4127 bp, Zea Mays
ttctatactgctgtcttcctcatccatttctgcttcctctgctgtaactactactagttcttagttgaatcaatacctattgtgagtaggtcgctgactggtagccgcctcgggcgtggcgggatggaccgtggaggacgacgtcctcctcgccatcgagcgccaggctaccaatgatgctggtaggattgaagggcttgtggttatgaggattatcaatgagcccactgctgcggccttgtcatatggaatgaacagcaaggagggccttgtcggtgaagtgtgttcgtgccggagagcgtggagtgcgaggcctcatgacgcgaagcaagttcggtctgctcgtgcatgtcacccgtcgcgtgcgcgtgtgccggagagcgaggaggagtgcaaggcctcacgacgcgctgccaggtccgtgctgctcgtgcgcgtcacccattgctgttgaaatccatcccaccccaatgtttccaagtagagtaacagatatccgatctcggaatgaggatagtgactgggccatgggaatttgatcgagaaagaaagggaaaggtagagatagtggggacaatcgatttaattgtagctggaacatttctaaaggtattagtaggtgacttgctgcagcaaacttgaacacacaagcaacaaacatatgcttcaggtccttgatgctaccaacagatgatataccacaaatgttttcgacctaacaaagagggcatagaaagtagaagttggttgctcctttaaagcatcagtttcaagtagccatcagctgaaatctaccattgctgaaacaaggtgaaaaaaatgcagaatggactacttagagatagctacactatcgatgcatctacatcattttggactatatgggacaccatcagtaatggttgatcttgtctactgtgctttggagttcctttcaactttgcttggagcctttcatgccactgatggagtcatatgcctctgcccagaaattcagtttctgactgaactaaacggtggtggtttgaatcatcgtggttcactggttttcacaatattgggattcttggcaaccatgaggacattatgagattcttggctaccatgaggacaaattgttcaattacattttctacgtctatttcgaagcgtcgatggcggatgtccgcacacaaaatgccttgaagggtctggaggaagttgcaagtttcctgcgtgtccttggctactatccgtgcaacacaataacgatatgagctgttgcgtcacactgtctatcttggttgctccgccttggaagaccagagtgggagatggttgctatttctgctcaagttagcgagaataaatactttgtttcgatggcatatcgttgaataaaaggttcctcttcccttgtttggaagagattatggtcattatacactcccgactgaatatgaacactcttgaaatacattgcgaagctgcagaggatcgtcattagaattgcatgaaggttgtatgcgaaaccactggattgaacaattcgagaaatctacagaggaagtcgtgaacagctatgcacaagattgagtctaaggtataggcatctgatggaggacatgttgtctctactcccgcatatgaaggacaaccaggacaaggtcgagtccaagcagagcaaggggaacacgccgagcaagctgcttgagctcaggagttgctccagctgcctttcttcgagattctggctgttgaccatgcgtcggatgagggcgcgattgtaccaattggttcgcagcatgatgcacatttgaccaaactgatgaatatggaaaatgaccaacctttgttgccggcaccaccagttaatctggaatcagccatccttgagcaaaatgcaaatatggtggctctcaaggaaggctgttctgtgggaagtgagctgccacctggtctgcagggtaattttggtggtaacaaagcaaacacgtgtacttcagcactgcattctattgatgaaggtgaagaaataacttgtggtttcattaaacatgagaggagttatgatttacagaatttgactatggataagtcaattcaagtgtctaatgaaacaaagtacaagtttcttgctcataagcccagagtaggctgtgaaactgctattcaaaactgtgagttggcttctgcattgccagatacagaatttcatggccctgttgcaaccatttcaactacgggtcaatcagaaggatctgacactgagattaatgttccaaactattctgacctagaagcactgatacttgatctggacctgattccatgggatcaagaatctgacttcatccaaccagaagtttcaaggtttcagtatcctgaaagcaggaaggatttgataagattagagaaaggtgtctgctcttatatgaaccgatctatcatgtctaagggtgctttcgcaattctttatggccaacgcacgaaatactacataagagagcccgaggtaagtcttgggagagaaacagaagaagtacatgttgatatcgatttgagtaaagaaggaaaggcaaacaaaatatcccgtcgacaggcagttattaagatggacgatggtggatctttctacataaacaatactgggaagttttcaattttcgtgaatagcaaagaagtaccctgcagtaaacgtataaacttaatgtcagactcattaattgaggtatggccttccaatcctttctttgttcttacactaggaattccaaataaccgcgctatactaaatatccatgccctgtttaattctatgtactggttcctttttttaatctaacttcgaactagtaggctgtagagctattaattgttcatatttgtatgaaaaatgtgcttccatattgtaccataagattgaagtaatcaagcattcttagtcattcagatatagctggatgagagcatggttacttcactagctactgtttcatttgtggttccttagttcacatcacacatgatatgatataggcgcgtaggaaaacactaatcaggaaagtgagttgtaggtagaaagatacagtaagcttttcttttgcaactcattgaatatttgatgccactctgttgtgaattagtctagagttaaatcaggatctgccatttgagatctctattggttcatatgtgaaatgaaatgccactggaaccagagataatttttttatttgggattaatagataatactccatccatctcaaaatataagcatttctagttttgttctcaaaatataacatttctagttttgtttaagtcaagctattctaagtttgaccaagtttataaagaagtttagttacatctatcacatcaaagaagcaaactatgaaaatatgtcccaatgaatctaatgatgtccatttgatatcataaaaatttattgttctttttctataaacttggtcaaacttaggtcatgtttggaagcaactcagtttttaagaaaccattttttatttttagttaggagtgactagctttttggtttttaagaaactgtgaattcaatttttataaactggcataaactggtatttttggaaccacctcagtttccataaaccagtttcttaaaaactgggtggttccaaacaggctcttagtatagtttgacataacaaacccagaaattcttatgttgggacgggagaagtaacgtatagcaattggatctaggtaatgtaacaatggttactagttatggttcattttgttagttttaaactaatgcttctaccctacatatttcacggatatagggtaaaggattcatgtagcattttgacctcttgcgaagttgttttttttttgttaccgacagataaggaacctgaaattcatttttcacgtgaaccacgaggctgcaaggcaatacatagttcgaaaaaggagaggaagctcccaaggcgggatcacggcgtttgattggagtcagaacccatgagtagttaacgttatgatcaaggttgtttataatctgcgatagctacctctctcttcaagaaagtattggataagcgtaaagttatttataatttccgatagctaatatttctctcttccagttagcactgtt

SEQ ID NO: 68109 - DNA, 3699 bp, Zea Mays
ttctatactgctgtcttcctcatccatttctgcttcctctgctgtaactactactagttcttagttgaatcaatacctattgtgagtaggtcgctgactggtagccgcctcgggcgtggcgggatggaccgtggaggacgacgtcctcctcgccatcgagcgccaggctaccaatgatgctggtaggattgaagggcttgtggttatgaggattatcaatgagcccactgctgcggccttgtcatatggaatgaacagcaaggagggccttgtcggtgaagtgtgttcgtgccggagagcgtggagtgcgaggcctcatgacgcgaagcaagttcggtctgctcgtgcatgtcacccgtcgcgtgcgcgtgtgccggagagcgaggaggagtgcaaggcctcacgacgcgctgccaggtccgtgctgctcgtgcgcgtcacccattgctgaatggactacttagagatagctacactatcgatgcatctacatcattttggactatatgggacaccatcagtaatgaaattcagtttctgactgaactaaacggtggtggtttgaatcatcgtggttcactggttttcacaatattgggattcttggcaaccatgaggacattatgagattcttggctaccatgaggacaagttgattgttcaattacattttctacgtctatttcgaagcgtcgatggcggatgtccgcacacaaaatgccttgaagggtctggaggaagttgcaagtttcctgcgtgtccttggctactatccgtgcaacacaataacgatatgagctgttgcgtcacactgtctatcttggttgctccgccttggaagaccagagtgggagatgttgaataaaaggttcctcttcccttgtttggaagagattatggtcattatacactcccgactgaatatgaacactcttgaaatacattgcgaagctgcagaggatcgtcattagaattgcatgaaggttgtatgcgaaaccactggattgaacaattcgagaaatctacagaggaagtcgtgaacagctatgcacaagattgagtctaaggtataggcatctgatggaggacatgttgtctctactcccgcatatgaaggacaaccaggacaaggtcgagtccaagcagagcaaggggaacacgccgagcaagctgcttgagctcaggagttgctccagctgcctttcttcgagattctggctgttgaccatgcgtcggatgagggcgcgattgtaccaattggttcgcagcatgatgcacatttgaccaaactgatgaatatggaaaatgaccaacctttgttgccggcaccaccagttaatctggaatcagccatccttgagcaaaatgcaaatatggtggctctcaaggaaggctgttctgtgggaagtgagctgccacctggtctgcagggtaattttggtggtaacaaagcaaacacgtgtacttcagcactgcattctattgatgaaggtgaagaaataacttgtggtttcattaaacatgagaggagttatgatttacagaatttgactatggataagtcaattcaagtgtctaatgaaacaaagtacaagtttcttgctcataagcccagagtaggctgtgaaactgctattcaaaactgtgagttggcttctgcattgccagatacagaatttcatggccctgttgcaaccatttcaactacgggtcaatcagaaggatctgacactgagattaatgttccaaactattctgacctagaagcactggtacatatagttattttcttcattgagtgtacatagctttacattccttggtgattctgactttctcaaaaaaaaaaaaaaatccagatacttgatctggacctgattccatgggatcaagaatctgacttcatccaaccagaagtttcaaggtttcagtatcctgaaagcaggaaggatttgataagattagagaaaggtgtctgctcttatatgaaccgatctatcatgtctaagggtgctttcgcaattctttatggccaacgcacgaaatactacataagagagcccgaggtaagtcttgggagagaaacagaagaagtacatgttgatatcgatttgagtaaagaaggaaaggcaaacaaaatatcccgtcgacaggcagttattaagatggacgatggtggatctttctacataaacaatactgggaagttttcaattttcgtgaatagcaaagaagtaccctgcagtaaacgtataaacttaatgtcagactcattaattgaggtatggccttccaatcctttctttgttcttacactaggaattccaaataaccgcgctatactaaatatccatgccctgtttaattctatgtactggttcctttttttaatctaacttcgaactagtaggctgtagagctattaattgttcatatttgtatgaaaaatgtgcttccatattgtaccataagattgaagtaatcaagcattcttagtcattcagatatagctggatgagagcatggttacttcactagctactgtttcatttgtggttccttagttcacatcacacatgatatgatataggcgcgtaggaaaacactaatcaggaaagtgagttgtaggtagaaagatacagtaagcttttcttttgcaactcattgaatatttgatgccactctgttgtgaattagtctagagttaaatcaggatctgccatttgagatctctattggttcatatgtgaaatgaaatgccactggaaccagagataatttttttatttgggattaatagataatactccatccatctcaaaatataagcatttctagttttgttctcaaaatataacatttctagttttgtttaagtcaagctattctaagtttgaccaagtttataaagaagtttagttacatctatcacatcaaagaagcaaactatgaaaatatgtcccaatgaatctaatgatgtccatttgatatcataaaaatttattgttctttttctataaacttggtcaaacttaggtcatgtttggaagcaactcagtttttaagaaaccattttttatttttagttaggagtgactagctttttggtttttaagaaactgtgaattcaatttttataaactggcataaactggtatttttggaaccacctcagtttccataaaccagtttcttaaaaactgggtggttccaaacaggctcttagtatagtttgacataacaaacccagaaattcttatgttgggacgggagaagtaacgtatagcaattggatctaggtaatgtaacaatggttactagttatggttcattttgttagttttaaactaatgcttctaccctacatatttcacggatatagggtaaaggattcatgtagcattttgacctcttgcgaagttgttttttttttgttaccgacagataaggaacctgaaattcatttttcacgtgaaccacgaggctgcaaggcaatacatagttcgaaaaaggagaggaagctcccaaggcgggatcacggcgtttgattggagtcagaacccatgagtagttaacgttatgatcaaggttgtttataatctgcgatagctacctctctcttcaagaaagtattggataagcgtaaagttatttataatttccgatagctaatatttctctcttccagttagcactgtt

SEQ ID NO: 68110 - DNA, 4257 bp, Zea Mays
ttctatactgctgtcttcctcatccatttctgcttcctctgctgtaactactactagttcttagttgaatcaatacctattgtgagtaggtcgctgactggtagccgcctcgggcgtggcgggatggaccgtggaggacgacgtcctcctcgccatcgagcgccaggctaccaatgatgctggtaggattgaagggcttgtggttatgaggattatcaatgagcccactgctgcggccttgtcatatggaatgaacagcaaggagggccttgtcggtgaagtgtgttcgtgccggagagcgtggagtgcgaggcctcatgacgcgaagcaagttcggtctgctcgtgcatgtcacccgtcgcgtgcgcgtgtgccggagagcgaggaggagtgcaaggcctcacgacgcgctgccaggtccgtgctgctcgtgcgcgtcacccattgctgttgaaatccatcccaccccaatgtttccaagtagagtaacagatatccgatctcggaatgaggatagtgactgggccatgggaatttgatcgagaaagaaagggaaaggtagagatagtggggacaatcgatttaattgtagctggaacatttctaaaggtattagtaggtgacttgctgcagcaaacttgaacacacaagcaacaaacatatgcttcaggtccttgatgctaccaacaggtaaactcttttaatacttttgttcacctaatggtaggaacagatgatataccacaaatgttttcgacctaacaaagagggcatagaaagtagaagttggttgctcctttaaagcatcagtttcaagtagccatcagctgaaatctaccattgctgaaacaaggtgaaaaaaatgcagaatggactacttagagatagctacactatcgatgcatctacatcattttggactatatgggacaccatcagtaatggttgatcttgtctactgtgctttggagttcctttcaactttgcttggagcctttcatgccactgatggagtcatatgcctctgcccagaaattcagtttctgactgaactaaacggtggtggtttgaatcatcgtggttcactggttttcacaatattgggattcttggcaaccatgaggacattatgagattcttggctaccatgaggacaaattgttcaattacattttctacgtctatttcgaagcgtcgatggcggatgtccgcacacaaaatgccttgaagggtctggaggaagttgcaagtttcctgcgtgtccttggctactatccgtgcaacacaataacgatatgagctgttgcgtcacactgtctatcttggttgctccgccttggaagaccagagtgggagatggttgctatttctgctcaagttagcgagaataaatactttgtttcgatggcatatcgttgaataaaaggttcctcttcccttgtttggaagagattatggtcattatacactcccgactgaatatgaacactcttgaaatacattgcgaagctgcagaggatcgtcattagaattgcatgaaggttgtatgcgaaaccactggattgaacaattcgagaaatctacagaggaagtcgtgaacagctatgcacaagattgagtctaaggtataggcatctgatggaggacatgttgtctctactcccgcatatgaaggacaaccaggacaaggtcgagtccaagcagagcaaggggaacacgccgagcaagctgcttgagctcaggagttgctccagctgcctttcttcgagattctggctgttgaccatgcgtcggatgagggcgcgattgtaccaattggttcgcagcatgatgcacatttgaccaaactgatgaatatggaaaatgaccaacctttgttgccggcaccaccagttaatctggaatcagccatccttgagcaaaatgcaaatatggtggctctcaaggaaggctgttctgtgggaagtgagctgccacctggtctgcagggtaattttggtggtaacaaagcaaacacgtgtacttcagcactgcattctattgatgaaggtgaagaaataacttgtggtttcattaaacatgagaggagttatgatttacagaatttgactatggataagtcaattcaagtgtctaatgaaacaaagtacaagtttcttgctcataagcccagagtaggctgtgaaactgctattcaaaactgtgagttggcttctgcattgccagatacagaatttcatggccctgttgcaaccatttcaactacgggtcaatcagaaggatctgacactgagattaatgttccaaactattctgacctagaagcactggtacatatagttattttcttcattgagtgtacatagctttacattccttggtgattctgactttctcaaaaaaaaaaaaaaatccagatacttgatctggacctgattccatgggatcaagaatctgacttcatccaaccagaagtttcaaggtttcagtatcctgaaagcaggaaggatttgataagattagagaaaggtgtctgctcttatatgaaccgatctatcatgtctaagggtgctttcgcaattctttatggccaacgcacgaaatactacataagagagcccgaggtaagtcttgggagagaaacagaagaagtacatgttgatatcgatttgagtaaagaaggaaaggcaaacaaaatatcccgtcgacaggcagttattaagatggacgatggtggatctttctacataaacaatactgggaagttttcaattttcgtgaatagcaaagaagtaccctgcagtaaacgtataaacttaatgtcagactcattaattgaggtatggccttccaatcctttctttgttcttacactaggaattccaaataaccgcgctatactaaatatccatgccctgtttaattctatgtactggttcctttttttaatctaacttcgaactagtaggctgtagagctattaattgttcatatttgtatgaaaaatgtgcttccatattgtaccataagattgaagtaatcaagcattcttagtcattcagatatagctggatgagagcatggttacttcactagctactgtttcatttgtggttccttagttcacatcacacatgatatgatataggcgcgtaggaaaacactaatcaggaaagtgagttgtaggtagaaagatacagtaagcttttcttttgcaactcattgaatatttgatgccactctgttgtgaattagtctagagttaaatcaggatctgccatttgagatctctattggttcatatgtgaaatgaaatgccactggaaccagagataatttttttatttgggattaatagataatactccatccatctcaaaatataagcatttctagttttgttctcaaaatataacatttctagttttgtttaagtcaagctattctaagtttgaccaagtttataaagaagtttagttacatctatcacatcaaagaagcaaactatgaaaatatgtcccaatgaatctaatgatgtccatttgatatcataaaaatttattgttctttttctataaacttggtcaaacttaggtcatgtttggaagcaactcagtttttaagaaaccattttttatttttagttaggagtgactagctttttggtttttaagaaactgtgaattcaatttttataaactggcataaactggtatttttggaaccacctcagtttccataaaccagtttcttaaaaactgggtggttccaaacaggctcttagtatagtttgacataacaaacccagaaattcttatgttgggacgggagaagtaacgtatagcaattggatctaggtaatgtaacaatggttactagttatggttcattttgttagttttaaactaatgcttctaccctacatatttcacggatatagggtaaaggattcatgtagcattttgacctcttgcgaagttgttttttttttgttaccgacagataaggaacctgaaattcatttttcacgtgaaccacgaggctgcaaggcaatacatagttcgaaaaaggagaggaagctcccaaggcgggatcacggcgtttgattggagtcagaacccatgagtagttaacgttatgatcaaggttgtttataatctgcgatagctacctctctcttcaagaaagtattggataagcgtaaagttatttataatttccgatagctaatatttctctcttccagttagcactgtt

SEQ ID NO: 68111 - DNA, 2502 bp, Zea Mays
ttctatactgctgtcttcctcatccatttctgcttcctctgctgtaactactactagttcttagttgaatcaatacctattgtgagtaggtcgctgactggtagccgcctcgggcgtggcgggatggaccgtggaggacgacgtcctcctcgccatcgagcgccaggctaccaatgatgctggtaggattgaagggcttgtggttatgaggattatcaatgagcccactgctgcggccttgtcatatggaatgaacagcaaggagggccttgtcggtgaagtgtgttcgtgccggagagcgtggagtgcgaggcctcatgacgcgaagcaagttcggtctgctcgtgcatgtcacccgtcgcgtgcgcgtgtgccggagagcgaggaggagtgcaaggcctcacgacgcgctgccaggtccgtgctgctcgtgcgcgtcacccattgctgaatggactacttagagatagctacactatcgatgcatctacatcattttggactatatgggacaccatcagtaatgaaattcagtttctgactgaactaaacggtggtggtttgaatcatcgtggttcactggttttcacaatattgggattcttggcaaccatgaggacattatgagattcttggctaccatgaggacaaattgttcaattacattttctacgtctatttcgaagcgtcgatggcggatgtccgcacacaaaatgccttgaagggtctggaggaagttgcaagtttcctgcgtgtccttggctactatccgtgcaacacaataacgatatgagctgttgcgtcacactgtctatcttggttgctccgccttggaagaccagagtgggagatggttgctatttctgctcaagttagcgagaataaatactttgtttcgatggcatatcgttgaataaaaggttcctcttcccttgtttggaagagattatggtcattatacactcccgactgaatatgaacactcttgaaatacattgcgaagctgcagaggatcgtcattagaattgcatgaaggttgtatgcgaaaccactggattgaacaattcgagaaatctacagaggaagtcgtgaacagctatgcacaagattgagtctaaggtataggcatctgatggaggacatgttgtctctactcccgcatatgaaggacaaccaggacaaggtcgagtccaagcagagcaaggggaacacgccgagcaagctgcttgagctcaggagttgctccagctgcctttcttcgagattctggctgttgaccatgcgtcggatgagggcgcgattgtaccaattggttcgcagcatgatgcacatttgaccaaactgatgaatatggaaaatgaccaacctttgttgccggcaccaccagttaatctggaatcagccatccttgagcaaaatgcaaatatggtggctctcaaggaaggctgttctgtgggaagtgagctgccacctggtctgcagggtaattttggtggtaacaaagcaaacacgtgtacttcagcactgcattctattgatgaaggtgaagaaataacttgtggtttcattaaacatgagaggagttatgatttacagaatttgactatggataagtcaattcaagtgtctaatgaaacaaagtacaagtttcttgctcataagcccagagtaggctgtgaaactgctattcaaaactgtgagttggcttctgcattgccagatacagaatttcatggccctgttgcaaccatttcaactacgggtcaatcagaaggatctgacactgagattaatgttccaaactattctgacctagaagcactgatacttgatctggacctgattccatgggatcaagaatctgacttcatccaaccagaagtttcaaggtttcagtatcctgaaagcaggaaggatttgataagattagagaaaggtgtctgctcttatatgaaccgatctatcatgtctaagggtgctttcgcaattctttatggccaacgcacgaaatactacataagagagcccgaggtaagtcttgggagagaaacagaagaagtacatgttgatatcgatttgagtaaagaaggaaaggcaaacaaaatatcccgtcgacaggcagttattaagatggacgatggtggatctttctacataaacaatactgggaagttttcaattttcgtgaatagcaaagaagtaccctgcagtaaacgtataaacttaatgtcagactcattaattgagataaggaacctgaaattcatttttcacgtgaaccacgaggctgcaaggcaatacatagttcgaaaaaggagaggaagctcccaaggcgggatcacggcgtttgattggagtcagaacccatgagtagttaacgttatgatcaaggttgtttataatctgcgatagctacctctctcttcaagaaagtattggataagcgtaaagttatttataatttccgatagctaatatttctctcttccagttagcactgtt

SEQ ID NO: 68112 - DNA, 3493 bp, Zea Mays
ggctgccactcggctggcgctcacaccggatccgggccccactacccacctcctgtccagcccggtctccacagcagtgcccaccaccgcctgcagtctgcagagatcccccactgattcgctcgccgtccctccgctgcgctgctatataggaccgtgccgccgcgtgcgctcgtggactgtggtgtgccttgtgcgacagtcgccagcctgccccgcctgccggcccggccgcccgcctgcccgcggcactgagaagacgaagctccgggctccgggacgccgagcagaggggaaaggatggaggacaaggcgtccaacctagacgccgtgctcaaggaggccgtcgatctcgagaacataccgatcgaggaggtgttcgagaacctccgatgcagcccgcagggtctcaccacggagcaggcggagcagcgcctcgccatcttcgggcccaacaagctggaggagaagcaggagagcaagttcctcaagttcttgggcttcatgtggaacccgctgtcctgggtcatggaggcggccgccatcatggccatcgcgctcgcgaatgggggaaacaagccgcccgactggcaggacttcgtggggatcatcactctgctcattatcaactccacaatcagcttcattgaggagaacaatgcgggcaatgccgctgctgctctcatggcacgcctcgcccccaaggccaaggttctcagaaatggccggtggaccgaggaggaatcggctatccttgtgccaggagacatcatcagtgtgaagcttggggacatcattccagctgatgctcgtctgcttgaaggggatccactgaaaatcgatcagtctgcactcaccggcgaatcccttccagtcaccaaaggccctggtgatggagtgtattctggctccacttgcaaacagggtgagattgaggccgttgtcattgccactggtgtgcacacattctttggcaaggccgcacatcttgtcgattcaacaaaccaagttggtcattttcagaaggttctcactgccatagggaacttttgcatctgttcaattgctgtgggaatgctcgtggagcttgtcgtcatgtacgctatccaacacagggcttaccgacccggaatcgacaatctattggtgcttctgattggaggaattccaatcgccatgcccactgtcctttctgtgaccatggcaataggggctcatcgcttggctcaacagggagcaatcactaagagaatgacagcaattgaagaaatggctggcatggatgttctttgtagtgacaagactgggacattaaccttaaacaagttgactgtggacaagagtcttgttgaggttttccaaagaggtgttgaccaagatacagtaattttgatggctgctagagcttctcgcacagaaaatcaggatgccatagatgccacaatagttggtatgctggctgatccaaaggaggctcgtgctggtgttcaagagatccattttcttccatttaacccaactgataaaagaactgctttaacctaccttgatggagaggggagaatgcatcgtgttagcaagggagcaccagagcagatccttcatcttgcccacaacaagtcggatattgaaagaagggtcagagctgtgatcgacaaatttgctgagcgtggtctgcgagcacttggtgtggcttaccaggaagtgccagatggtaggaaagagagtcctggaggaccatggcagttcattgggctcttgcctctttttgaccccccgcgccatgatagtgcagaaactatcagaagggcactcaatcttggtgtcaatgtcaagatgattacagaataaggatgagtcaattgcttccttgccaattgatgatttgattgagaaggctgatggctttgctggtgtttttccagaacacaagtatgagatcgtgaaacgcttgcaagcaagaaaacatatatgtggcatgactggggatggtgtaaatgatgcaccagctttgaagaaggctgatattggtattgcagtagcagattctactgatgcagctcgtagtgcttctgacattgtcctaactgaacctggccttagtgtgattattagtgctgtgctgacgagtcgggcaattttccaaaggatgaagaattacacgatctatgctgtatcgattaccatccgtattgtgcttggttttatgcttcttgcgctgatatggaagtttgacttcccaccatttatggtcctgatcattgccatcctcaatgacggtaccattatgactatctcgaaggacagagtaaaaccatctccacaacccgacagttggaagttagctgagatttttgcaactggagtagttcttggtggttatttggccatgatgactgtcattttcttctgggctgcatacaagactgacttcttcccgcgactgttccacgtcgaaagcctcgagaagaccgcccaggatgactttcagaagctcgcctctgccgtgtaccttcaagtcagcacgatcagtcaggcccttatcttcgtgacgcggtcgcgcagctggtcgtttgtggagcgtcctgggttcttgctggtctttgctttcttggtggctcagctgattgccactctgatcgctgtatatgccaactgggcgttcgctgcgatcaagggcattggatggggttgggccggtgtcatctggctctacaacatcgtcttctacttcccgctggacatcatcaagttcctcatccgctatgcgctgagtgggagggcatggaacctcgtccttgagcagaggattgcgttcacgagcaagaagaattttggcacggaagaaagggagcgcaagtgggcgcatgcgcagaggactctccatgggctccagccgccagaggcatccatcttcgagaacaagacgacattcaatgagctgaaccagctcgcggaagaggcccgcaggagagccgagatggcgaggttgcgagaagtgagcaccctgaaggggaggatggagtcagtggtgaagcagaagggtctggacatcgagaccatccagcagtcctacaccgtgtgactggctgaccgacgacgacggggtttatagaggtttcttcttcttatactatacaatctgtactaggtagcaataaggatcaaggaaggaacccctatatattggctgtggttcgcgggaaatgaatgatggtcatatttatgatgtcggtgtggtgcttctgtcgccaactctcgaccatactaccctcaactcaccccttgtatgctgtggcattaaccacccccggcaccaccggcaggcattgatattgagagatgaggtatagtagtctgtagcctctagtagatgatgatgaattgatgatatagtacatttttgcttgcttgctttctttcttgtttgttgttttccttggttctgctctctgggtttttgatgcttgctggttttgtgctattcctgatt

SEQ ID NO: 68113 - DNA, 2166 bp, Zea Mays
gatagacttcgtaggtgcggacaggttttcgctctaccccgacacaaacccgacccgttacgccgcaccactcttcttcctctgctccgcctcttcacccagcgtcttccgattgctgacggatccctcttcgccgcggccgccgccgcggaccgaccgtgggagagaaggcgaggcgggagcgatggaggccgccgactacggcaagcttttcgtcggcggcatctcatgggagacgagcgaggaccgcctccgcgagtacttcggccgctttggcgaggtcaccgaggccgtcatcatgcgggatcgcagcacggggcgtgcccgcgggtttgggttcgtggtcttcgccgacgccgcggtcgccgagcgcgtcactatggacaaacacactatcgacggacgaatggtggaagcaaagaaggctgttcccagggacgaccacagtattgtgagcaagagcaacggcagcagcacagggtcacctggaccaggacgcaccaggaagatctttgttggaggcctgccctcgagcgtcacagaggctgacttcagaaggtatttcgagcagtttggcatcatcaccgatgtggtcgtgatgtacgaccacaacacacagaggccgaggggctttgggttcatcacttacgattcagaagacgccgtggacaaagccttgcacaagagcttccatgagctcaatggtaaaatggttgaggtcaagagggcagttccaaaggagcagtctcctggacccgtcgtacgttcacctgtgggagtggggcagaactatgctacgaacagggttcatagcttcctcaatggcttcaaccagggttacaatccaaaccccataggaggttacggcatgagggtggatggaaggtatggcttgctttcaggtgcacggaatgggttctcttcttttggcccagggtatgggatgggcatgaatgttgaaggtgggatgagcggaacatttggtgcaagctctggtttcatcagcaactccaatggtaggcaaatgggttcgtacttcaatgcaagttcgaacagactgggtagccctattgggtaccttggtcttaatgatgttccgggatcaatgttgagttccatgtctaggaatgtttggggtaatggaagtctaaactacccgagtaatcctacaaacatgagtgcttttgcttcacctggaaatgggagccaagtcagtcttactggtgacaattggggaggtcttccttctgctcatgggatgggcaacatttcaagccttgggtcagggaaccttgctcgtggagctggagataataacttcggtttgccttctggcagctatggaaggagcaactcaactggtacaattggcgagcctttttctgcagcaggcaatacatatgatgtaaacaatccagatacatatgggggcagctctatttatggtggcacagcctggaggttcacatcatctgaggttgacatgccttttggtcatgatattggaaattttgatccgacaatcaaatgagacatgtcggcaagtcacatgtgcaactatcctgttaacaacaatcagccaagcagaggcatatgtgcagcagctggagagcagtaagctgaagcttgcacaactggagcagtaataccagaaaagcttagggatggtggtaccacttcctagggtgagtattactatatccacatatgacttggtgtagatgaaacacccattcagtcaggcatccgggtgcgcggccgtgaatcggtgattgtcagattaatatacaggttagttttgtctagctaaccagcgggtgtggtttgcgaacaccaacatgctagagatggagctgctagaggagaagcggatacagaaacactttgtggaggtttttttttggggtcatgttttagttttgattcttacgcgtgcgtggtgaggccttttggtttttgaatgagatgtaattattgcggcacatatttagaagccatgttccaactggggattacattttcgttttgtaatcccaaaaactgttttgttgaccaaagtttgactttatatttttaaattctaaactgaaatacaaaaaataaaaatccggaccggaccgaaaacggtaaattttaccgccacttgaagtttaaccctggttccaa

SEQ ID NO: 68114 - DNA, 2089 bp, Zea Mays
ccttgatagacttcgtaggtgcggacaggttttcgctctaccccgacacaaacccgacccgttacgccgcaccactcttcttcctctgctccgcctcttcacccagcgtcttccgattgctgacggatccctcttcgccgcggccgccgccgcggaccgaccgtgggagagaaggcgaggcgggagcgatggaggccgccgactacggcaagcttttcgtcggcggcatctcatgggagacgagcgaggaccgcctccgcgagtacttcggccgctttggcgaggtcaccgaggccgtcatcatgcgggatcgcagcacggggcgtgcccgcgggtttgggttcgtggtcttcgccgacgccgcggtcgccgagcgcgtcactatggacaaacacactatcgacggacgaatggtggaagcaaagaaggctgttcccagggacgaccacagtattgtgagcaagagcaacggcagcagcacagggtcacctggaccaggacgcaccaggaagatctttgttggaggcctgccctcgagcgtcacagaggctgacttcagaaggtatttcgagcagtttggcatcatcaccgatgtggtcgtgatgtacgaccacaacacacagaggccgaggggctttgggttcatcacttacgattcagaagacgccgtggacaaagccttgcacaagagcttccatgagctcaatggtaaaatggttgaggtcaagagggcagttccaaaggagcagtctcctggacccgtcgtacgttcacctgtgggagtggggcagaactatgctacgaacagggttcatagcttcctcaatggcttcaaccagggttacaatccaaaccccataggaggttacggcatgagggtggatggaaggtatggcttgctttcaggtgcacggaatgggttctcttcttttggcccagggtatgggatgggcatgaatgttgaaggtgggatgagcggaacatttggtgcaagctctggtttcatcagcaactccaatggtaggcaaatgggttcgtacttcaatgcaagttcgaacagactgggtagccctattgggtaccttggtcttaatgatgttccgggatcaatgttgagttccatgtctaggaatgtttggggtaatggaagtctaaactacccgagtaatcctacaaacatgagtgcttttgcttcacctggaaatgggagccaagtcagtcttactggtgacaattggggaggtcttccttctgctcatgggatgggcaacatttcaagccttgggtcagggaaccttgctcgtggagctggagataataacttcggtttgccttctggcagctatggaaggagcaactcaactggtacaattggcgagcctttttctgcagcaggcaatacatatgatgtaaacaatccagatacatatgggggcagctctatttatggtggcacagcctggaggttcacatcatctgaggttgacatgccttttggtcatgatattggaaattttgatccgacaatcaaatgagacatgtcggcaagtcacatgtgcaactatcctgttaacaacaatcagccaagcagaggtaccacttcctagggtgagtattactatatccacatatgacttggtgtagatgaaacacccattcagtcaggcatccgggtgcgcggccgtgaatcggtgattgtcagattaatatacaggttagttttgtctagctaaccagcgggtgtggtttgcgaacaccaacatgctagagatggagctgctagaggagaagcggatacagaaacactttgtggaggtttttttttggggtcatgttttagttttgattcttacgcgtgcgtggtgaggccttttggtttttgaatgagatgtaattattgcggcacatatttagaagccatgttccaactggggattacattttcgttttgtaatcccaaaaactgttttgttgaccaaagtttgactttatatttttaaattctaaactgaaatacaaaaaataaaaatccggaccggaccgaaaacggtaaattttaccgccacttgaagtttaaccctggttccaa

SEQ ID NO: 68115 - DNA, 2414 bp, Zea Mays
ttttaatttctttttggaccatggtgcaaactcctaatgattaattttttatgttgcccaagccccaaggtgcaacacatttggataaaatcgtttaactctcgtctatacagtatcaacattcatatatacatacatgatgttaagaaaatctgatggtatatccctcttttccacaatcttttaatctgttttacattaatacactacctaacaattcaggtacagcactacacatttccaacagtgtactgaacactcaactacaggacaatgctgcaaaactgattgtagcaaaattccactctcggtaggaaccagttggccacgagaaattcctgtccagtgtgcttcctaatgtccttgatttacccagcacaatgttgaatgactttggcaggccttgtgcagttatgagaactgtctcactgagtcactaggtcgcagattcgaagcagcctctctacatttgtagggagaaggattgcctcggtttatcccttccccaaacttcactcatgtgagagtctccaacaatgggactgccttttttaattttgaacaaatttggcatgagaagttgagaactatatcaatacaaatattgaggcagatggaagagcgtcaagagacaatgccggtgtccatactagaattgttcatcatcattcaaagctgcaggggctccttaggttgcagggactggcagcagtggcagagggtgatccaaaatcaagagggggctaatcacacagacacaagccgatgtgcagtgagaaaccacccgctgtagaaggcaagctcggtggttccagcaactgttgtagattgctggcggccaaggtcccacgtcaaaattgaattacctagcaaaggtagctcaattttaggaattaacaatttatgatagtacggtccaacttattctatgccagcgcgatgcactatactgctttcacacataagatgaaaagtcaaatcataaaggggaaccaataaaatactagctgcagtcatatatgtaggaagcttctaccgttcgtcctggagcacccctccgtgagcgtcaactggccatgactggcaggtagcattctgcacgagcactctgataatcatgtcgccaaaagtccatttccagtcaaatatcctatcccaatatcaccaaataaagagcaagaagtttgcacagtgcttcttgtacagttgaagtgcacaatatatcactaagtgcaagggcaaataaaccagtgaattcaaatacttcgattacaattcagtactacagtctagtagtctactcctattaatattatttgcgtaagttgtaactcaactgaagaaaccaataaaatgcttagaaaatacaaataaaatcaaaaactcaatttgaatacatggaaacaatagctgaatagcatgacaaattcactatgctgcaaagtaacaatctaaattatctatctaactgtgaagatgcacatgtcacgttgatacgcagtggcggagctagtgctgaaagcaagcaggggccaaacaaacaacaagaacatgctgctgtgggcaagcatgcatcatgagctgccagatagctagcaagcttgcatgcagcaggcaactagtcagttaaggtctaatggtaagcaggaatagacaaaacagctatgcatgcagccatgcaagcagactgcatggaaatatgcatgcacttgcacatgacgatacttggaacttgacgcacggcaggagggggggggggggggtgagggccctctatggccctaatgtagccgtcagtgttcagacaagaacaagtctacaaagtgttctatacatgtacatattatctattgtcaagttctataaatgtcataggaccacaggacatcaaaactatatgatttctcgtttttattttgacatgggagaacatcactacatcagtcagtcaacatgtaacaaaactcaacctctaattagcacagactaaccaaatatgttacatgtgcagtactcaagttacttcaattataaataaaatttaaaggagcccacaacaaaggcagtgccatgaaacttgtatacagattgaatagatgcaatgctttcctaaaccaaaaagtggagacatgcttcacttttttcccaagccattgaagtgattaacacatttatgcagcatacttcctttttacaaaaaggaaaatctatgtgtaattaagaattccagagaaaaatgttgaaatggaaactgacctctgcttggctgattgttgttaacagggtagttgcccatgtgacttgctgacatgtctcatttgattgtcggaccaacatttccaatatcatgaccaaaagaatgcatgtcaacctcagatgatgtgaacctccagactgtgccaccataaacagag

SEQ ID NO: 68116 - DNA, 718 bp, Zea Mays
tgaacacgaacttttcctatgcagcaccttttttctggtatcacttcatagtgggagtattactacacattcatatatgacttgggatagatgaagcacccattcagtcaggcagccaggtgcgtgcatggcaactgtgaatgggtgatatgtcaggttagttttgtctagctgaccagcggtgtggtttacaacaccaacatgctagaggaggaggaagcggatacagaaacattttctgaggggcttcttttctttgagtcatgtttttagttttgattcctgcgcgtggctagctccttttggtttttgaatgagatgtgtagtggtgattattgcggcgcatattttagagatcgtggttcttccaacataagctggaaaaagaagtctgtatacggatgaacatgtataccaaccaaagggatgctgtattatcttgcccatttgttactacattagcctgtgttttatatcgttctgaaccgttcggttttgcactctggaggttttgttggtttgttcgtgaattatgtatgccagtgtagtgtttttctcgtcgagcagctccaatagttatataaattttagctctctaaatcacagatttaagaagttactaaataattttgggagtaaaaaaaatgtgagttctccaatagttctctatatatatgttgtagttttgttttgtatctatccacatctaaaaaaaata

SEQ ID NO: 68117 - DNA, 2164 bp, Zea Mays
caagcagtgtgccctcccattcagatttcatcctcggcgtcgtctcctgtcctctccacgccaagcaacctccccaccccgccccaccctccatgctcgcctcgagatcttagcgggcagctccggagagcgccgacgagccccctgatccctcctcgccgccgccgccaaccgaccgggggaggagaggaggggaggggagcgatggagaccgccgactactccgggaagctcttcgtcggcggcatctcatgggagacggacgaggaccgcctccgcgagtacttcggccgcttcggtgaggtcactgaggccgtcatcatgcgggaccgcagcacgggccgcgctcgagggttcggtttcgtggtcttcgctgacgccacggtcgccgagcgcgtcaccatcgaaaaacacatgatcgacggccgaatggtggaggccaagaaggctgttcccagggatgaccacagtattgtgagcaagagcaacacaagcagcatagggtcacctgggccgggccgtaccagaaagatctttgttggaggtctgccctcaaatgttacagaggctgacttcagggggtattttgagcagttcggtgtcataactgatgtggttgtgatgtatgatcacaacacacagagaccgaggggctttggattcatcacctatgattcagaagatgctgtggacaaagccctgcacaagagctttcatgagctaaatggtaaaatggttgaggtcaagaaggctgttccaaaggagcagtctcctggacctgttgcacgctcacctgcaggagtggggcagaactatgctatgaacagggttcatagcttcttgaatgacttcaaccagggttacaatccgaaccctataggaggttatggcatgagggtggatggaaggtttggccagctttcaggtgcacgaaatgggctctcttcttttggcccaggttatgggatgggtatgaacgttgaaggtgggatgagtggaacttttggtgcaaactctggtttcatcagtaactccaatgggaggcaaatgggttcatacttcaatggaagttcgaatagattgagtagttctattgggtatcttggttatgactcaggatcgatgttgagttccatgtctaggaattttaatgcaggtgtaaactacccgatcaatcctacaaacatgagtgcttttgctgcccttggaaatgggggtggcgtcaattatatgggtctcccttctattgcccctgagttggcccagttgggcaacatttcaagccttgggtcagggaactttagccgtggagctggagttaataacttaagtttaccttctggctcctatgggaggagcaattcaactggtacaattggtgagcctttttctgcatcaggcaatgcatatgaagtgaacaacccagatacatatgggaacagctctatttatggtggcacatcctggaggttcccttcatctgaagttgacgtgccttctttcagtcatgatcttggaaatgttgatccgaatatgaaatcagacatatcagcaaattacatgggaaattattctgttagcaacaatcagccaagcagaggtatcacttcatagtgggagtattactacacattcatatatgacttgggatagatgaagcacccattcagtcaggcagccaggtgcgtgcatggcaactgtgaatgggtgatatgtcagttttgattcctgcgcgtggctagctccttttggtttttgaatgagatgtgtagtggtgattattgcggcgcatattttagagatcgtggttcttccaacataagctggaaaaagaagtctgtatacggatgaacatgtataccaaccaaagggatgctgtattatcttgcccatttgttactacattagcctgtgttttatatcgttctgaaccgttcggttttgcactctggaggttttgttggtttgttcgtgaattatgtatgccagtgtagtgtttttctcgtcgagcagctccaatagttatataaattttagctctctaaatcacagatttaagaagttactaaataattttgggagtaaaaaaaatgtgagttctccaatagttctctatatatatgttgtagttttgttttgtatctatccacatctaaaaaaaata

SEQ ID NO: 68118 - DNA, 2183 bp, Zea Mays
gaaatcttggaggtgaccaatatagaggaacaatagtggaggaaaaactcttttcaagtcggaacaggacagaggtttctcttggaaagaagttgaagattgaatatcttccagagatagaaaagctccataaaaagaaagagaggttgctcaaaaagcaacagagagaagctcttcttcttgatagctacttggcatcagatggacttaccaccggccgctctctccgtgatagaaagcccgtgacttatacatttgatgactatgatcgctcaataaatgaagccatcaaaattacgaagaaaagagagaactcagctgagcctgttgctactactgccaatagaagggtgcttcctccaagatcggaggcaccaagcaatgggaagttaaataatggtccctcaccaacaaccaatgactcatctgatggaaattcttcaaagtcagatgactaccgagacagcgatggtgaacaagaaaatgaggcacttgatcgcagcaaccggcggaggaaaagatctcagagatacacacaagactttgttgaggctgtctcagatgttgatcctaactttgacagtgacgacgatatcatgggagaggcagtgtatgatgacgaatacctgagaagtcgcaaacagaataagccatcaagtgcttctgaagaggatgaagagttccggttggaagaagatgccgaagatgatgatgaagaggaatattcattgagtaccagtgaagatctagaggagccacaacggcataaaaagctggaaactcgtggccggcgaggtacgaagctgagatcagttggtgaaatccaagcaggtcttagacgcagcaagcgttcttctcgtcctcgtattaactatcgccaatatgatttttcggactcggatacggagcctcgaaaggcaaggaaatctgacgcatcagatcctgatgctggctccgatgccgagaatgatatggagctctcgacatcgagtcaagagcaagaggaggaagaggatgatagtcatgatgaagaaaatggtaataatgcgaatgataaaatggaggaggaccacactgcagaagaaaataaaatagaaccagaggaggagaaggagcagccacagcagcagcctgtagagaagatggatgctcccagcagggaaagtaaaagtgtaggaagaacattcctagatctaaacgagcttgcacctggaggtggctttgatgatggcccaagcttgacagtgagagatgacatggacaacatctagggaataaagttttgttttgatacatttcgggtgctgttggccagttttctgacttccaggcaagggcagatccatggtcctgatggcctgtgatgaatggtgcaactatggtttggcggtgtgagcttatggttatggctgcttcactgatttgcagcagcaggacaggcgatgttccacttgaagcgactttgagcttctccggtgcttatgttatacgtggagaccatgaggaggtagttttatgtatactacatgaaggtcgcaatcgatcatagctgtattgcggccaggctgctgctgcgttgcggccggtctctaggatataaatttattgcctccatttatttagtcttaggcattgtgatgtcaatgagaacatggagggaaacctgtacaccgagtgcggtccgtcggcattcgcccgaccttttccacttgtagattgtaggttttttaaagtccgggcgggattagttctgtatctatacctgacagtctgtttttttctgtcacacctgtgtagctgacattgagcttgtccctgaatgcacaccggcaatgcctctcgttcgctctatatggagaagatgctgcatgtattcagctgatgttgtagcctatggacatgtccattactcagagtggctggcctggtgattgctaatttgatgtatggtttataaaaccaaattcctgtgtgcgtattggttagttgcaaaactttgcaaagataaataatttgggggtgttctgttccattaaacattgcaaaattatgtgaaatgtttggtgaattgggcttcatgtccccagttgtgcttcggagaggctactcatttcttacaaagtagcctcatggtggatgtttgatgacttgtagtgttcctgtaaaataaaagggaaagtacc

SEQ ID NO: 68119 - DNA, 3278 bp, Zea Mays
atggcctccgcctccctgcaccccgcttctccctcccacccaaaccctaaccatagccccgacgcagatctccgatctgatcgccccatgcccgacgccgacgccgtaagcggaggcgcctcgcccacttccccggagaagcgggaggaggaggaagaggaggcgccggggaaggaggcgaagccggcggcggcggcggaggagcagccgaccccacggaagacgcgccttccgcgcgcttgcaacaataagcccaaacccccgccgccgccgccgtccgagcgtccgcgccgccgtgccgcggcggcgtcgggcgccggcggcgcggacgagacgccacaatgccgcgtggtcacgcctctcgtgtcggagcccgaggcgcctgctgagcttccccgctggcggctccgctgcatgtgggagctcggctccgtgctcaacttcctccacgtgttccgacctctgctgaacatcactggggagttcacggctgaggacgtcgaggcggcgcttatcactcccaacgagattctagatgatgtgcatatgccactgctaaagtcaattcctcctgtaactcgcatggctatgggacgtggaacctgggtgaccgtcctatgcagaaagctgaaggattggtggcattgggttgcagaaggtgatctgccaattgttgcatctcatgggttagcctcgcacataggacattcttgagtaaagcttgcactgcagcttcacattgataaaaatttccaatcgtttcatcttgcagaactgaaattgagacatacaaaacactagaaccagctattcgtttattaattttgaaagcgatatgtgatatccgtgttgagcaagaggatattcggaacttcattgacagttcccttaagcatggtcatgacctttctacttttcgtaaagaacggattggaggggattcccttggaatctcatactggtatgaagatgatgagattctcgggcatagattgtatcgtgaaattagacgagtagaacaggttaagaaggagcctggaaagaggtccaggggaaaaggaggatcttcagctatttcagttgtgtcctaccaatgggaaactgttgcgtccacctttgatgagtttgatgatgtggcagaaaaactcttttcaagtcggaacaggacagaggtttctcttggaaagaagttgaagattgaatatcttccagagatagaaaagctccataaaaaagagaggttgctcaaaaagcaacagagagaagctcttcttcttgatagctacttggcatcagatggacttaccaccggccgctctctccgtgatagaaagcccgtgacttatacatttgatgactatgatcgctcaataaatgaagccatcaaaattacgaagaaaagagagaactcagctgagcctgttgctactactgccaatagaagggtgcttcctccaagatcggaggcaccaagcaatgggaagttaaataatggtccctcaccaacaaccaatgactcatctgatggaaattcttcaaagtcagatgactaccgagacagcgatggtgaacaagaaaatgaggcacttgatcgcagcaaccggcggaggaaaagatctcagagatacacacaagactttgttgaggctgtctcagatgttgatcctaactttgacagtgacgacgatatcatgggagaggcagtgtatgatgacgaatacctgagaagtcgcaaacagaataagccatcaagtgcttctgaagaggatgaagagttccggttggaagaagatgccgaagatgatgatgaagaggaatattcattgagtaccagtgaagatctagaggagccacaacggcataaaaagctggaaactcgtggccggcgaggtacgaagctgagatcagttggtgaaatccaagcaggtcttagacgcagcaagcgttcttctcgtcctcgtattaactatcgccaatatgatttttcggactcggatacggagcctcgaaaggcaaggaaatctgacgcatcagatcctgatgctggctccgatgccgagaatgatatggagctctcgacatcgagtcaagagcaagaggaggaagaggatgatagtcatgatgaagaaaatggtaataatgcgaatgataaaatggaggaggaccacactgcagaagaaaataaaatagaaccagaggaggagaaggagcagccacagcagcagcctgtagagaagatggatgctcccagcagggaaagtaaaagtgtaggaagaacattcctagatctaaacgagcttgcacctggaggtggctttgatgatggcccaagcttgacagtgagagatgacatggacaacatctagggaataaagttttgttttgatacatttcgggtgctgttggccagttttctgacttccaggcaagggcagatccatggtcctgatggcctgtgatgaatggtgcaactatggtttggcggtgtgagcttatggttatggctgcttcactgatttgcagcagcaggacaggcgatgttccacttgaagcgactttgagcttctccggtgcttatgttatacgtggagaccatgaggaggtagttttatgtatactacatgaaggtcgcaatcgatcatagctgtattgcggccaggctgctgctgcgttgcggccggtctctaggatataaatttattgcctccatttatttagtcttaggcattgtgatgtcaatgagaacatggagggaaacctgtacaccgagtgcggtccgtcggcattcgcccgaccttttccacttgtagattgtaggttttttaaagtccgggcgggattagttctgtatctatacctgacagtctgtttttttctgtcacacctgtgtagctgacattgagcttgtccctgaatgcacaccggcaatgcctctcgttcgctctatatggagaagatgctgcatgtattcagctgatgttgtagcctatggacatgtccattactcagagtggctggcctggtgattgctaatttgatgtatggtttataaaaccaaattcctgtgtgcgtattggttagttgcaaaactttgcaaagataaataatttgggggtgttctgttccattaaacattgcaaaattatgtgaaatgtttggtgaattgggcttcatgtccccagttgtgcttcggagaggctactcatttcttacaaagtagcctcatggtggatgtttgatgacttgtagtgttcctgtaaaataaaagggaaagtacc

SEQ ID NO: 68120 - DNA, 3259 bp, Zea Mays
atggcctccgcctccctgcaccccgcttctccctcccacccaaaccctaaccatagccccgacgcagatctccgatctgatcgccccatgcccgacgccgacgccgtaagcggaggcgcctcgcccacttccccggagaagcgggaggaggaggaagaggaggcgccggggaaggaggcgaagccggcggcggcggcggaggagcagccgaccccacggaagacgcgccttccgcgcgcttgcaacaataagcccaaacccccgccgccgccgccgtccgagcgtccgcgccgccgtgccgcggcggcgtcgggcgccggcggcgcggacgagacgccacaatgccgcgtggtcacgcctctcgtgtcggagcccgaggcgcctgctgagcttccccgctggcggctccgctgcatgtgggagctcggctccgtgctcaacttcctccacgtgttccgacctctgctgaacatcactggggagttcacggctgaggacgtcgaggcggcgcttatcactcccaacgagattctagatgatgtgcatatgccactgctaaaggcttgcctgtattgtgttaccaagtttggaatgggatgctgccttcagtttatagaagcttgcgtcaattcctcctgtaactcgcatggctatgggacgtggaacctgggtgaccgtcctatgcagaaagctgaaggattggtggcattgggttgcagaaggtgatctgccaattgttgcatctcatggaactgaaattgagacatacaaaacactagaaccagctattcgtttattaattttgaaagcgatatgtgatatccgtgttgagcaagaggatattcggaacttcattgacagttcccttaagcatggtcatgacctttctacttttcgtaaagaacggattggaggggattcccttggaatctcatactggtatgaagatgatgagattctcgggcatagattgtatcgtgaaattagacgagtagaacaggttaagaaggagcctggaaagaggtccaggggaaaaggaggatcttcagctatttcagttgtgtcctaccaatgggaaactgttgcgtccacctttgatgagtttgatgatgtggcagaaaaactcttttcaagtcggaacaggacagaggtttctcttggaaagaagttgaagattgaatatcttccagagatagaaaagctccataaaaagaaagagaggttgctcaaaaagcaacagagagaagctcttcttcttgatagctacttggcatcagatggacttaccaccggccgctctctccgtgatagaaagcccgtgacttatacatttgatgactatgatcgctcaataaatgaagccatcaaaattacgaagaaaagagagaactcagctgagcctgttgctactactgccaatagaagggtgcttcctccaagatcggaggcaccaagcaatgggaagttaaataatggtccctcaccaacaaccaatgactcatctgatggaaattcttcaaagtcagatgactaccgagacagcgatggtgaacaagaaaatgaggcacttgatcgcagcaaccggcggaggaaaagatctcagagatacacacaagactttgttgaggctgtctcagatgttgatcctaactttgacagtgacgacgatatcatgggagaggcagtgtatgatgacgaatacctgagaagtcgcaaacagaataagccatcaagtgcttctgaagaggatgaagagttccggttggaagaagatgccgaagatgatgatgaagaggaatattcattgagtaccagtgaagatctagaggagccacaacggcataaaaagctggaaactcgtggccggcgaggtacgaagctgagatcagttggtgaaatccaagcaggtcttagacgcagcaagcgttcttctcgtcctcgtattaactatcgccaatatgatttttcggactcggatacggagcctcgaaaggcaaggaaatctgacgcatcagatcctgatgctggctccgatgccgagaatgatatggagctctcgacatcgagtcaagagcaagaggaggaagaggatgatagtcatgatgaagaaaatggtaataatgcgaatgataaaatggaggaggaccacactgcagaagaaaataaaatagaaccagaggaggagaaggagcagccacagcagcagcctgtagagaagatggatgctcccagcagggaaagtaaaagtgtaggaagaacattcctagatctaaacgagcttgcacctggaggtggctttgatgatggcccaagcttgacagtgagagatgacatggacaacatctagggaataaagttttgttttgatacatttcgggtgctgttggccagttttctgacttccaggcaagggcagatccatggtcctgatggcctgtgatgaatggtgcaactatggtttggcggtgtgagcttatggttatggctgcttcactgatttgcagcagcaggacaggcgatgttccacttgaagcgactttgagcttctccggtgcttatgttatacgtggagaccatgaggaggtagttttatgtatactacatgaaggtcgcaatcgatcatagctgtattgcggccaggctgctgctgcgttgcggccggtctctaggatataaatttattgcctccatttatttagtcttaggcattgtgatgtcaatgagaacatggagggaaacctgtacaccgagtgcggtccgtcggcattcgcccgaccttttccacttgtagattgtaggttttttaaagtccgggcgggattagttctgtatctatacctgacagtctgtttttttctgtcacacctgtgtagctgacattgagcttgtccctgaatgcacaccggcaatgcctctcgttcgctctatatggagaagatgctgcatgtattcagctgatgttgtagcctatggacatgtccattactcagagtggctggcctggtgattgctaatttgatgtatggtttataaaaccaaattcctgtgtgcgtattggttagttgcaaaactttgcaaagataaataatttgggggtgttctgttccattaaacattgcaaaattatgtgaaatgtttggtgaattgggcttcatgtccccagttgtgcttcggagaggctactcatttcttacaaagtagcctcatggtggatgtttgatgacttgtagtgttcctgtaaaataaaagggaaagtacc

SEQ ID NO: 68121 - DNA, 3853 bp, Zea Mays
ccatctttgcccttctcacctcctccgctgcctcccatggcctccgcctccctgcaccccgcttctccctcccacccaaaccctaaccatagccccgacgcagatctccgatctgatcgccccatgcccgacgccgacgccgtaagcggaggcgcctcgcccacttccccggagaagcgggaggaggaggaagaggaggcgccggggaaggaggcgaagccggcggcggcggcggaggagcagccgaccccacggaagacgcgccttccgcgcgcttgcaacaataagcccaaacccccgccgccgccgccgtccgagcgtccgcgccgccgtgccgcggcggcgtcgggcgccggcggcgcggacgagacgccacaatgccgcgtggtcacgcctctcgtgtcggagcccgaggcgcctgctgagcttccccgctggcggctccgctgcatgtgggagctcggctccgtgctcaacttcctccacgtgttccgacctctgctgaacatcactggggagttcacggctgaggacgtcgaggcggcgcttatcactcccaacgagattctagatgatgtgcatatgccactgctaaagtcaattcctcctgtaactcgcatggctatgggacgtggaacctgggtgaccgtcctatgcagaaagctgaaggattggtggcattgggttgcagaaggtgatctgccaattgttgcatctcatggaactgaaattgagacatacaaaacactagaaccagctattcgtttattaattttgaaagcgatatgtgatatccgtgttgaggtatgtactgattttattttaatttaacgatgaaccaaaagaactttggcagaatggatacttcagcctttccatctgtatactcttgtctcatttcttgaagtgtagtacagtcataattgtgtatatcaattttgattgagtctcagcctcccagtgtctcatattcagtttttcgggaagcttatttctatataatgggtaaatatcaacatggtgaatatccatacgttttcattgttttcaaaattatttaacagtttagcctaaacaacaacagcaacaacaaagcctttagtcccaagataagttggggtaggctagagttgaaacccaacaggagccacaaatcaaggttcaggcatgtgcatagctgttttttatttattggaatttcaacaatatttgctgtctattgctgtttgtgcctgtgttacgaacttgtgtttgaagagaagatgtctttagaaagtgtttatagcaagcataaattttgaagcatgtgtattaagtgcgtttgacattagctgattgatatgtgtatgaacataggaaaatttatatttgacattacctgcacgttgaatttggcaacattacttattatgaatggattttgcagcaagaggatattcggaacttcattgacagttcccttaagcatggtcatgacctttctacttttcgtaaagaacggattggaggggattcccttggaatctcatactggtatgaagatgatgagattctcgggcatagattgtatcgtgaaattagacgagtagaacaggttaagaaggagcctggaaagaggtccaggggaaaaggaggatcttcagctatttcagttgtgtcctaccaatgggaaactgttgcgtccacctttgatgagtttgatgatgtggcagaaaaactcttttcaagtcggaacaggacagaggtttctcttggaaagaagttgaagattgaatatcttccagagatagaaaagctccataaaaagaaagagaggttgctcaaaaagcaacagagagaagctcttcttcttgatagctacttggcatcagatggacttaccaccggccgctctctccgtgatagaaagcccgtgacttatacatttgatgactatgatcgctcaataaatgaagccatcaaaattacgaagaaaagagagaactcagctgagcctgttgctactactgccaatagaagggtgcttcctccaagatcggaggcaccaagcaatgggaagttaaataatggtccctcaccaacaaccaatgactcatctgatggaaattcttcaaagtcagatgactaccgagacagcgatggtgaacaagaaaatgaggcacttgatcgcagcaaccggcggaggaaaagatctcagagatacacacaagactttgttgaggctgtctcagatgttgatcctaactttgacagtgacgacgatatcatgggagaggcagtgtatgatgacgaatacctgagaagtcgcaaacagaataagccatcaagtgcttctgaagaggatgaagagttccggttggaagaagatgccgaagatgatgatgaagaggaatattcattgagtaccagtgaagatctagaggagccacaacggcataaaaagctggaaactcgtggccggcgaggtacgaagctgagatcagttggtgaaatccaagcaggtcttagacgcagcaagcgttcttctcgtcctcgtattaactatcgccaatatgatttttcggactcggatacggagcctcgaaaggcaaggaaatctgacgcatcagatcctgatgctggctccgatgccgagaatgatatggagctctcgacatcgagtcaagagcaagaggaggaagaggatgatagtcatgatgaagaaaatggtaataatgcgaatgataaaatggaggaggaccacactgcagaagaaaataaaatagaaccagaggaggagaaggagcagccacagcagcagcctgtagagaagatggatgctcccagcagggaaagtaaaagtgtaggaagaacattcctagatctaaacgagcttgcacctggaggtggctttgatgatggcccaagcttgacagtgagagatgacatggacaacatctagggaataaagttttgttttgatacatttcgggtgctgttggccagttttctgacttccaggcaagggcagatccatggtcctgatggcctgtgatgaatggtgcaactatggtttggcggtgtgagcttatggttatggctgcttcactgatttgcagcagcaggacaggcgatgttccacttgaagcgactttgagcttctccggtgcttatgttatacgtggagaccatgaggaggtagttttatgtatactacatgaaggtcgcaatcgatcatagctgtattgcggccaggctgctgctgcgttgcggccggtctctaggatataaatttattgcctccatttatttagtcttaggcattgtgatgtcaatgagaacatggagggaaacctgtacaccgagtgcggtccgtcggcattcgcccgaccttttccacttgtagattgtaggttttttaaagtccgggcgggattagttctgtatctatacctgacagtctgtttttttctgtcacacctgtgtagctgacattgagcttgtccctgaatgcacaccggcaatgcctctcgttcgctctatatggagaagatgctgcatgtattcagctgatgttgtagcctatggacatgtccattactcagagtggctggcctggtgattgctaatttgatgtatggtttataaaaccaaattcctgtgtgcgtattggttagttgcaaaactttgcaaagataaataatttgggggtgttctgttccattaaacattgcaaaattatgtgaaatgtttggtgaattgggcttcatgtccccagttgtgcttcggagaggctactcatttcttacaaagtagcctcatggtggatgtttgatgacttgtagtgttcctgtaaaataaaagggaaagtacc

SEQ ID NO: 68122 - DNA, 3225 bp, Zea Mays
cccatctttgcccttctcacctcctccgctgcctcccatggcctccgcctccctgcaccccgcttctccctcccacccaaaccctaaccatagccccgacgcagatctccgatctgatcgccccatgcccgacgccgacgccgtaagcggaggcgcctcgcccacttccccggagaagcgggaggaggaggaagaggaggcgccggggaaggaggcgaagccggcggcggcggcggaggagcagccgaccccacggaagacgcgccttccgcgcgcttgcaacaataagcccaaacccccgccgccgccgccgtccgagcgtccgcgccgccgtgccgcggcggcgtcgggcgccggcggcgcggacgagacgccacaatgccgcgtggtcacgcctctcgtgtcggagcccgaggcgcctgctgagcttccccgctggcggctccgctgcatgtgggagctcggctccgtgctcaacttcctccacgtgttccgacctctgctgaacatcactggggagttcacggctgaggacgtcgaggcggcgcttatcactcccaacgagattctagatgatgtgcatatgccactgctaaagtcaattcctcctgtaactcgcatggctatgggacgtggaacctgggtgaccgtcctatgcagaaagctgaaggattggtggcattggaaggtgatctgccaattgttgcatctcatggaactgaaattgagacatacaaaacactagaaccagctattcgtttattaattttgaaagcgatatgtgatatccgtgttgagcaagaggatattcggaacttcattgacagttcccttaagcatggtcatgacctttctacttttcgtaaagaacggattggaggggattcccttggaatctcatactggtatgaagatgatgagattctcgggcatagattgtatcgtgaaattagacgagtagaacaggttaagaaggagcctggaaagaggtccaggggaaaaggaggatcttcagctatttcagttgtgtcctaccaatgggaaactgttgcgtccacctttgatgagtttgatgatgtggcagaaaaactcttttcaagtcggaacaggacagaggtttctcttggaaagaagttgaagattgaatatcttccagagatagaaaagctccataaaaagaaagagaggttgctcaaaaagcaacagagagaagctcttcttcttgatagctacttggcatcagatggacttaccaccggccgctctctccgtgatagaaagcccgtgacttatacatttgatgactatgatcgctcaataaatgaagccatcaaaattacgaagaaaagagagaactcagctgagcctgttgctactactgccaatagaagggtgcttcctccaagatcggaggcaccaagcaatgggaagttaaataatggtccctcaccaacaaccaatgactcatctgatggaaattcttcaaagtcagatgactaccgagacagcgatggtgaacaagaaaatgaggcacttgatcgcagcaaccggcggaggaaaagatctcagagatacacacaagactttgttgaggctgtctcagatgttgatcctaactttgacagtgacgacgatatcatgggagaggcagtgtatgatgacgaatacctgagaagtcgcaaacagaataagccatcaagtgcttctgaagaggatgaagagttccggttggaagaagatgccgaagatgatgatgaagaggaatattcattgagtaccagtgaagatctagaggagccacaacggcataaaaagctggaaactcgtggccggcgaggtacgaagctgagatcagttggtgaaatccaagcaggtcttagacgcagcaagcgttcttctcgtcctcgtattaactatcgccaatatgatttttcggactcggatacggagcctcgaaaggcaaggaaatctgacgcatcagatcctgatgctggctccgatgccgagaatgatatggagctctcgacatcgagtcaagagcaagaggaggaagaggatgatagtcatgatgaagaaaatggtaataatgcgaatgataaaatggaggaggaccacactgcagaagaaaataaaatagaaccagaggaggagaaggagcagccacagcagcagcctgtagagaagatggatgctcccagcagggaaagtaaaagtgtaggaagaacattcctagatctaaacgagcttgcacctggaggtggctttgatgatggcccaagcttgacagtgagagatgacatggacaacatctagggaataaagttttgttttgatacatttcgggtgctgttggccagttttctgacttccaggcaagggcagatccatggtcctgatggcctgtgatgaatggtgcaactatggtttggcggtgtgagcttatggttatggctgcttcactgatttgcagcagcaggacaggcgatgttccacttgaagcgactttgagcttctccggtgcttatgttatacgtggagaccatgaggaggtagttttatgtatactacatgaaggtcgcaatcgatcatagctgtattgcggccaggctgctgctgcgttgcggccggtctctaggatataaatttattgcctccatttatttagtcttaggcattgtgatgtcaatgagaacatggagggaaacctgtacaccgagtgcggtccgtcggcattcgcccgaccttttccacttgtagattgtaggttttttaaagtccgggcgggattagttctgtatctatacctgacagtctgtttttttctgtcacacctgtgtagctgacattgagcttgtccctgaatgcacaccggcaatgcctctcgttcgctctatatggagaagatgctgcatgtattcagctgatgttgtagcctatggacatgtccattactcagagtggctggcctggtgattgctaatttgatgtatggtttataaaaccaaattcctgtgtgcgtattggttagttgcaaaactttgcaaagataaataatttgggggtgttctgttccattaaacattgcaaaattatgtgaaatgtttggtgaattgggcttcatgtccccagttgtgcttcggagaggctactcatttcttacaaagtagcctcatggtggatgtttgatgacttgtagtgttcctgtaaaataaaagggaaagtacc

SEQ ID NO: 68123 - DNA, 3054 bp, Zea Mays
cccatctttgcccttctcacctcctccgctgcctcccatggcctccgcctccctgcaccccgcttctccctcccacccaaaccctaaccatagccccgacgcagatctccgatctgatcgccccatgcccgacgccgacgccgtaagcggaggcgcctcgcccacttccccggagaagcgggaggaggaggaagaggaggcgccggggaaggaggcgaagccggcggcggcggcggaggagcagccgaccccacggaagacgcgccttccgcgcgcttgcaacaataagcccaaacccccgccgccgccgccgtccgagcgtccgcgccgccgtgccgcggcggcgtcgggcgccggcggcgcggacgagacgccacaatgccgcgtggtcacgcctctcgtgtcggagcccgaggcgcctgctgagcttccccgctggcggctccgctgcatgtgggagctcggctccgtgctcaacttcctccacgtgttccgacctctgctgaacatcactggggagttcacggctgaggacgtcgaggcggcgcttatcactcccaacgagattctagatgatgtgcatatgccactgctaaagtcaattcctcctgtaactcgcatggctatgggacgtggaacctgggtgaccgtcctatgcagaaagctgaaggattggtggcattgggttgcagaaggtgatctgccaattgttgcatctcatggaactgaaattgagacatacaaaacactagaaccagctattcgtttattaattttgaaagcgatatgtgatatccgtgttgagcaagaggatattcggaacttcattgacagttcccttaagcatggtcatgacctttctacttttcgtaaagaacggattggaggggattcccttggaatctcatactggaaaaactcttttcaagtcggaacaggacagaggtttctcttggaaagaagttgaagattgaatatcttccagagatagaaaagctccataaaaagaaagagaggttgctcaaaaagcaacagagagaagctcttcttcttgatagctacttggcatcagatggacttaccaccggccgctctctccgtgatagaaagcccgtgacttatacatttgatgactatgatcgctcaataaatgaagccatcaaaattacgaagaaaagagagaactcagctgagcctgttgctactactgccaatagaagggtgcttcctccaagatcggaggcaccaagcaatgggaagttaaataatggtccctcaccaacaaccaatgactcatctgatggaaattcttcaaagtcagatgactaccgagacagcgatggtgaacaagaaaatgaggcacttgatcgcagcaaccggcggaggaaaagatctcagagatacacacaagactttgttgaggctgtctcagatgttgatcctaactttgacagtgacgacgatatcatgggagaggcagtgtatgatgacgaatacctgagaagtcgcaaacagaataagccatcaagtgcttctgaagaggatgaagagttccggttggaagaagatgccgaagatgatgatgaagaggaatattcattgagtaccagtgaagatctagaggagccacaacggcataaaaagctggaaactcgtggccggcgaggtacgaagctgagatcagttggtgaaatccaagcaggtcttagacgcagcaagcgttcttctcgtcctcgtattaactatcgccaatatgatttttcggactcggatacggagcctcgaaaggcaaggaaatctgacgcatcagatcctgatgctggctccgatgccgagaatgatatggagctctcgacatcgagtcaagagcaagaggaggaagaggatgatagtcatgatgaagaaaatggtaataatgcgaatgataaaatggaggaggaccacactgcagaagaaaataaaatagaaccagaggaggagaaggagcagccacagcagcagcctgtagagaagatggatgctcccagcagggaaagtaaaagtgtaggaagaacattcctagatctaaacgagcttgcacctggaggtggctttgatgatggcccaagcttgacagtgagagatgacatggacaacatctagggaataaagttttgttttgatacatttcgggtgctgttggccagttttctgacttccaggcaagggcagatccatggtcctgatggcctgtgatgaatggtgcaactatggtttggcggtgtgagcttatggttatggctgcttcactgatttgcagcagcaggacaggcgatgttccacttgaagcgactttgagcttctccggtgcttatgttatacgtggagaccatgaggaggtagttttatgtatactacatgaaggtcgcaatcgatcatagctgtattgcggccaggctgctgctgcgttgcggccggtctctaggatataaatttattgcctccatttatttagtcttaggcattgtgatgtcaatgagaacatggagggaaacctgtacaccgagtgcggtccgtcggcattcgcccgaccttttccacttgtagattgtaggttttttaaagtccgggcgggattagttctgtatctatacctgacagtctgtttttttctgtcacacctgtgtagctgacattgagcttgtccctgaatgcacaccggcaatgcctctcgttcgctctatatggagaagatgctgcatgtattcagctgatgttgtagcctatggacatgtccattactcagagtggctggcctggtgattgctaatttgatgtatggtttataaaaccaaattcctgtgtgcgtattggttagttgcaaaactttgcaaagataaataatttgggggtgttctgttccattaaacattgcaaaattatgtgaaatgtttggtgaattgggcttcatgtccccagttgtgcttcggagaggctactcatttcttacaaagtagcctcatggtggatgtttgatgacttgtagtgttcctgtaaaataaaagggaaagtacc

SEQ ID NO: 68124 - DNA, 2049 bp, Zea Mays
aaaaaaaggttgataaatcccatcgtattacaaaagcagtttgcatccctgttttgaacatgtgcattccattccttggtggtgcatgtcacttcgatgctgcttttggacctcactttgccagtgcagtgcaatccctcacctgccatgcctactcctagatttgctcaaagatcacatctctcatctcatctgttgattgctttcatgtaatctaggttatcctctaaccttagttgtacctgaaggataaccaaggcgcagtggtaaaccaaggaccagaaagcactgccagtgtgccatctgaaactcctggtcattctcttttactaccattgaaagatcgatctaagagggaggggggactcaaaaggcaaaggacaaaggcaaggctgcaggctttgctttgattctaccctgacccccagcaaaacattaggcccttcaaaagcacatcagaacctgctgcagcaacaagaaactgtgaagaaagcacacagcctgtccacagcatattattgtgcagactgcagcgcagagagaggtggctttgcacttggctagttgcatgcaccactccatgaccatgagaagctcataggactaggaggctggtggcggtagtgcaaaaaagaaactggaggtagtataggattatgagcaggccagcttggtctgcgagggaggcattggcggcctcagccgtggccgccgtcctgcttggaggccttgtgctgatgtctttggtggtggggagggacgcgaggacgccatcgccagctagcgcggctgcgcctgcggtgggtggtagaaggatggtgatcggagccacggaggagctgaagggtggtgatgatcctttgagcagcagcaagaggagggtgcccaatggaccggatccaatccacaacaggtaccttctctttcttgcgtgcaaattaacatggaatgctctctctctctctctctctaaaactttctgttcatttttgtctcactaaattcaagctgaatacatgtaaaaagaatcggcctcaatagcagcttgagatttggtcatgttacaaatcaagtccctatttttcatgctcttgcatgggcctcctgacatcctcttttgacacccaatggcaaaatggtagaagatgagaagaacatgatatgtacttcttttgccatgttcctccaaggatccccataaactcctaaggtccacgtgtattattgaagtggattggagtgaaaatcaaactcagtcccaccctaatccactctaacacacacacacacatgaactgaaatggatacagctgcacctaaataagacctaactgtggatgcaaatgcatccaaacaaggtctaattgtctctaccatatcatcagtgtaaaactgtagactaaatcaacggtgataaagtagagtgctaaaaatctgatagactgaggcaaaaaagtagagtgtagaacatgatatatctacttaaattctgtcactgaaaaaggatgattacacagtttgtcttcattgcacaccatctcccaaattaaaaagcaaaatcttgaacaacacacttgttgcatggtgttgtattgcaacgctttccccttcccctatttcccaaaggctcacagctcagtcgtgcgttcttccaggggagctggagagtctggaagctcaccaggccgagcgtaggcagcagcggtgcacgccggccgccccccaaagaatggaagtttcccaaacacttggcgctggatccctcttctcatctgtggtggtggtggcctggtgtgtgtgtgtgtgtgggggggggggggggcgggtctggcgccgggacgtcacgttctaagcactgctatttgtgatggtttcggcacgaattaaagacactggcttttccgaaaacaaaaggccacgtactctactgatgacggcacaaacgaaagacagcactgtcaagcttccctctcacgaaagacgtacgccggattaaagtttgagcagagagagagagatgtgcaagagctcctttgttaatttcactgg

SEQ ID NO: 68125 - DNA, 1315 bp, Zea Mays
gaagaagaaaaaaaaggttgataaatcccatcgtattacaaaagcagtttgcatccctgttttgaacatgtgcattccattccttggtggtgcatgtcacttcgatgctgcttttggacctcactttgccagtgcagtgcaatccctcacctgccatgcctactcctagatttgctcaaagatcacatctctcatctcatctgttgattgctttcatgtaatctaggttatcctctaaccttagttgtacctgaaggataaccaaggcgcagtggtaaaccaaggaccagaaagcactgccagtgtgccatctgaaactcctggtcattctcttttactaccattgaaagatcgatctaagagggaggggggactcaaaaggcaaaggacaaaggcaaggctgcaggctttgctttgattctaccctgacccccagcaaaacattaggcccttcaaaagcacatcagaacctgctgcagcaacaagaaactgtgaagaaagcacacagcctgtccacagcatattattgtgcagactgcagcgcagagagaggtggctttgcacttggctagttgcatgcaccactccatgaccatgagaagctcataggactaggaggctggtggcggtagtgcaaaaaagaaactggaggtagtataggattatgagcaggccagcttggtctgcgagggaggcattggcggcctcagccgtggccgccgtcctgcttggaggccttgtgctgatgtctttggtggtggggagggacgcgaggacgccatcgccagctagcgcggctgcgcctgcggtgggtggtagaaggatggtgatcggagccacggaggagctgaagggtggtgatgatcctttgagcagcagcaagaggagggtgcccaatggaccggatccaatccacaacaggggagctggagagtctggaagctcaccaggccgagcgtaggcagcagcggtgcacgccggccgccccccaaagaatggaagtttcccaaacacttggcgctggatccctcttctcatctgtggtggtggtggcctggtgtgtgtgtgtgtgtgggggggggggggggcgggtctggcgccgggacgtcacgttctaagcactgctatttgtgatggtttcggcacgaattaaagacactggcttttccgaaaacaaaaggccacgtactctactgatgacggcacaaacgaaagacagcactgtcaagcttccctctcacgaaagacgtacgccggattaaagtttgagcagagagagagagatgtgcaagagctcctttgttaatttcactgg

SEQ ID NO: 68126 - DNA, 915 bp, Zea Mays
ttgtgcaacagactattcatcagctatactttttggaagtttttgttggggggtgggggagttggaaagagttgcttgctgctgcgcttctctgatgacacattcacaacaagcttcatcaccaccattggcctactacagaggagccatgggcattctgcttgtatacgatgtcacggacgagtcatccttcaacaacattagaaactggatccgcaacatagagcagcacgcgtctgacaacgtgaacaagattctggtgggcaacaaggtcgacatggacgcgaagcgggtggtgtccatggctcaaggccagaagcttgcagacgagtacgggatcaagtttttcgagacgagcgcgaaaacaaaccagaatgtggagcaggtcttcttcgccatggcgagggacgtgaagcgaaggctcaccgagaccgttgccgccgcggccgagcctccggctatccagatcagcaggccggactcgggccaggccggcgcagcctcgtcgacgaggtggtcatcgtcctgctgtagcacctgatctgccgccgtgtgtgtggctggctctggctgctataggttactgcttaccgcgtggtgtgtgtgtgtgtttacttcctccggtgccaagccaagatttaaatttcgctccaaagatttgccggagcaaacgtgtaggcagatagctaggctgctgtgctgggtttgcttgcttctgtcgtgtaaacaaaacccttgagagacggtagtgtctgattgtgtcggaacatgacatgcttgtacattattagtgcatcgtatatccagctgttgctcccatgtgcactgcgcagggcacaagtttgcgttggggtttttttttgtatgttttatttatacagaaaatcgctgcttaaattctaaaaataatttgag

SEQ ID NO: 68127 - DNA, 1003 bp, Zea Mays
ttgtgcaacagactattcatcagctatactttttggaagtttttgttggggggtgggggagttggaaagagttgcttgctgctgcgcttctctgatgacacattcacaacaagcttcatcaccaccattgggttaggacggttgagcttgatggaaagcgtgtaaagttacaaatttgggacactgctggtcaagaacgtttccgaacaattactactgcctactacagaggagccatgggcattctgcttgtatacgatgtcacggacgagtcatccttcaacaacattagaaactggatccgcaacatagagcagcacgcgtctgacaacgtgaacaagattctggtgggcaacaaggtcgacatggacgcgaagcgggtggtgtccatggctcaaggccagaagcttgcagacgagtacgggatcaagtttttcgagacgagcgcgaaaacaaaccagaatgtggagcaggtcttcttcgccatggcgagggacgtgaagcgaaggctcaccgagaccgttgccgccgcggccgagcctccggctatccagatcagcaggccggactcgggccaggccggcgcagcctcgtcgacgaggtggtcatcgtcctgctgtagcacctgatctgccgccgtgtgtgtggctggctctggctgctataggttactgcttaccgcgtggtgtgtgtgtgtgtttacttcctccggtgccaagccaagatttaaatttcgctccaaagatttgccggagcaaacgtgtaggcagatagctaggctgctgtgctgggtttgcttgcttctgtcgtgtaaacaaaacccttgagagacggtagtgtctgattgtgtcggaacatgacatgcttgtacattattagtgcatcgtatatccagctgttgctcccatgtgcactgcgcagggcacaagtttgcgttggggtttttttttgtatgttttatttatacagaaaatcgctgcttaaattctaaaaataatttgag

SEQ ID NO: 68128 - DNA, 1115 bp, Zea Mays
cttaacgaaggcaaggcctcgggcaagctggagatgtgtccgccgttgaaggggggcctcgggcgagacggaaaccccttcggagtcggctgccctttcccgaggctaggctcgggcgaggcgtgatcgagtcgctcgtatggactgatccctgacttaattgcacccatcaggcctctgcagctttatgctgatgggggttaccagctgagaattaggcgtcttgagggtacccctaattatggtccccgacacatatgcaagggttaagtgctacatatgtcgtgtggttagagatcctcagctgagtaaatcgattcggatcgccgttatatccccggagagtggagacttgatcactgacctacaacctaagtcaggatgtgaacctcatgaataaaaatgacgttgtattgatgagatggtgaaattagaccagatgcaaacagagtctattaatatttaatctggcgttaaaaccttgaaaataaggattcactttagtaagctatttctgcaaaagtatctaagctgattcttgctaaagcctctccttgattcctatttatccagcatacccttgagagtcttttccttagtcgggtaagacttgctgagtaattccatactcagggttttattccctattgtttttcaggttctaaccttatgctgctgtgatggtgttaagtgccggtgggctcggccttcttataagtctaagtacttcttctatacttcttattgaggatggtcccatgagctagcatatatttcaaacttatacttttgtaaccactccgataaaataatgtaaattttttgtaacttgtaaaatttggtaatagtatttccgctgcaaaaattattggtgtgtgtgatttgtgttacttaatcccgcggttctggttgtaagtggtttatccaatgtccttggggcaatcggacggatcctgttaagttatatggtgcacatgcatgccatctgaggtcttcgagacgaggacaggtgcatgtgggcccaataacttgggaggttctgccacagtaacggccgtcagctaaagacgactgcagacggtcctttgccgagcgtctaggtttgccgagtgttt

SEQ ID NO: 68129 - DNA, 1643 bp, Zea Mays
ctgatattttggcgcgcgatgcctattccttgcgcgctcctctctgccgagcggcttcttcacgcgtgtctctctctccctggtgcctgctcgcgacaagctcctgctcccttccgtggtcgcgtgctcagctctactgcaggccgcgcccagcttctctccctcggcgctcacagctctctctctcccctagtccctgccatggccgccgttccctggtcggagtttcttctagctcggatctcctccctacggcgcccgagctccatggctgctgcgttcttcagccgacgcgtcctgccgagtccctctccatccccacggcgtcctgcttgcccagctttcatctatggccggagccctcccatgtcacgtcccagccaagcccctgcctcgatccctgtccgggcctggcggttgcgctgctctggtgcccaggttctagcgcgctcgtcatcagctcgacatctcctcgagctcgcccctgtcttcctgctcggcgcccaaattcctgctcgcttttgcgtcgcgcgagtagcgttccgttgttcctacgcgtgctgccgcgaagctctctattcagttcgcctccatcgcgttgtcgtgcgcgcgaaattgctcgctccccactatcgtcgtttcctcgtgcccgctggtcgtgcgcccctgcagctccctattcgacaaaatgtgtggaccagtgctcatcgcgtgttgggaagatcggcaccgatgttcttgccaaatattgattgtttgattttggggagatcgacgcacgcatggtgttcgatgaatggctcaaaccggatagccttgtcgaaatcatagctccgagtcgattcggacatggtacgtgaattaaccacgcgatgcggagaaccagaactgatcgaccacaagatggtgctgatgaacggaactggagatggacagacgaagcaagtatcgggacaaaggatggtcgtcaagtgatcgacacctaacaaacactaacctagtgttacccaggcaagccccggtgcatgcaaccccttccttgtgttttcaaataatttctgcacactttaagtctagtgaaatgtgcattcggtttataggagttgcttggaaccttttgatgcattgccttccttgctatccacacctatataggtacttctggtgaagtatcaaacatgatttacaaaaatgcttagccctgcttagatcttgtggatagaggttgtccttagcctagctcgagaaaggatggcttctaccggcaagaatattttcatttggagcaatggtgggttcttactgcaaagttccctgtgatgctctcttcatcctacggaacaaagaacagtcctaaggatgaaagtatttaactcgcgacttgggctaggaacaggtgatgctccgcccgggtcaattaaggattggatgcgtatgtaggcctgatagatcaaggactatcttaactggccacatgccctggaaatgggacagggtaagcttgaacccggctattccatacgtgaaaagacaaccgcacactgggcgtgggagatggtgggagtagcgtgtgccctcctggctagaggctggatggaggagtactgtgctcccgggtagcgcggaccggttcacgttgtgga

SEQ ID NO: 68130 - DNA, 1588 bp, Zea Mays
atgaagtctatgaaatggcaaatacaacttgatgaagtccatgatcttgttggtctccagatcgatcttgatggtgtcgttggccttgatgagagggtcggagtcggatggtgcggtcgtcgtaggtgttcaggtaggggatgactttctggccaaactgaacagaccttaccttgcagagcttgaactgcacacaaaccaatacataagtgtggttcttgaaagacaattgatccttgaaagacatttgaccgcaacagccatttcatccatcatatcatgccattctcgcttgtgggaaattggaggatgcatgctttatagaatacttggatccactgtacaaattgatacttttctcctatgctcaggggatggatccaattgagcactatgaaaagccatgtcacgcaaacctgcgccatttcaaaattaagcaaggtataagcaagcatacgaaaaactaaaaattggagcattgctactatttgcacatagtaataagtcaagagaataacagaggtaaatattcgtctgcagttcgtgtagtaagcaagaatattttcttgagaccaagggataatgtcatctttttgatgtaatctgaagaatgacaaccaccaagagtaaccaaaaaaaggatgattgaaccatctctttcaacaacatagaatgattctaacgcttcaagaaactgaattattgcagtcatgaaaccttccattacaaccttgtttctgcacaaacatgacatcaacttttatctattctttggcagcaaagagatggaaaagcaggtttcccccacccccatagctttctgttttgtcccttgtcctagtaattcggtatactttcgtacacctttcctaaaacaccaaaactattattgaacctgttaaactgcacaggttggtactatatgcatatcatttttagagagttgacacatcatgaattctgctatctactatcttacatcattgcaaataaaatacatactgggtgtttctaattccttgtagaagggaacatgacaacccttaagctgaaagagcccaacatcttaaacaaattcatgatctccaggaacatacaactgagaaaaataaagccagctcattgcaatagaggaacaagtattatttgataatcatttctgttccacttttttatatagtctatgtcatgtctccatgcatatactgtcagtgccaaatcgaattttataaggtaagttagcattttatttcaaacccaacattatatggtaagtgtactatcttaattggcacgacctctctgataaaagcttgtgtaccttttaattttcaaatcactggcaatgcaagctgcctgaatgccagaaagcatgggaagtcaaaaagcattttatctgttttattttagcacaatgcattcaagttagaagaacaaagaaagcataatttcccaattatggagtcattagtctgatctcattacacagcattggcatggttttcctcagtatttcaatacgtaatggagcatacctttaaggtgtagaccgaggtggtcgttgtttcgcaacaatcacgcgctcagg

SEQ ID NO: 68131 - DNA, 1619 bp, Zea Mays
tgcctatatctgtgtaccatacccactgcaaccaatcaatccagtatagatgatgttgcctatatttgtataccttgcccatcacaatcaattaatctactatatttcacgagtctgaaatggccagtgattcttctgctgccctcacatgcctttgcggctgcacatccctttcctacgtgtctccgtggcagcgccctttcccgcacgaagtcaacatttatgttggagaataaggatgttgtgtgtccttgccctcatgatctttggacattatcaaatgagatgcccagatttatggcttagcttcttaatgcaatagtaatataatatgcagctctcattgtgttcattgttcaattgcaaagaaggaacaagtctattttggccatcaaactatagcccagatttatgtatttggtttcacaaatgaaaatccccacagaataaaaaagtgtgctgttggtaggacacgatttacaataacttgcctgaagacatttgcatcacgaattgctgttggtgattgtcgtgatggtgttctcttctattcttataatgagagtcataggaagttggaattggtctattctgatcctgctcatagattggtgggtgatattgctcttttaaattgtgaaactgctgtggtatcagatcgacgtgggagcatatctgtattatcatgcaccagattggaagtttcagaaagtccacagaagaacttagccgtgaattgttcattttatatgggtgaaacagccatgagcattcagaaggctgcattcaggtatcggcttccaattgatgatgatactgacccggtgcttgagacagtttacaactgtatcgtggcaagtaccatgttggggagtctctttgttatgattccactttcaagtgaggagcatcagcttttgcaagatgtccaagaaaaactctcagtacacccattaactgcaccggtcctgggaaatgatcatgcagagttccgtcagcgtggtaccccttcggtagtgcctcccattcttgacggtgatatgcttgtgcaattcttggagctcaccggtgaacaacagcaagccatccttactcatgctttgccagggaaggggcaacataggcccctctcggttttccaggttttgcaaacattagagcgcgtccattacgctcttaactgaggctttcttcaatcacagttactacaaggtttggatattagagctggttgaccttcattgtttgagatgccgtcagagctgaggttttagtgaccttcgcaatctagacggccgattccaagtctgccatgatatttatcagaacgtttgattgatgatgcaactggagcttgatactgggaagtctcatggtggcgagtatcccgtggaggcaccagattcgtcgaacctcctgtgtatatacagtcggccgcttttggtagactgttgtatggcgcattctgcatagaaacgaatattctttccgtttgtttcaatagataatgtaatgtttcttacgtcagctggtcggatgctcaacgagaaataagggaaacaatgaattgcattggccgtcctgctctatcacatgccattactgattagtgatgaatg

SEQ ID NO: 68132 - DNA, 4066 bp, Zea Mays
tgctggtggagttccagtcgagacagttttctgccgagagagcatatataattatttgtgtaagaggttcttcgcaattgccaatattgagttatcgaaaccaggaaatctgaggcatcatctgggaagaattttagcgatagatcgagaatctaatttcgttgctgtcagttcatatgaggataagtttgcccttatacatgtttctgtttcccagagtggttctggcagcggtattatttctgagaagattttgaagatcttccatgtcataatttcagaaatatttttatccaccagaaaatgaagatgacgcaaggatcataacttcgtctaggaccagcatccgtggtacaatttggacaatgcgcttcatatctgtgccccaagatgaagaatactatccagttctggcaatgataattaacaggaaaggctctgatgtgaatgacttgtcgttatttggatatgactccagcagctgtgttatcaaccacctctctagttattcagaaattggacctttggtacttgacgtatcagaaattcctgaaacgtttggctttgcacttctgttgcgtgttggtgatgctttattgttggatcttagaaatccaacaaatgtctgctgtatccaaagagtcagcttgacgactaacctgattggagagccaatcactgttgaagatccctgtccaggattagatgttgatgatgatgtggctgcttgtgctttgctagaattgagagattctggtaataacataatgaaggatgatggttatatggacattgatggtgttgacagcagaagtaatgtgaaaccaaggatcgtttgctcgtggagctgggagccacctgaccctgtcaggcgaggatgtgcaaggcttctattttgtttggatgatggagaatttcatattttggaatttactttggatgttgaaggggcgaagctgtacacatttgaatatattgataggactttgccttgtagacctcttttttggatgaaaaacagaatgataatagggtttgtagagatgggggacggcatgatttttaaacttggtcaccgcaggttgcttcataaaagcactattcagaatgtagcaccaatattggatctagcaattgctgattaccatggtgagaaacaggaccagatgtttgcatgttgtggaatgtcccctgagggctctcttcgagttttaaggaatggtgtcaatgtggacagacttctgaaaactgaagctatttaccagggtgtcactggtttgtggactttgagaatgaaggcaactgatgcctaccattcttttcttgtgttgtcatttgtggaggaaaccagaatactgtcagtaggactaagttttaatgacatcagtgatgccgtgggattccagcctgatgtttgcactttagcatgtggtttggtggctgataatctgctagttcaaatttacagcaaaggtgttaaggtctgtttgcctacagtatacgctcaccctgaaggtgcccctttaacttctccaatttgcactgactggtatcctgctatcactatcagtgttggtgctgtaggacataatattgttgttgttgctacatctaatccttgttgcttatatgtccttggtgttagatcatcatcttcttaccagtacgagttgtatgcaacacatcatgtgcaattgcagtatgaagtatcatgcatatcaatcccacaagaggattgtatacatgataatgtatctttcagctgtggagagggtgatgacatttgtaagaacccccctcctaaagttaatgtttgcaagtttgctgttattggaactcatagaccttcagtggaaatcatctccttggaacctggagaagcattaagggcttgagaaacggaatgctactcagatttgagtcagaaacacgtgattatctccctggttttctctacaaggactcttctattccttctgttaatacattccttcagttgatttcgatacggcgtattggaattactcctgtactgttagtgccaatacatgattcagctaatgctgacatcattgttctcagtgatagaccttggctattacatgcagcaagacatagcctggcatattcgtccatttcatttctttctgcttctcatgtcacacctgtttcatctgttgattgccccaatggtctactgtttgttgctgagagctgtttgcatttggttgaactggttcatgggaagcgattgaatgcacaaaagttttcaattggagggactccaaggaaagtgctataccataatgaaagcagaacactgttggtactgagaactgggctaaatggtgcatcgtcttcttcagatgttgtacaagtagatccacaaaatggggtattactttccagatataaatgtgaacctggcgaaacagcgaaatgcatgcaaattgcaaaaataggaaatgatcaagttttaattgttgggaccactaagtctgctggacggccgatgatgtcaaatggtgaagcagaaagcatcaagggacgcctgattgttttaagcttggaggccgttgaaagtcctcgtgagagcagttcgtttattccaacttttagttttaatccctcttcacattctggttctcctttccacgagattgttggatatacaactgaggaattttctagtaacagcatgtgcagcagtcctgatgagtttagctgcaaccagatccaagctgaacaaatgacagggcaattgagatcattgactcaatatatattgaatggcgcagttcttgctctgtgtccctatctagatcgttatgtgttggcagctgctggtaatatgatttatgtatttggtttcacaaatgaaaatccccacagaataaaaaagtgtgctgttggtaggacacgatttacaataacttgcctgaagacatttgcatcacgaattgctgttggtgattgtcgtgatggtgttctcttctattcttataatgagagtcataggaagttggaattggtctattctgatcctgctcatagattggtgggtgatattgctcttttaaattgtgaaactgctgtggtatcagatcgacgtgggagcatatctgtattatcatgcaccagattggaagtttcagaaagtccacagaagaacttagccgtgaattgttcattttatatgggtgaaacagccatgagcattcagaaggctgcattcaggtatcggcttccaattgatgatgatactgacccggtgcttgagacagtttacaactgtatcgtggcaagtaccatgttggggagtctctttgttatgattccactttcaagtgaggagcatcagcttttgcaagatgtccaagaaaaactctcagtacacccattaactgcaccggtcctgggaaatgatcatgcagagttccgtcagcgtggtaccccttcggtagtgcctcccattcttgacggtgatatgcttgtgcaattcttggagctcaccggtgaacaacagcaagccatccttactcatgctttgccagggaaggggcaacataggcccctctcggttttccaggttttgcaaacattagagcgcgtccattacgctcttaactgaggctttcttcaatcacagttactacaaggtttggatattagagctggttgaccttcattgtttgagatgccgtcagagctgaggttttagtgaccttcgcaatctagacggccgattccaagtctgccatgatatttatcagaacgtttgattgatgatgcaactggagcttgatactgggaagtctcatggtggcgagtatcccgtggaggcaccagattcgtcgaacctcctgtgtatatacagtcggccgcttttggtagactgttgtatggcgcattctgcatagaaacgaatattctttccgtttgtttcaatagataatgtaatgtttcttacgtcagctggtcggatgctcaacgagaaataagggaaacaatgaattgcattggccgtcctgctctatcacatgccattactgattagtgatgaatg

SEQ ID NO: 68133 - DNA, 4207 bp, Zea Mays
tcttttcacaaaatctgggatccatgtggcgtccgctttgctttctacatgtcaatgactcaaggggcaagcacaagactgctggtggagttccagtcgagacagttttctgccgagagagcatatataattatttgtgtaagaggttcttcgcaattgccaatattgagttatcgaaaccaggaaatctgaggcatcatctgggaagaattttagcgatagatcgagaatctaatttcgttgctgtcagttcatatgaggataagtttgcccttatacatgtttctgtttcccagagtggttctggcagcggtattatttctgagaagaaaatgaagatgacgcaaggatcataacttcgtctaggaccagcatccgtggtacaatttggacaatgcgcttcatatctgtgccccaagatgaagaatactatccagttctggcaatgataattaacaggaaaggctctgatgtgaatgacttgtcgttatttggatatgactccagcagctgtgttatcaaccacctctctagttattcagaaattggacctttggtacttgacgtatcagaaattcctgaaacgtttggctttgcacttctgttgcgtgttggtgatgctttattgttggatcttagaaatccaacaaatgtctgctgtatccaaagagtcagcttgacgactaacctgattggagagccaatcactgttgaagatccctgtccaggattagatgttgatgatgatgtggctgcttgtgctttgctagaattgagagattctggtaataacataatgaaggatgatggttatatggacattgatggtgttgacagcagaagtaatgtgaaaccaaggatcgtttgctcgtggagctgggagccacctgaccctgtcaggcgaggatgtgcaaggcttctattttgtttggatgatggagaatttcatattttggaatttactttggatgttgaaggggcgaagctgtacacatttgaatatattgataggactttgccttgtagacctcttttttggatgaaaaacagaatgataatagggtttgtagagatgggggacggcatgatttttaaacttggtcaccgcaggttgcttcataaaagcactattcagaatgtagcaccaatattggatctagcaattgctgattaccatggtgagaaacaggaccagatgtttgcatgttgtggaatgtcccctgagggctctcttcgagttttaaggaatggtgtcaatgtggacagacttctgaaaactgaagctatttaccagggtgtcactggtttgtggactttgagaatgaaggcaactgatgcctaccattcttttcttgtgttgtcatttgtggaggaaaccagaatactgtcagtaggactaagttttaatgacatcagtgatgccgtgggattccagcctgatgtttgcactttagcatgtggtttggtggctgataatctgctagttcaaatttacagcaaaggtgttaaggtctgtttgcctacagtatacgctcaccctgaaggtgcccctttaacttctccaatttgcactgactggtatcctgctatcactatcagtgttggtgctgtaggacataatattgttgttgttgctacatctaatccttgttgcttatatgtccttggtgttagatcatcatcttcttaccagtacgagttgtatgcaacacatcatgtgcaattgcagtatgaagtatcatgcatatcaatcccacaagaggattgtatacatgataatgtatctttcagctgtggagagggtgatgacatttgtaagaacccccctcctaaagttaatgtttgcaagtttgctgttattggaactcatagaccttcagtggaaatcatctccttggaacctggagaagcattaagggtattaactattgggactgtatctgtgaataatgcacttggcgcacctatgagtggttgtatacctgaaaatgtcaggtttgttgcggctgagaggttttacattcttgcaggcttgagaaacggaatgctactcagatttgagtcagaaacacgtgattatctccctggttttctctacaaggactcttctattccttctgttaatacattccttcagttgatttcgatacggcgtattggaattactcctgtactgttagtgccaatacatgattcagctaatgctgacatcattgttctcagtgatagaccttggctattacatgcagcaagacatagcctggcatattcgtccatttcatttctttctgcttctcatgtcacacctgtttcatctgttgattgccccaatggtctactgtttgttgctgagagctgtttgcatttggttgaactggttcatgggaagcgattgaatgcacaaaagttttcaattggagggactccaaggaaagtgctataccataatgaaagcagaacactgttggtactgagaactgggctaaatggtgcatcgtcttcttcagatgttgtacaagtagatccacaaaatggggtattactttccagatataaatgtgaacctggcgaaacagcgaaatgcatgcaaattgcaaaaataggaaatgatcaagttttaattgttgggaccactaagtctgctggacggccgatgatgtcaaatggtgaagcagaaagcatcaagggacgcctgattgttttaagcttggaggccgttgaaagtcctcgtgagagcagttcgtttattccaacttttagttttaatccctcttcacattctggttctcctttccacgagattgttggatatacaactgaggaattttctagtaacagcatgtgcagcagtcctgatgagtttagctgcaaccagatccaagctgaacaaatgacagggcaattgagatcattgactcaatatatattgaatggcgcagttcttgctctgtgtccctatctagatcgttatgtgttggcagctgctggtaatatgatttatgtatttggtttcacaaatgaaaatccccacagaataaaaaagtgtgctgttggtaggacacgatttacaataacttgcctgaagacatttgcatcacgaattgctgttggtgattgtcgtgatggtgttctcttctattcttataatgagagtcataggaagttggaattggtctattctgatcctgctcatagattggtgggtgatattgctcttttaaattgtgaaactgctgtggtatcagatcgacgtgggagcatatctgtattatcatgcaccagattggaagtttcagaaagtccacagaagaacttagccgtgaattgttcattttatatgggtgaaacagccatgagcattcagaaggctgcattcaggtatcggcttccaattgatgatgatactgacccggtgcttgagacagtttacaactgtatcgtggcaagtaccatgttggggagtctctttgttatgattccactttcaagtgaggagcatcagcttttgcaagatgtccaagaaaaactctcagtacacccattaactgcaccggtcctgggaaatgatcatgcagagttccgtcagcgtggtaccccttcggtagtgcctcccattcttgacggtgatatgcttgtgcaattcttggagctcaccggtgaacaacagcaagccatccttactcatgctttgccagggaaggggcaacataggcccctctcggttttccaggttttgcaaacattagagcgcgtccattacgctcttaactgaggctttcttcaatcacagttactacaaggtttggatattagagctggttgaccttcattgtttgagatgccgtcagagctgaggttttagtgaccttcgcaatctagacggccgattccaagtctgccatgatatttatcagaacgtttgattgatgatgcaactggagcttgatactgggaagtctcatggtggcgagtatcccgtggaggcaccagattcgtcgaacctcctgtgtatatacagtcggccgcttttggtagactgttgtatggcgcattctgcatagaaacgaatattctttccgtttgtttcaatagataatgtaatgtttcttacgtcagctggtcggatgctcaacgagaaataagggaaacaatgaattgcattggccgtcctgctctatcacatgccattactgattagtgatgaatg

SEQ ID NO: 68134 - DNA, 4234 bp, Zea Mays
gtccaatttcttttcacaaaatctgggatccatgtggcgtccgctttgctttctacatgtcaatgactcaaggggcaagcacaagactgctggtggagttccagtcgagacagttttctgccgagagagcatatataattatttgtgtaagaggttcttcgcaattgccaatattgagttatcgaaaccaggaaatctgaggcatcatctgggaagaattttagcgatagatcgagaatctaatttcgttgctgtcagttcatatgaggataagtttgcccttatacatgtttctgtttcccagagtggttctggcagcggtattatttctgagaagaaatatttttatccaccagaaaatgaagatgacgcaaggatcataacttcgtctaggaccagcatccgtggtacaatttggacaatgcgcttcatatctgtgccccaagatgaagaatactatccagttctggcaatgataattaacaggaaaggctctgatgtgaatgacttgtcgttatttggatatgactccagcagctgtgttatcaaccacctctctagttattcagaaattggacctttggtacttgacgtatcagaaattcctgaaacgtttggctttgcacttctgttgcgtgttggtgatgctttattgttggatcttagaaatccaacaaatgtctgctgtatccaaagagtcagcttgacgactaacctgattggagagccaatcactgttgaagatccctgtccaggattagatgttgatgatgatgtggctgcttgtgctttgctagaattgagagattctggtaataacataatgaaggatgatggttatatggacattgatggtgttgacagcagaagtaatgtgaaaccaaggatcgtttgctcgtggagctgggagccacctgaccctgtcaggcgaggatgtgcaaggcttctattttgtttggatgatggagaatttcatattttggaatttactttggatgttgaaggggcgaagctgtacacatttgaatatattgataggactttgccttgtagacctcttttttggatgaaaaacagaatgataatagggtttgtagagatgggggacggcatgatttttaaacttggtcaccgcaggttgcttcataaaagcactattcagaatgtagcaccaatattggatctagcaattgctgattaccatggtgagaaacaggaccagatgtttgcatgttgtggaatgtcccctgagggctctcttcgagttttaaggaatggtgtcaatgtggacagacttctgaaaactgaagctatttaccagggtgtcactggtttgtggactttgagaatgaaggcaactgatgcctaccattcttttcttgtgttgtcatttgtggaggaaaccagaatactgtcagtaggactaagttttaatgacatcagtgatgccgtgggattccagcctgatgtttgcactttagcatgtggtttggtggctgataatctgctagttcaaatttacagcaaaggtgttaaggtctgtttgcctacagtatacgctcaccctgaaggtgcccctttaacttctccaatttgcactgactggtatcctgctatcactatcagtgttggtgctgtaggacataatattgttgttgttgctacatctaatccttgttgcttatatgtccttggtgttagatcatcatcttcttaccagtacgagttgtatgcaacacatcatgtgcaattgcagtatgaagtatcatgcatatcaatcccacaagaggattgtatacatgataatgtatctttcagctgtggagagggtgatgacatttgtaagaacccccctcctaaagttaatgtttgcaagtttgctgttattggaactcatagaccttcagtggaaatcatctccttggaacctggagaagcattaagggtattaactattgggactgtatctgtgaataatgcacttggcgcacctatgagtggttgtatacctgaaaatgtcaggtttgttgcggctgagaggttttacattcttgcaggcttgagaaacggaatgctactcagatttgagtcagaaacacgtgattatctccctggttttctctacaaggactcttctattccttctgttaatacattccttcagttgatttcgatacggcgtattggaattactcctgtactgttagtgccaatacatgattcagctaatgctgacatcattgttctcagtgatagaccttggctattacatgcagcaagacatagcctggcatattcgtccatttcatttctttctgcttctcatgtcacacctgtttcatctgttgattgccccaatggtctactgtttgttgctgagagctgtttgcatttggttgaactggttcatgggaagcgattgaatgcacaaaagttttcaattggagggactccaaggaaagtgctataccataatgaaagcagaacactgttggtactgagaactgggctaaatggtgcatcgtcttcttcagatgttgtacaagtagatccacaaaatggggtattactttccagatataaatgtgaacctggcgaaacagcgaaatgcatgcaaattgcaaaaataggaaatgatcaagttttaattgttgggaccactaagtctgctggacggccgatgatgtcaaatggtgaagcagaaagcatcaagggacgcctgattgttttaagcttggaggccgttgaaagtcctcgtgagagcagttcgtttattccaacttttagttttaatccctcttcacattctggttctcctttccacgagattgttggatatacaactgaggaattttctagtaacagcatgtgcagcagtcctgatgagtttagctgcaaccagatccaagctgaacaaatgacagggcaattgagatcattgactcaatatatattgaatggcgcagttcttgctctgtgtccctatctagatcgttatgtgttggcagctgctggtaatatgatttatgtatttggtttcacaaatgaaaatccccacagaataaaaaagtgtgctgttggtaggacacgatttacaataacttgcctgaagacatttgcatcacgaattgctgttggtgattgtcgtgatggtgttctcttctattcttataatgagagtcataggaagttggaattggtctattctgatcctgctcatagattggtgggtgatattgctcttttaaattgtgaaactgctgtggtatcagatcgacgtgggagcatatctgtattatcatgcaccagattggaagtttcagaaagtccacagaagaacttagccgtgaattgttcattttatatgggtgaaacagccatgagcattcagaaggctgcattcaggtatcggcttccaattgatgatgatactgacccggtgcttgagacagtttacaactgtatcgtggcaagtaccatgttggggagtctctttgttatgattccactttcaagtgaggagcatcagcttttgcaagatgtccaagaaaaactctcagtacacccattaactgcaccggtcctgggaaatgatcatgcagagttccgtcagcgtggtaccccttcggtagtgcctcccattcttgacggtgatatgcttgtgcaattcttggagctcaccggtgaacaacagcaagccatccttactcatgctttgccagggaaggggcaacataggcccctctcggttttccaggttttgcaaacattagagcgcgtccattacgctcttaactgaggctttcttcaatcacagttactacaaggtttggatattagagctggttgaccttcattgtttgagatgccgtcagagctgaggttttagtgaccttcgcaatctagacggccgattccaagtctgccatgatatttatcagaacgtttgattgatgatgcaactggagcttgatactgggaagtctcatggtggcgagtatcccgtggaggcaccagattcgtcgaacctcctgtgtatatacagtcggccgcttttggtagactgttgtatggcgcattctgcatagaaacgaatattctttccgtttgtttcaatagataatgtaatgtttcttacgtcagctggtcggatgctcaacgagaaataagggaaacaatgaattgcattggccgtcctgctctatcacatgccattactgattagtgatgaatg

SEQ ID NO: 68135 - DNA, 4523 bp, Zea Mays
gagccagaatccagaggctccgtccttcggctaggcgagatcacgtgtctgaatcaaccaaccaaaccctaacccttgcagaggctgcggatgaagccatccaccgccggcgacgcctctgcggcggcggcggcgtcctcttcggggccctctacctccgcgtcgacatccgcgtccacgtctaccgcggacgccacccactacatcgccaagcgggtgctccggggaagcgccgtgctccacgtcgccgagggctgcttccgctcgcccgactccgcggacgtcgtcctcgccaaggaaacttcactggagttggttgctgttggtgatgatggtgttttacagtcaatatgtgaacaagacatttttgggattataaaagatattggtgtattgcaatggcactctagacataatggtttaattccacagatagaatgcaaagatcttctggttgtcctttcagattctggaaagctttctcttctttacttttgttctgagatgcacaggttcttcgcaattgccaatattgagttatcgaaaccaggaaatctgaggcatcatctgggaagaattttagcgatagatcgagaatctaatttcgttgctgtcagttcatatgaggataagtttgcccttatacatgtttctgtttcccagagtggttctggcagcggtattatttctgagaagaaaatgaagatgacgcaaggatcataacttcgtctaggaccagcatccgtggtacaatttggacaatgcgcttcatatctgtgccccaagatgaagaatactatccagttctggcaatgataattaacagctgtgttatcaaccacctctctagttattcagaaattggacctttggtacttgacgtatcagaaattcctgaaacgtttggctttgcacttctgttgcgtgttggtgatgctttattgttggatcttagaaatccaacaaatgtctgctgtatccaaagagtcagcttgacgactaacctgattggagagccaatcactgttgaagatccctgtccaggattagatgttgatgatgatgtggctgcttgtgctttgctagaattgagagattctggtaataacataatgaaggatgatggttatatggacattgatggtgttgacagcagaagtaatgtgaaaccaaggatcgtttgctcgtggagctgggagccacctgaccctgtcaggcgaggatgtgcaaggcttctattttgtttggatgatggagaatttcatattttggaatttactttggatgttgaaggggcgaagctgtacacatttgaatatattgataggactttgccttgtagacctcttttttggatgaaaaacagaatgataatagggtttgtagagatgggggacggcatgatttttaaacttggtcaccgcaggttgcttcataaaagcactattcagaatgtagcaccaatattggatctagcaattgctgattaccatggtgagaaacaggaccagatgtttgcatgttgtggaatgtcccctgagggctctcttcgagttttaaggaatggtgtcaatgtggacagacttctgaaaactgaagctatttaccagggtgtcactggtttgtggactttgagaatgaaggcaactgatgcctaccattcttttcttgtgttgtcatttgtggaggaaaccagaatactgtcagtaggactaagttttaatgacatcagtgatgccgtgggattccagcctgatgtttgcactttagcatgtggtttggtggctgataatctgctagttcaaatttacagcaaaggtgttaaggtctgtttgcctacagtatacgctcaccctgaaggtgcccctttaacttctccaatttgcactgactggtatcctgctatcactatcagtgttggtgctgtaggacataatattgttgttgttgctacatctaatccttgttgcttatatgtccttggtgttagatcatcatcttcttaccagtacgagttgtatgcaacacatcatgtgcaattgcagtatgaagtatcatgcatatcaatcccacaagaggattgtatacatgataatgtatctttcagctgtggagagggtgatgacatttgtaagaacccccctcctaaagttaatgtttgcaagtttgctgttattggaactcatagaccttcagtggaaatcatctccttggaacctggagaagcattaagggtattaactattgggactgtatctgtgaataatgcacttggcgcacctatgagtggttgtatacctgaaaatgtcaggtttgttgcggctgagaggttttacattcttgcaggcttgagaaacggaatgctactcagatttgagtcagaaacacgtgattatctccctggttttctctacaaggactcttctattccttctgttaatacattccttcagttgatttcgatacggcgtattggaattactcctgtactgttagtgccaatacatgattcagctaatgctgacatcattgttctcagtgatagaccttggctattacatgcagcaagacatagcctggcatattcgtccatttcatttctttctgcttctcatgtcacacctgtttcatctgttgattgccccaatggtctactgtttgttgctgagagctgtttgcatttggttgaactggttcatgggaagcgattgaatgcacaaaagttttcaattggagggactccaaggaaagtgctataccataatgaaagcagaacactgttggtactgagaactgggctaaatggtgcatcgtcttcttcagatgttgtacaagtagatccacaaaatggggtattactttccagatataaatgtgaacctggcgaaacagcgaaatgcatgcaaattgcaaaaataggaaatgatcaagttttaattgttgggaccactaagtctgctggacggccgatgatgtcaaatggtgaagcagaaagcatcaagggacgcctgattgttttaagcttggaggccgttgaaagtcctcgtgagagcagttcgtttattccaacttttagttttaatccctcttcacattctggttctcctttccacgagattgttggatatacaactgaggaattttctagtaacagcatgtgcagcagtcctgatgagtttagctgcaaccagatccaagctgaacaaatgacagggcaattgagatcattgactcaatatatattgaatggcgcagttcttgctctgtgtccctatctagatcgttatgtgttggcagctgctggtaatatgatttatgtatttggtttcacaaatgaaaatccccacagaataaaaaagtgtgctgttggtaggacacgatttacaataacttgcctgaagacatttgcatcacgaattgctgttggtgattgtcgtgatggtgttctcttctattcttataatgagagtcataggaagttggaattggtctattctgatcctgctcatagattggtgggtgatattgctcttttaaattgtgaaactgctgtggtatcagatcgacgtgggagcatatctgtattatcatgcaccagattggaagtttcagaaagtccacagaagaacttagccgtgaattgttcattttatatgggtgaaacagccatgagcattcagaaggctgcattcaggtatcggcttccaattgatgatgatactgacccggtgcttgagacagtttacaactgtatcgtggcaagtaccatgttggggagtctctttgttatgattccactttcaagtgaggagcatcagcttttgcaagatgtccaagaaaaactctcagtacacccattaactgcaccggtcctgggaaatgatcatgcagagttccgtcagcgtggtaccccttcggtagtgcctcccattcttgacggtgatatgcttgtgcaattcttggagctcaccggtgaacaacagcaagccatccttactcatgctttgccagggaaggggcaacataggcccctctcggttttccaggttttgcaaacattagagcgcgtccattacgctcttaactgaggctttcttcaatcacagttactacaaggtttggatattagagctggttgaccttcattgtttgagatgccgtcagagctgaggttttagtgaccttcgcaatctagacggccgattccaagtctgccatgatatttatcagaacgtttgattgatgatgcaactggagcttgatactgggaagtctcatggtggcgagtatcccgtggaggcaccagattcgtcgaacctcctgtgtatatacagtcggccgcttttggtagactgttgtatggcgcattctgcatagaaacgaatattctttccgtttgtttcaatagataatgtaatgtttcttacgtcagctggtcggatgctcaacgagaaataagggaaacaatgaattgcattggccgtcctgctctatcacatgccattactgattagtgatgaatg

SEQ ID NO: 68136 - DNA, 4587 bp, Zea Mays
ctgagccagaatccagaggctccgtccttcggctaggcgagatcacgtgtctgaatcaaccaaccaaaccctaacccttgcagaggctgcggatgaagccatccaccgccggcgacgcctctgcggcggcggcggcgtcctcttcggggccctctacctccgcgtcgacatccgcgtccacgtctaccgcggacgccacccactacatcgccaagcgggtgctccggggaagcgccgtgctccacgtcgccgagggctgcttccgctcgcccgactccgcggacgtcgtcctcgccaaggaaacttcactggagttggttgctgttggtgatgatggtgttttacagtcaatatgtgaacaagacatttttgggattataaaagatattggtgtattgcaatggcactctagacataatggtttaattccacagatagaatgcaaagatcttctggttgtcctttcagattctggaaagctttctcttctttacttttgttctgagatgcacaggttcttcgcaattgccaatattgagttatcgaaaccaggaaatctgaggcatcatctgggaagaattttagcgatagatcgagaatctaatttcgttgctgtcagttcatatgaggataagtttgcccttatacatgtttctgtttcccagagtggttctggcagcggtattatttctgagaagaaatatttttatccaccagaaaatgaagatgacgcaaggatcataacttcgtctaggaccagcatccgtggtacaatttggacaatgcgcttcatatctgtgccccaagatgaagaatactatccagttctggcaatgataattaacaggaaaggctctgatgtgaatgacttgtcgttatttggatatgactccagcagctgtgttatcaaccacctctctagttattcagaaattggacctttggtacttgacgtatcagaaattcctgaaacgtttggctttgcacttctgttgcgtgttggtgatgctttattgttggatcttagaaatccaacaaatgtctgctgtatccaaagagtcagcttgacgactaacctgattggagagccaatcactgttgaagatccctgtccaggattagatgttgatgatgatgtggctgcttgtgctttgctagaattgagagattctggtaataacataatgaaggatgatggttatatggacattgatggtgttgacagcagaagtaatgtgaaaccaaggatcgtttgctcgtggagctgggagccacctgaccctgtcaggcgaggatgtgcaaggcttctattttgtttggatgatggagaatttcatattttggaatttactttggatgttgaaggggcgaagctgtacacatttgaatatattgataggactttgccttgtagacctcttttttggatgaaaaacagaatgataatagggtttgtagagatgggggacggcatgatttttaaacttggtcaccgcaggttgcttcataaaagcactattcagaatgtagcaccaatattggatctagcaattgctgattaccatggtgagaaacaggaccagatgtttgcatgttgtggaatgtcccctgagggctctcttcgagttttaaggaatggtgtcaatgtggacagacttctgaaaactgaagctatttaccagggtgtcactggtttgtggactttgagaatgaaggcaactgatgcctaccattcttttcttgtgttgtcatttgtggaggaaaccagaatactgtcagtaggactaagttttaatgacatcagtgatgccgtgggattccagcctgatgtttgcactttagcatgtggtttggtggctgataatctgctagttcaaatttacagcaaaggtgttaaggtctgtttgcctacagtatacgctcaccctgaaggtgcccctttaacttctccaatttgcactgactggtatcctgctatcactatcagtgttggtgctgtaggacataatattgttgttgttgctacatctaatccttgttgcttatatgtccttggtgttagatcatcatcttcttaccagtacgagttgtatgcaacacatcatgtgcaattgcagtatgaagtatcatgcatatcaatcccacaagaggattgtatacatgataatgtatctttcagctgtggagagggtgatgacatttgtaagaacccccctcctaaagttaatgtttgcaagtttgctgttattggaactcatagaccttcagtggaaatcatctccttggaacctggagaagcattaagggtattaactattgggactgtatctgtgaataatgcacttggcgcacctatgagtggttgtatacctgaaaatgtcaggtttgttgcggctgagaggttttacattcttgcaggcttgagaaacggaatgctactcagatttgagtcagaaacacgtgattatctccctggttttctctacaaggactcttctattccttctgttaatacattccttcagttgatttcgatacggcgtattggaattactcctgtactgttagtgccaatacatgattcagctaatgctgacatcattgttctcagtgatagaccttggctattacatgcagcaagacatagcctggcatattcgtccatttcatttctttctgcttctcatgtcacacctgtttcatctgttgattgccccaatggtctactgtttgttgctgagagctgtttgcatttggttgaactggttcatgggaagcgattgaatgcacaaaagttttcaattggagggactccaaggaaagtgctataccataatgaaagcagaacactgttggtactgagaactgggctaaatggtgcatcgtcttcttcagatgttgtacaagtagatccacaaaatggggtattactttccagatataaatgtgaacctggcgaaacagcgaaatgcatgcaaattgcaaaaataggaaatgatcaagttttaattgttgggaccactaagtctgctggacggccgatgatgtcaaatggtgaagcagaaagcatcaagggacgcctgattgttttaagcttggaggccgttgaaagtcctcgtgagagcagttcgtttattccaacttttagttttaatccctcttcacattctggttctcctttccacgagattgttggatatacaactgaggaattttctagtaacagcatgtgcagcagtcctgatgagtttagctgcaaccagatccaagctgaacaaatgacagggcaattgagatcattgactcaatatatattgaatggcgcagttcttgctctgtgtccctatctagatcgttatgtgttggcagctgctgatttatgtatttggtttcacaaatgaaaatccccacagaataaaaaagtgtgctgttggtaggacacgatttacaataacttgcctgaagacatttgcatcacgaattgctgttggtgattgtcgtgatggtgttctcttctattcttataatgagagtcataggaagttggaattggtctattctgatcctgctcatagattggtgggtgatattgctcttttaaattgtgaaactgctgtggtatcagatcgacgtgggagcatatctgtattatcatgcaccagattggaagtttcagaaagtccacagaagaacttagccgtgaattgttcattttatatgggtgaaacagccatgagcattcagaaggctgcattcaggtatcggcttccaattgatgatgatactgacccggtgcttgagacagtttacaactgtatcgtggcaagtaccatgttggggagtctctttgttatgattccactttcaagtgaggagcatcagcttttgcaagatgtccaagaaaaactctcagtacacccattaactgcaccggtcctgggaaatgatcatgcagagttccgtcagcgtggtaccccttcggtagtgcctcccattcttgacggtgatatgcttgtgcaattcttggagctcaccggtgaacaacagcaagccatccttactcatgctttgccagggaaggggcaacataggcccctctcggttttccaggttttgcaaacattagagcgcgtccattacgctcttaactgaggctttcttcaatcacagttactacaaggtttggatattagagctggttgaccttcattgtttgagatgccgtcagagctgaggttttagtgaccttcgcaatctagacggccgattccaagtctgccatgatatttatcagaacgtttgattgatgatgcaactggagcttgatactgggaagtctcatggtggcgagtatcccgtggaggcaccagattcgtcgaacctcctgtgtatatacagtcggccgcttttggtagactgttgtatggcgcattctgcatagaaacgaatattctttccgtttgtttcaatagataatgtaatgtttcttacgtcagctggtcggatgctcaacgagaaataagggaaacaatgaattgcattggccgtcctgctctatcacatgccattactgattagtgatgaatg

SEQ ID NO: 68137 - DNA, 4630 bp, Zea Mays
gttcgctgctggatccgctagtttaacttggcctcgttctccctgagccagaatccagaggctccgtccttcggctaggcgagatcacgtgtctgaatcaaccaaccaaaccctaacccttgcagaggctgcggatgaagccatccaccgccggcgacgcctctgcggcggcggcggcgtcctcttcggggccctctacctccgcgtcgacatccgcgtccacgtctaccgcggacgccacccactacatcgccaagcgggtgctccggggaagcgccgtgctccacgtcgccgagggctgcttccgctcgcccgactccgcggacgtcgtcctcgccaaggaaacttcactggagttggttgctgttggtgatgatggtgttttacagtcaatatgtgaacaagacatttttgggattataaaagatattggtgtattgcaatggcactctagacataatggtttaattccacagatagaatgcaaagatcttctggttgtcctttcagattctggaaagctttctcttctttacttttgttctgagatgcacaggttcttcgcaattgccaatattgagttatcgaaaccaggaaatctgaggcatcatctgggaagaattttagcgatagatcgagaatctaatttcgttgctgtcagttcatatgaggataagtttgcccttatacatgtttctgtttcccagagtggttctggcagcggtattatttctgagaagaaatatttttatccaccagaaaatgaagatgacgcaaggatcataacttcgtctaggaccagcatccgtggtacaatttggacaatgcgcttcatatctgtgccccaagatgaagaatactatccagttctggcaatgataattaacaggaaaggctctgatgtgaatgacttgtcgttatttggatatgactccagcagctgtgttatcaaccacctctctagttattcagaaattggacctttggtacttgacgtatcagaaattcctgaaacgtttggctttgcacttctgttgcgtgttggtgatgctttattgttggatcttagaaatccaacaaatgtctgctgtatccaaagagtcagcttgacgactaacctgattggagagccaatcactgttgaagatccctgtccaggattagatgttgatgatgatgtggctgcttgtgctttgctagaattgagagattctggtaataacataatgaaggatgatggttatatggacattgatggtgttgacagcagaagtaatgtgaaaccaaggatcgtttgctcgtggagctgggagccacctgaccctgtcaggcgaggatgtgcaaggcttctattttgtttggatgatggagaatttcatattttggaatttactttggatgttgaaggggcgaagctgtacacatttgaatatattgataggactttgccttgtagacctcttttttggatgaaaaacagaatgataatagggtttgtagagatgggggacggcatgatttttaaacttggtcaccgcaggttgcttcataaaagcactattcagaatgtagcaccaatattggatctagcaattgctgattaccatggtgagaaacaggaccagatgtttgcatgttgtggaatgtcccctgagggctctcttcgagttttaaggaatggtgtcaatgtggacagacttctgaaaactgaagctatttaccagggtgtcactggtttgtggactttgagaatgaaggcaactgatgcctaccattcttttcttgtgttgtcatttgtggaggaaaccagaatactgtcagtaggactaagttttaatgacatcagtgatgccgtgggattccagcctgatgtttgcactttagcatgtggtttggtggctgataatctgctagttcaaatttacagcaaaggtgttaaggtctgtttgcctacagtatacgctcaccctgaaggtgcccctttaacttctccaatttgcactgactggtatcctgctatcactatcagtgttggtgctgtaggacataatattgttgttgttgctacatctaatccttgttgcttatatgtccttggtgttagatcatcatcttcttaccagtacgagttgtatgcaacacatcatgtgcaattgcagtatgaagtatcatgcatatcaatcccacaagaggattgtatacatgataatgtatctttcagctgtggagagggtgatgacatttgtaagaacccccctcctaaagttaatgtttgcaagtttgctgttattggaactcatagaccttcagtggaaatcatctccttggaacctggagaagcattaagggtattaactattgggactgtatctgtgaataatgcacttggcgcacctatgagtggttgtatacctgaaaatgtcaggtttgttgcggctgagaggttttacattcttgcaggcttgagaaacggaatgctactcagatttgagtcagaaacacgtgattatctccctggttttctctacaaggactcttctattccttctgttaatacattccttcagttgatttcgatacggcgtattggaattactcctgtactgttagtgccaatacatgattcagctaatgctgacatcattgttctcagtgatagaccttggctattacatgcagcaagacatagcctggcatattcgtccatttcatttctttctgcttctcatgtcacacctgtttcatctgttgattgccccaatggtctactgtttgttgctgagagctgtttgcatttggttgaactggttcatgggaagcgattgaatgcacaaaagttttcaattggagggactccaaggaaagtgctataccataatgaaagcagaacactgttggtactgagaactgggctaaatggtgcatcgtcttcttcagatgttgtacaagtagatccacaaaatggggtattactttccagatataaatgtgaacctggcgaaacagcgaaatgcatgcaaattgcaaaaataggaaatgatcaagttttaattgttgggaccactaagtctgctggacggccgatgatgtcaaatggtgaagcagaaagggacgcctgattgttttaagcttggaggccgttgaaagtcctcgtgagagcagttcgtttattccaacttttagttttaatccctcttcacattctggttctcctttccacgagattgttggatatacaactgaggaattttctagtaacagcatgtgcagcagtcctgatgagtttagctgcaaccagatccaagctgaacaaatgacagggcaattgagatcattgactcaatatatattgaatggcgcagttcttgctctgtgtccctatctagatcgttatgtgttggcagctgctggtaatatgatttatgtatttggtttcacaaatgaaaatccccacagaataaaaaagtgtgctgttggtaggacacgatttacaataacttgcctgaagacatttgcatcacgaattgctgttggtgattgtcgtgatggtgttctcttctattcttataatgagagtcataggaagttggaattggtctattctgatcctgctcatagattggtgggtgatattgctcttttaaattgtgaaactgctgtggtatcagatcgacgtgggagcatatctgtattatcatgcaccagattggaagtttcagaaagtccacagaagaacttagccgtgaattgttcattttatatgggtgaaacagccatgagcattcagaaggctgcattcaggtatcggcttccaattgatgatgatactgacccggtgcttgagacagtttacaactgtatcgtggcaagtaccatgttggggagtctctttgttatgattccactttcaagtgaggagcatcagcttttgcaagatgtccaagaaaaactctcagtacacccattaactgcaccggtcctgggaaatgatcatgcagagttccgtcagcgtggtaccccttcggtagtgcctcccattcttgacggtgatatgcttgtgcaattcttggagctcaccggtgaacaacagcaagccatccttactcatgctttgccagggaaggggcaacataggcccctctcggttttccaggttttgcaaacattagagcgcgtccattacgctcttaactgaggctttcttcaatcacagttactacaaggtttggatattagagctggttgaccttcattgtttgagatgccgtcagagctgaggttttagtgaccttcgcaatctagacggccgattccaagtctgccatgatatttatcagaacgtttgattgatgatgcaactggagcttgatactgggaagtctcatggtggcgagtatcccgtggaggcaccagattcgtcgaacctcctgtgtatatacagtcggccgcttttggtagactgttgtatggcgcattctgcatagaaacgaatattctttccgtttgtttcaatagataatgtaatgtttcttacgtcagctggtcggatgctcaacgagaaataagggaaacaatgaattgcattggccgtcctgctctatcacatgccattactgattagtgatgaatg

SEQ ID NO: 68138 - DNA, 4651 bp, Zea Mays
cgctcagcggcgtcgctagttcgctgctggatccgctagtttaacttggcctcgttctccctgagccagaatccagaggctccgtccttcggctaggcgagatcacgtgtctgaatcaaccaaccaaaccctaacccttgcagaggctgcggatgaagccatccaccgccggcgacgcctctgcggcggcggcggcgtcctcttcggggccctctacctccgcgtcgacatccgcgtccacgtctaccgcggacgccacccactacatcgccaagcgggtgctccggggaagcgccgtgctccacgtcgccgagggctgcttccgctcgcccgactccgcggacgtcgtcctcgccaaggaaacttcactggagttggttgctgttggtgatgatggtgttttacagtcaatatgtgaacaagacatttttgggattataaaagatattggtgtattgcaatggcactctagacataatggtttaattccacagaatgcaaagatcttctggttgtcctttcagattctggaaagctttctcttctttacttttgttctgagatgcacaggttcttcgcaattgccaatattgagttatcgaaaccaggaaatctgaggcatcatctgggaagaattttagcgatagatcgagaatctaatttcgttgctgtcagttcatatgaggataagtttgcccttatacatgtttctgtttcccagagtggttctggcagcggtattatttctgagaagaaatatttttatccaccagaaaatgaagatgacgcaaggatcataacttcgtctaggaccagcatccgtggtacaatttggacaatgcgcttcatatctgtgccccaagatgaagaatactatccagttctggcaatgataattaacaggaaaggctctgatgtgaatgacttgtcgttatttggatatgactccagcagctgtgttatcaaccacctctctagttattcagaaattggacctttggtacttgacgtatcagaaattcctgaaacgtttggctttgcacttctgttgcgtgttggtgatgctttattgttggatcttagaaatccaacaaatgtctgctgtatccaaagagtcagcttgacgactaacctgattggagagccaatcactgttgaagatccctgtccaggattagatgttgatgatgatgtggctgcttgtgctttgctagaattgagagattctggtaataacataatgaaggatgatggttatatggacattgatggtgttgacagcagaagtaatgtgaaaccaaggatcgtttgctcgtggagctgggagccacctgaccctgtcaggcgaggatgtgcaaggcttctattttgtttggatgatggagaatttcatattttggaatttactttggatgttgaaggggcgaagctgtacacatttgaatatattgataggactttgccttgtagacctcttttttggatgaaaaacagaatgataatagggtttgtagagatgggggacggcatgatttttaaacttggtcaccgcaggttgcttcataaaagcactattcagaatgtagcaccaatattggatctagcaattgctgattaccatggtgagaaacaggaccagatgtttgcatgttgtggaatgtcccctgagggctctcttcgagttttaaggaatggtgtcaatgtggacagacttctgaaaactgaagctatttaccagggtgtcactggtttgtggactttgagaatgaaggcaactgatgcctaccattcttttcttgtgttgtcatttgtggaggaaaccagaatactgtcagtaggactaagttttaatgacatcagtgatgccgtgggattccagcctgatgtttgcactttagcatgtggtttggtggctgataatctgctagttcaaatttacagcaaaggtgttaaggtctgtttgcctacagtatacgctcaccctgaaggtgcccctttaacttctccaatttgcactgactggtatcctgctatcactatcagtgttggtgctgtaggacataatattgttgttgttgctacatctaatccttgttgcttatatgtccttggtgttagatcatcatcttcttaccagtacgagttgtatgcaacacatcatgtgcaattgcagtatgaagtatcatgcatatcaatcccacaagaggattgtatacatgataatgtatctttcagctgtggagagggtgatgacatttgtaagaacccccctcctaaagttaatgtttgcaagtttgctgttattggaactcatagaccttcagtggaaatcatctccttggaacctggagaagcattaagggtattaactattgggactgtatctgtgaataatgcacttggcgcacctatgagtggttgtatacctgaaaatgtcaggtttgttgcggctgagaggttttacattcttgcaggcttgagaaacggaatgctactcagatttgagtcagaaacacgtgattatctccctggttttctctacaaggactcttctattccttctgttaatacattccttcagttgatttcgatacggcgtattggaattactcctgtactgttagtgccaatacatgattcagctaatgctgacatcattgttctcagtgatagaccttggctattacatgcagcaagacatagcctggcatattcgtccatttcatttctttctgcttctcatgtcacacctgtttcatctgttgattgccccaatggtctactgtttgttgctgagagctgtttgcatttggttgaactggttcatgggaagcgattgaatgcacaaaagttttcaattggagggactccaaggaaagtgctataccataatgaaagcagaacactgttggtactgagaactgggctaaatggtgcatcgtcttcttcagatgttgtacaagtagatccacaaaatggggtattactttccagatataaatgtgaacctggcgaaacagcgaaatgcatgcaaattgcaaaaataggaaatgatcaagttttaattgttgggaccactaagtctgctggacggccgatgatgtcaaatggtgaagcagaaagcatcaagggacgcctgattgttttaagcttggaggccgttgaaagtcctcgtgagagcagttcgtttattccaacttttagttttaatccctcttcacattctggttctcctttccacgagattgttggatatacaactgaggaattttctagtaacagcatgtgcagcagtcctgatgagtttagctgcaaccagatccaagctgaacaaatgacagggcaattgagatcattgactcaatatatattgaatggcgcagttcttgctctgtgtccctatctagatcgttatgtgttggcagctgctggtaatatgatttatgtatttggtttcacaaatgaaaatccccacagaataaaaaagtgtgctgttggtaggacacgatttacaataacttgcctgaagacatttgcatcacgaattgctgttggtgattgtcgtgatggtgttctcttctattcttataatgagagtcataggaagttggaattggtctattctgatcctgctcatagattggtgggtgatattgctcttttaaattgtgaaactgctgtggtatcagatcgacgtgggagcatatctgtattatcatgcaccagattggaagtttcagaaagtccacagaagaacttagccgtgaattgttcattttatatgggtgaaacagccatgagcattcagaaggctgcattcaggtatcggcttccaattgatgatgatactgacccggtgcttgagacagtttacaactgtatcgtggcaagtaccatgttggggagtctctttgttatgattccactttcaagtgaggagcatcagcttttgcaagatgtccaagaaaaactctcagtacacccattaactgcaccggtcctgggaaatgatcatgcagagttccgtcagcgtggtaccccttcggtagtgcctcccattcttgacggtgatatgcttgtgcaattcttggagctcaccggtgaacaacagcaagccatccttactcatgctttgccagggaaggggcaacataggcccctctcggttttccaggttttgcaaacattagagcgcgtccattacgctcttaactgaggctttcttcaatcacagttactacaaggtttggatattagagctggttgaccttcattgtttgagatgccgtcagagctgaggttttagtgaccttcgcaatctagacggccgattccaagtctgccatgatatttatcagaacgtttgattgatgatgcaactggagcttgatactgggaagtctcatggtggcgagtatcccgtggaggcaccagattcgtcgaacctcctgtgtatatacagtcggccgcttttggtagactgttgtatggcgcattctgcatagaaacgaatattctttccgtttgtttcaatagataatgtaatgtttcttacgtcagctggtcggatgctcaacgagaaataagggaaacaatgaattgcattggccgtcctgctctatcacatgccattactgattagtgatgaatg

SEQ ID NO: 68139 - DNA, 4650 bp, Zea Mays
cgctcagcggcgtcgctagttcgctgctggatccgctagtttaacttggcctcgttctccctgagccagaatccagaggctccgtccttcggctaggcgagatcacgtgtctgaatcaaccaaccaaaccctaacccttgcagaggctgcggatgaagccatccaccgccggcgacgcctctgcggcggcggcggcgtcctcttcggggccctctacctccgcgtcgacatccgcgtccacgtctaccgcggacgccacccactacatcgccaagcgggtgctccggggaagcgccgtgctccacgtcgccgagggctgcttccgctcgcccgactccgcggacgtcgtcctcgccaaggaaacttcactggagttggttgctgttggtgatgatggtgttttacagtcaatatgtgaacaagacatttttgggattataaaagatattggtgtattgcaatggcactctagacataatggtttaattccacagatagaatgcaaagatcttctggttgtcctttcagattctggaaagctttctcttctttacttttgttctgagatgcacaggttcttcgcaattgccaatattgagttatcgaaaccaggaaatctgaggcatcatctgggaagaattttagcgatagatcgagaatctaatttcgttgctgtcagttcatatgaggataagtttgcccttatacatgtttctgtttcccagagtggttctggcagcggtattatttctgagaagaaatatttttatccaccagaaaatgaagatgacgcaaggatcataacttcgtctaggaccagcatccgtggtacaatttggacaatgcgcttcatatctgtgccccaagatgaagaatactatccagttctggcaatgataattaacaggctctgatgtgaatgacttgtcgttatttggatatgactccagcagctgtgttatcaaccacctctctagttattcagaaattggacctttggtacttgacgtatcagaaattcctgaaacgtttggctttgcacttctgttgcgtgttggtgatgctttattgttggatcttagaaatccaacaaatgtctgctgtatccaaagagtcagcttgacgactaacctgattggagagccaatcactgttgaagatccctgtccaggattagatgttgatgatgatgtggctgcttgtgctttgctagaattgagagattctggtaataacataatgaaggatgatggttatatggacattgatggtgttgacagcagaagtaatgtgaaaccaaggatcgtttgctcgtggagctgggagccacctgaccctgtcaggcgaggatgtgcaaggcttctattttgtttggatgatggagaatttcatattttggaatttactttggatgttgaaggggcgaagctgtacacatttgaatatattgataggactttgccttgtagacctcttttttggatgaaaaacagaatgataatagggtttgtagagatgggggacggcatgatttttaaacttggtcaccgcaggttgcttcataaaagcactattcagaatgtagcaccaatattggatctagcaattgctgattaccatggtgagaaacaggaccagatgtttgcatgttgtggaatgtcccctgagggctctcttcgagttttaaggaatggtgtcaatgtggacagacttctgaaaactgaagctatttaccagggtgtcactggtttgtggactttgagaatgaaggcaactgatgcctaccattcttttcttgtgttgtcatttgtggaggaaaccagaatactgtcagtaggactaagttttaatgacatcagtgatgccgtgggattccagcctgatgtttgcactttagcatgtggtttggtggctgataatctgctagttcaaatttacagcaaaggtgttaaggtctgtttgcctacagtatacgctcaccctgaaggtgcccctttaacttctccaatttgcactgactggtatcctgctatcactatcagtgttggtgctgtaggacataatattgttgttgttgctacatctaatccttgttgcttatatgtccttggtgttagatcatcatcttcttaccagtacgagttgtatgcaacacatcatgtgcaattgcagtatgaagtatcatgcatatcaatcccacaagaggattgtatacatgataatgtatctttcagctgtggagagggtgatgacatttgtaagaacccccctcctaaagttaatgtttgcaagtttgctgttattggaactcatagaccttcagtggaaatcatctccttggaacctggagaagcattaagggtattaactattgggactgtatctgtgaataatgcacttggcgcacctatgagtggttgtatacctgaaaatgtcaggtttgttgcggctgagaggttttacattcttgcaggcttgagaaacggaatgctactcagatttgagtcagaaacacgtgattatctccctggttttctctacaaggactcttctattccttctgttaatacattccttcagttgatttcgatacggcgtattggaattactcctgtactgttagtgccaatacatgattcagctaatgctgacatcattgttctcagtgatagaccttggctattacatgcagcaagacatagcctggcatattcgtccatttcatttctttctgcttctcatgtcacacctgtttcatctgttgattgccccaatggtctactgtttgttgctgagagctgtttgcatttggttgaactggttcatgggaagcgattgaatgcacaaaagttttcaattggagggactccaaggaaagtgctataccataatgaaagcagaacactgttggtactgagaactgggctaaatggtgcatcgtcttcttcagatgttgtacaagtagatccacaaaatggggtattactttccagatataaatgtgaacctggcgaaacagcgaaatgcatgcaaattgcaaaaataggaaatgatcaagttttaattgttgggaccactaagtctgctggacggccgatgatgtcaaatggtgaagcagaaagcatcaagggacgcctgattgttttaagcttggaggccgttgaaagtcctcgtgagagcagttcgtttattccaacttttagttttaatccctcttcacattctggttctcctttccacgagattgttggatatacaactgaggaattttctagtaacagcatgtgcagcagtcctgatgagtttagctgcaaccagatccaagctgaacaaatgacagggcaattgagatcattgactcaatatatattgaatggcgcagttcttgctctgtgtccctatctagatcgttatgtgttggcagctgctggtaatatgatttatgtatttggtttcacaaatgaaaatccccacagaataaaaaagtgtgctgttggtaggacacgatttacaataacttgcctgaagacatttgcatcacgaattgctgttggtgattgtcgtgatggtgttctcttctattcttataatgagagtcataggaagttggaattggtctattctgatcctgctcatagattggtgggtgatattgctcttttaaattgtgaaactgctgtggtatcagatcgacgtgggagcatatctgtattatcatgcaccagattggaagtttcagaaagtccacagaagaacttagccgtgaattgttcattttatatgggtgaaacagccatgagcattcagaaggctgcattcaggtatcggcttccaattgatgatgatactgacccggtgcttgagacagtttacaactgtatcgtggcaagtaccatgttggggagtctctttgttatgattccactttcaagtgaggagcatcagcttttgcaagatgtccaagaaaaactctcagtacacccattaactgcaccggtcctgggaaatgatcatgcagagttccgtcagcgtggtaccccttcggtagtgcctcccattcttgacggtgatatgcttgtgcaattcttggagctcaccggtgaacaacagcaagccatccttactcatgctttgccagggaaggggcaacataggcccctctcggttttccaggttttgcaaacattagagcgcgtccattacgctcttaactgaggctttcttcaatcacagttactacaaggtttggatattagagctggttgaccttcattgtttgagatgccgtcagagctgaggttttagtgaccttcgcaatctagacggccgattccaagtctgccatgatatttatcagaacgtttgattgatgatgcaactggagcttgatactgggaagtctcatggtggcgagtatcccgtggaggcaccagattcgtcgaacctcctgtgtatatacagtcggccgcttttggtagactgttgtatggcgcattctgcatagaaacgaatattctttccgtttgtttcaatagataatgtaatgtttcttacgtcagctggtcggatgctcaacgagaaataagggaaacaatgaattgcattggccgtcctgctctatcacatgccattactgattagtgatgaatg

SEQ ID NO: 68140 - DNA, 4703 bp, Zea Mays
gtttggtttgttggtttggttccgctcagcggcgtcgctagttcgctgctggatccgctagtttaacttggcctcgttctccctgagccagaatccagaggctccgtccttcggctaggcgagatcacgtgtctgaatcaaccaaccaaaccctaacccttgcagaggctgcggatgaagccatccaccgccggcgacgcctctgcggcggcggcggcgtcctcttcggggccctctacctccgcgtcgacatccgcgtccacgtctaccgcggacgccacccactacatcgccaagcgggtgctccggggaagcgccgtgctccacgtcgccgagggctgcttccgctcgcccgactccgcggacgtcgtcctcgccaaggaaacttcactggagttggttgctgttggtgatgatggtgttttacagtcaatatgtgaacaagacatttttgggattataaaagatattggtgtattgcaatggcactctagacataatggtttaattccacagatagaatgcaaagatcttctggttgtcctttcagattctggaaagctttctcttctttacttttgttctgagatgcacaggttcttcgcaattgccaatattgagttatcgaaaccaggaaatctgaggcatcatctgggaagaattttagcgatagatcgagaatctaatttcgttgctgtcagttcatatgaggataagtttgcccttatacatgtttctgtttcccagagtggttctggcagcggtattatttctgagaagattttgaagatcttccatgtcataatttcagaaatatttttatccaccagaaaatgaagatgacgcaaggatcataacttcgtctaggaccagcatccgtggtacaatttggacaatgcgcttcatatctgtgccccaagatgaagaatactatccagttctggcaatgataattaacaggctctgatgtgaatgacttgtcgttatttggatatgactccagcagctgtgttatcaaccacctctctagttattcagaaattggacctttggtacttgacgtatcagaaattcctgaaacgtttggctttgcacttctgttgcgtgttggtgatgctttattgttggatcttagaaatccaacaaatgtctgctgtatccaaagagtcagcttgacgactaacctgattggagagccaatcactgttgaagatccctgtccaggattagatgttgatgatgatgtggctgcttgtgctttgctagaattgagagattctggtaataacataatgaaggatgatggttatatggacattgatggtgttgacagcagaagtaatgtgaaaccaaggatcgtttgctcgtggagctgggagccacctgaccctgtcaggcgaggatgtgcaaggcttctattttgtttggatgatggagaatttcatattttggaatttactttggatgttgaaggggcgaagctgtacacatttgaatatattgataggactttgccttgtagacctcttttttggatgaaaaacagaatgataatagggtttgtagagatgggggacggcatgatttttaaacttggtcaccgcaggttgcttcataaaagcactattcagaatgtagcaccaatattggatctagcaattgctgattaccatggtgagaaacaggaccagatgtttgcatgttgtggaatgtcccctgagggctctcttcgagttttaaggaatggtgtcaatgtggacagacttctgaaaactgaagctatttaccagggtgtcactggtttgtggactttgagaatgaaggcaactgatgcctaccattcttttcttgtgttgtcatttgtggaggaaaccagaatactgtcagtaggactaagttttaatgacatcagtgatgccgtgggattccagcctgatgtttgcactttagcatgtggtttggtggctgataatctgctagttcaaatttacagcaaaggtgttaaggtctgtttgcctacagtatacgctcaccctgaaggtgcccctttaacttctccaatttgcactgactggtatcctgctatcactatcagtgttggtgctgtaggacataatattgttgttgttgctacatctaatccttgttgcttatatgtccttggtgttagatcatcatcttcttaccagtacgagttgtatgcaacacatcatgtgcaattgcagtatgaagtatcatgcatatcaatcccacaagaggattgtatacatgataatgtatctttcagctgtggagagggtgatgacatttgtaagaacccccctcctaaagttaatgtttgcaagtttgctgttattggaactcatagaccttcagtggaaatcatctccttggaacctggagaagcattaagggtattaactattgggactgtatctgtgaataatgcacttggcgcacctatgagtggttgtatacctgaaaatgtcaggtttgttgcggctgagaggttttacattcttgcaggcttgagaaacggaatgctactcagatttgagtcagaaacacgtgattatctccctggttttctctacaaggactcttctattccttctgttaatacattccttcagttgatttcgatacggcgtattggaattactcctgtactgttagtgccaatacatgattcagctaatgctgacatcattgttctcagtgatagaccttggctattacatgcagcaagacatagcctggcatattcgtccatttcatttctttctgcttctcatgtcacacctgtttcatctgttgattgccccaatggtctactgtttgttgctgagagctgtttgcatttggttgaactggttcatgggaagcgattgaatgcacaaaagttttcaattggagggactccaaggaaagtgctataccataatgaaagcagaacactgttggtactgagaactgggctaaatggtgcatcgtcttcttcagatgttgtacaagtagatccacaaaatggggtattactttccagatataaatgtgaacctggcgaaacagcgaaatgcatgcaaattgcaaaaataggaaatgatcaagttttaattgttgggaccactaagtctgctggacggccgatgatgtcaaatggtgaagcagaaagcatcaagggacgcctgattgttttaagcttggaggccgttgaaagtcctcgtgagagcagttcgtttattccaacttttagttttaatccctcttcacattctggttctcctttccacgagattgttggatatacaactgaggaattttctagtaacagcatgtgcagcagtcctgatgagtttagctgcaaccagatccaagctgaacaaatgacagggcaattgagatcattgactcaatatatattgaatggcgcagttcttgctctgtgtccctatctagatcgttatgtgttggcagctgctggtaatatgatttatgtatttggtttcacaaatgaaaatccccacagaataaaaaagtgtgctgttggtaggacacgatttacaataacttgcctgaagacatttgcatcacgaattgctgttggtgattgtcgtgatggtgttctcttctattcttataatgagagtcataggaagttggaattggtctattctgatcctgctcatagattggtgggtgatattgctcttttaaattgtgaaactgctgtggtatcagatcgacgtgggagcatatctgtattatcatgcaccagattggaagtttcagaaagtccacagaagaacttagccgtgaattgttcattttatatgggtgaaacagccatgagcattcagaaggctgcattcaggtatcggcttccaattgatgatgatactgacccggtgcttgagacagtttacaactgtatcgtggcaagtaccatgttggggagtctctttgttatgattccactttcaagtgaggagcatcagcttttgcaagatgtccaagaaaaactctcagtacacccattaactgcaccggtcctgggaaatgatcatgcagagttccgtcagcgtggtaccccttcggtagtgcctcccattcttgacggtgatatgcttgtgcaattcttggagctcaccggtgaacaacagcaagccatccttactcatgctttgccagggaaggggcaacataggcccctctcggttttccaggttttgcaaacattagagcgcgtccattacgctcttaactgaggctttcttcaatcacagttactacaaggtttggatattagagctggttgaccttcattgtttgagatgccgtcagagctgaggttttagtgaccttcgcaatctagacggccgattccaagtctgccatgatatttatcagaacgtttgattgatgatgcaactggagcttgatactgggaagtctcatggtggcgagtatcccgtggaggcaccagattcgtcgaacctcctgtgtatatacagtcggccgcttttggtagactgttgtatggcgcattctgcatagaaacgaatattctttccgtttgtttcaatagataatgtaatgtttcttacgtcagctggtcggatgctcaacgagaaataagggaaacaatgaattgcattggccgtcctgctctatcacatgccattactgattagtgatgaatg

SEQ ID NO: 68141 - DNA, 4719 bp, Zea Mays
caacttttgttgcctgtttggtttgttggtttggttccgctcagcggcgtcgctagttcgctgctggatccgctagtttaacttggcctcgttctccctgagccagaatccagaggctccgtccttcggctaggcgagatcacgtgtctgaatcaaccaaccaaaccctaacccttgcagaggctgcggatgaagccatccaccgccggcgacgcctctgcggcggcggcggcgtcctcttcggggccctctacctccgcgtcgacatccgcgtccacgtctaccgcggacgccacccactacatcgccaagcgggtgctccggggaagcgccgtgctccacgtcgccgagggctgcttccgctcgcccgactccgcggacgtcgtcctcgccaaggaaacttcactggagttggttgctgttggtgatgatggtgttttacagtcaatatgtgaacaagacatttttgggattataaaagatattggtgtattgcaatggcactctagacataatggtttaattccacagaatgcaaagatcttctggttgtcctttcagattctggaaagctttctcttctttacttttgttctgagatgcacaggttcttcgcaattgccaatattgagttatcgaaaccaggaaatctgaggcatcatctgggaagaattttagcgatagatcgagaatctaatttcgttgctgtcagttcatatgaggataagtttgcccttatacatgtttctgtttcccagagtggttctggcagcggtattatttctgagaagattttgaagatcttccatgtcataatttcagaaatatttttatccaccagaaaatgaagatgacgcaaggatcataacttcgtctaggaccagcatccgtggtacaatttggacaatgcgcttcatatctgtgccccaagatgaagaatactatccagttctggcaatgataattaacaggaaaggctctgatgtgaatgacttgtcgttatttggatatgactccagcagctgtgttatcaaccacctctctagttattcagaaattggacctttggtacttgacgtatcagaaattcctgaaacgtttggctttgcacttctgttgcgtgttggtgatgctttattgttggatcttagaaatccaacaaatgtctgctgtatccaaagagtcagcttgacgactaacctgattggagagccaatcactgttgaagatccctgtccaggattagatgttgatgatgatgtggctgcttgtgctttgctagaattgagagattctggtaataacataatgaaggatgatggttatatggacattgatggtgttgacagcagaagtaatgtgaaaccaaggatcgtttgctcgtggagctgggagccacctgaccctgtcaggcgaggatgtgcaaggcttctattttgtttggatgatggagaatttcatattttggaatttactttggatgttgaaggggcgaagctgtacacatttgaatatattgataggactttgccttgtagacctcttttttggatgaaaaacagaatgataatagggtttgtagagatgggggacggcatgatttttaaacttggtcaccgcaggttgcttcataaaagcactattcagaatgtagcaccaatattggatctagcaattgctgattaccatggtgagaaacaggaccagatgtttgcatgttgtggaatgtcccctgagggctctcttcgagttttaaggaatggtgtcaatgtggacagacttctgaaaactgaagctatttaccagggtgtcactggtttgtggactttgagaatgaaggcaactgatgcctaccattcttttcttgtgttgtcatttgtggaggaaaccagaatactgtcagtaggactaagttttaatgacatcagtgatgccgtgggattccagcctgatgtttgcactttagcatgtggtttggtggctgataatctgctagttcaaatttacagcaaaggtgttaaggtctgtttgcctacagtatacgctcaccctgaaggtgcccctttaacttctccaatttgcactgactggtatcctgctatcactatcagtgttggtgctgtaggacataatattgttgttgttgctacatctaatccttgttgcttatatgtccttggtgttagatcatcatcttcttaccagtacgagttgtatgcaacacatcatgtgcaattgcagtatgaagtatcatgcatatcaatcccacaagaggattgtatacatgataatgtatctttcagctgtggagagggtgatgacatttgtaagaacccccctcctaaagttaatgtttgcaagtttgctgttattggaactcatagaccttcagtggaaatcatctccttggaacctggagaagcattaagggtattaactattgggactgtatctgtgaataatgcacttggcgcacctatgagtggttgtatacctgaaaatgtcaggtttgttgcggctgagaggttttacattcttgcaggcttgagaaacggaatgctactcagatttgagtcagaaacacgtgattatctccctggttttctctacaaggactcttctattccttctgttaatacattccttcagttgatttcgatacggcgtattggaattactcctgtactgttagtgccaatacatgattcagctaatgctgacatcattgttctcagtgatagaccttggctattacatgcagcaagacatagcctggcatattcgtccatttcatttctttctgcttctcatgtcacacctgtttcatctgttgattgccccaatggtctactgtttgttgctgagagctgtttgcatttggttgaactggttcatgggaagcgattgaatgcacaaaagttttcaattggagggactccaaggaaagtgctataccataatgaaagcagaacactgttggtactgagaactgggctaaatggtgcatcgtcttcttcagatgttgtacaagtagatccacaaaatggggtattactttccagatataaatgtgaacctggcgaaacagcgaaatgcatgcaaattgcaaaaataggaaatgatcaagttttaattgttgggaccactaagtctgctggacggccgatgatgtcaaatggtgaagcagaaagcatcaagggacgcctgattgttttaagcttggaggccgttgaaagtcctcgtgagagcagttcgtttattccaacttttagttttaatccctcttcacattctggttctcctttccacgagattgttggatatacaactgaggaattttctagtaacagcatgtgcagcagtcctgatgagtttagctgcaaccagatccaagctgaacaaatgacagggcaattgagatcattgactcaatatatattgaatggcgcagttcttgctctgtgtccctatctagatcgttatgtgttggcagctgctggtaatatgatttatgtatttggtttcacaaatgaaaatccccacagaataaaaaagtgtgctgttggtaggacacgatttacaataacttgcctgaagacatttgcatcacgaattgctgttggtgattgtcgtgatggtgttctcttctattcttataatgagagtcataggaagttggaattggtctattctgatcctgctcatagattggtgggtgatattgctcttttaaattgtgaaactgctgtggtatcagatcgacgtgggagcatatctgtattatcatgcaccagattggaagtttcagaaagtccacagaagaacttagccgtgaattgttcattttatatgggtgaaacagccatgagcattcagaaggctgcattcaggtatcggcttccaattgatgatgatactgacccggtgcttgagacagtttacaactgtatcgtggcaagtaccatgttggggagtctctttgttatgattccactttcaagtgaggagcatcagcttttgcaagatgtccaagaaaaactctcagtacacccattaactgcaccggtcctgggaaatgatcatgcagagttccgtcagcgtggtaccccttcggtagtgcctcccattcttgacggtgatatgcttgtgcaattcttggagctcaccggtgaacaacagcaagccatccttactcatgctttgccagggaaggggcaacataggcccctctcggttttccaggttttgcaaacattagagcgcgtccattacgctcttaactgaggctttcttcaatcacagttactacaaggtttggatattagagctggttgaccttcattgtttgagatgccgtcagagctgaggttttagtgaccttcgcaatctagacggccgattccaagtctgccatgatatttatcagaacgtttgattgatgatgcaactggagcttgatactgggaagtctcatggtggcgagtatcccgtggaggcaccagattcgtcgaacctcctgtgtatatacagtcggccgcttttggtagactgttgtatggcgcattctgcatagaaacgaatattctttccgtttgtttcaatagataatgtaatgtttcttacgtcagctggtcggatgctcaacgagaaataagggaaacaatgaattgcattggccgtcctgctctatcacatgccattactgattagtgatgaatg

SEQ ID NO: 68142 - DNA, 5582 bp, Zea Mays
ccattttcaacttttgttgcctgtttggtttgttggtttggttccgctcagcggcgtcgctagttcgctgctggatccgctagtttaacttggcctcgttctccctgagccagaatccagaggctccgtccttcggctaggcgagatcacgtgtctgaatcaaccaaccaaaccctaacccttgcagaggctgcggatgaagccatccaccgccggcgacgcctctgcggcggcggcggcgtcctcttcggggccctctacctccgcgtcgacatccgcgtccacgtctaccgcggacgccacccactacatcgccaagcgggtgctccggggaagcgccgtgctccacgtcgccgagggctgcttccgctcgcccgactccgcggacgtcgtcctcgccaaggaaacttcactggagttggttgctgttggtgatgatggtgttttacagtcaatatgtgaacaagacatttttgggattataaaagatattggtgtattgcaatggcactctagacataatggtttaattccacagatagaatgcaaagatcttctggttgtcctttcagattctggaaagctttctcttctttacttttgttctgagatgcacaggttcttcgcaattgccaatattgagttatcgaaaccaggaaatctgaggcatcatctgggaagaattttagcgatagatcgagaatctaatttcgttgctgtcagttcatatgaggataagtttgcccttatacatgtttctgtttcccagagtggttctggcagcggtattatttctgagaagaaatatttttatccaccagaaaatgaagatgacgcaaggatcataacttcgtctaggaccagcatccgtggtacaatttggacaatgcgcttcatatctgtgccccaagatgaagaatactatccagttctggcaatgataattaacaggaaaggctctgatgtgaatgacttgtcgttatttggatatgactccagcagctgtgttatcaaccacctctctagttattcagaaattggacctttggtacttgacgtatcagaaattcctgaaacgtttggctttgcacttctgttgcgtgttggtgatgctttattgttggatcttagaaatccaacaaatgtctgctgtatccaaagagtcagcttgacgactaacctgattggagagccaatcactgttgaagatccctgtccaggattagatgttgatgatgatgtggctgcttgtgctttgctagaattgagagattctggtaataacataatgaaggatgatggttatatggacattgatggtgttgacagcagaagtaatgtgaaaccaaggatcgtttgctcgtggagctgggagccacctgaccctgtcaggcgaggatgtgcaaggcttctattttgtttggatgatggagaatttcatattttggaatttactttggatgttgaaggggcgaagctgtacacatttgaatatattgataggactttgccttgtagacctcttttttggatgaaaaacagaatgataatagggtttgtagagatgggggacggcatgatttttaaacttggtcaccgcaggttgcttcataaaagcactattcagaatgtagcaccaatattggatctagcaattgctgattaccatggtgagaaacaggaccagatgtttgcatgttgtggaatgtcccctgagggctctcttcgagttttaaggaatggtgtcaatgtggacagacttctgaaaactgaagctatttaccagggtgtcactggtttgtggactttgagaatgaaggcaactgatgcctaccattcttttcttgtgttgtcatttgtggaggaaaccagaatactgtcagtaggactaagttttaatgacatcagtgatgccgtgggattccagcctgatgtttgcactttagcatgtggtttggtggctgataatctgctagttcaaatttacagcaaaggtgttaaggtctgtttgcctacagtatacgctcaccctgaaggtgcccctttaacttctccaatttgcactgactggtatcctgctatcactatcagtgttggtgctgtaggacataatattgttgttgttgctacatctaatccttgttgcttatatgtccttggtgttagatcatcatcttcttaccagtacgagttgtatgcaacacatcatgtgcaattgcagtatgaagtatcatgcatatcaatcccacaagaggattgtatacatgataatgtatctttcagctgtggagagggtgatgacatttgtaagaacccccctcctaaagttaatgtttgcaagtttgctgttattggaactcatagaccttcagtggaaatcatctccttggaacctggagaagcattaagggtattaactattgggactgtatctgtgaataatgcacttggcgcacctatgagtggttgtatacctgaaaatgtcaggtttgttgcggctgagaggttttacattcttgcaggcttgagaaacggaatgctactcagatttgagtcagaaacacgtgattatctccctggttttctctacaaggactcttctattccttctgttaatacattccttcagttgatttcgatacggcgtattggaattactcctgtactgttagtgccaatacatgattcagctaatgctgacatcattgttctcagtgatagaccttggctattacatgcagcaagacatagcctggcatattcgtccatttcatttctttctgcttctcatgtcacacctgtttcatctgttgattgccccaatggtctactgtttgttgctgagagctgtttgcatttggttgaactggttcatgggaagcgattgaatgcacaaaagttttcaattggagggactccaaggaaagtgctataccataatgaaagcagaacactgttggtactgagaactgggctaaatggtgcatcgtcttcttcagatgttgtacaagtagatccacaaaatggggtattactttccagatataaatgtgaacctggcgaaacagcgaaatgcatgcaaattgcaaaaataggaaatgatcaagttttaattgttgggaccactaagtctgctggacggccgatgatgtcaaatggtgaagcagaaagcatcaagggacgcctgattgttttaagcttggaggccgttgaaagtcctcgtgagagcagttcgtttattccaacttttagttttaatccctcttcacattctggttctcctttccacgagattgttggatatacaactgaggaattttctagtaacagcatgtgcagcagtcctgatgagtttagctgcaaccagatccaagctgaacaaatgacagggcaattgagatcattgactcaatatatattgaatggcgcagttcttgctctgtgtccctatctagatcgttatgtgttggcagctgctggtaatatggtatgatgcctatatgctgtttttactatattttctttaaaaaaattccttaaagggagctgaactctcctatgacaaattatctaaaagggaattagtaatgacagaatagtggctaaggcccttagtgggcttgcccagtatgggcatagggttttgtactgtgccatcagattttgggcccagctgcataatgattgtttctttgacaggcaaggttttcccctgacggatatgtttctataaaccccccgggatcttgcctatatctgtgtaccatacccactgcaaccaatcaatccagtatagatgatgttgcctatatttgtataccttgcccatcacaatcaattaatctactatatttcacgagtctgaaatggccagtgattcttctgctgccctcacatgcctttgcggctgcacatccctttcctacgtgtctccgtggcagcgccctttcccgcacgaagtcaacatttatgttggagaataaggatgttgtgtgtccttgccctcatgatctttggacattatcaaatgagatgcccagatttatggcttagcttcttaatgcaatagtaatataatatgcagctctcattgtgttcattgttcaattgcaaagaaggaacaagtctattttggccatcaaactatagcccaggtctgatcttttggccaccaagctccaaaacgggcatctttgtttatggaactctctagtccttgtcttttttggccaccaagcttcaaaacgggcattttttattcatttcttgtttcatatctttgcgatgctaatgaattaataccctttggccttgtttagttgactgcaattgcttatggaagctaacatttgtttacttatttttgacagatttatgtatttggtttcacaaatgaaaatccccacagaataaaaaagtgtgctgttggtaggacacgatttacaataacttgcctgaagacatttgcatcacgaattgctgttggtgattgtcgtgatggtgttctcttctattcttataatgagagtcataggaagttggaattggtctattctgatcctgctcatagattggtgggtgatattgctcttttaaattgtgaaactgctgtggtatcagatcgacgtgggagcatatctgtattatcatgcaccagattggaagtttcagaaagtccacagaagaacttagccgtgaattgttcattttatatgggtgaaacagccatgagcattcagaaggctgcattcaggtatcggcttccaattgatgatgatactgacccggtgcttgagacagtttacaactgtatcgtggcaagtaccatgttggggagtctctttgttatgattccactttcaagtgaggagcatcagcttttgcaagatgtccaagaaaaactctcagtacacccattaactgcaccggtcctgggaaatgatcatgcagagttccgtcagcgtggtaccccttcggtagtgcctcccattcttgacggtgatatgcttgtgcaattcttggagctcaccggtgaacaacagcaagccatccttactcatgctttgccagggaaggggcaacataggcccctctcggttttccaggttttgcaaacattagagcgcgtccattacgctcttaactgaggctttcttcaatcacagttactacaaggtttggatattagagctggttgaccttcattgtttgagatgccgtcagagctgaggttttagtgaccttcgcaatctagacggccgattccaagtctgccatgatatttatcagaacgtttgattgatgatgcaactggagcttgatactgggaagtctcatggtggcgagtatcccgtggaggcaccagattcgtcgaacctcctgtgtatatacagtcggccgcttttggtagactgttgtatggcgcattctgcatagaaacgaatattctttccgtttgtttcaatagataatgtaatgtttcttacgtcagctggtcggatgctcaacgagaaataagggaaacaatgaattgcattggccgtcctgctctatcacatgccattactgattagtgatgaatg

SEQ ID NO: 68143 - DNA, 4588 bp, Zea Mays
cccattttcaacttttgttgcctgtttggtttgttggtttggttccgctcagcggcgtcgctagttcgctgctggatccgctagtttaacttggcctcgttctccctgagccagaatccagaggctccgtccttcggctaggcgagatcacgtgtctgaatcaaccaaccaaaccctaacccttgcagaggctgcggatgaagccatccaccgccggcgacgcctctgcggcggcggcggcgtcctcttcggggccctctacctccgcgtcgacatccgcgtccacgtctaccgcggacgccacccactacatcgccaagcgggtgctccggggaagcgccgtgctccacgtcgccgagggctgcttccgctcgcccgactccgcggacgtcgtcctcgccaaggaaacttcactggagttggttgctgttggtgatgatggtgttttacagtcaatatgtgaacaagacatttttgggattataaaagatattggtgtattgcaatggcactctagacataatggtttaattccacagatagaatgcaaagatcttctggttgtcctttcagattctggaaagctttctcttctttacttttgttctgagatgcacaggttcttcgcaattgccaatattgagttatcgaaaccaggaaatctgaggcatcatctgggaagaattttagcgatagatcgagaatctaatttcgttgctgtcagttcatatgaggataagtttgcccttatacatgtttctgtttcccagagtggttctggcagcggtattatttctgagaagaaatatttttatccaccagaaaatgaagatgacgcaaggatcataacttcgtctaggaccagcatccgtggtacaatttggacaatgcgcttcatatctgtgccccaagatgaagaatactatccagttctggcaatgataattaacaggaaaggctctgatgtgaatgacttgtcgttatttggatatgactccagcagctgtgttatcaaccacctctctagttattcagaaattggacctttggtacttgacgtatcagaaattcctgaaacgtttggctttgcacttctgttgcgtgttggtgatgctttattgttggatcttagaaatccaacaaatgtctgctgtatccaaagagtcagcttgacgactaacctgattggagagccaatcactgttgaagatccctgtccaggattagatgttgatgatgatgtggctgcttgtgctttgctagaattgagagattctggtaataacataatgaaggatgatggttatatggacattgatggtgttgacagcagaagtaatgtgaaaccaaggatcgtttgctcgtggagctgggagccacctgaccctgtcaggcgaggatgtgcaaggcttctattttgtttggatgatggagaatttcatattttggaatttactttggatgttgaaggggcgaagctgtacacatttgaatatattgataggactttgccttgtagacctcttttttggatgaaaaacagaatgataatagggtttgtagagatgggggacggcatgatttttaaacttggtcaccgcaggttgcttcataaaagcactattcagaatgtagcaccaatattggatctagcaattgctgattaccatggtgagaaacaggaccagatgtttgcatgttgtggaatgtcccctgagggctctcttcgagttttaaggaatggtgtcaatgtggacagacttctgaaaactgaagctatttaccagggtgtcactggtttgtggactttgagaatgaaggcaactgatgcctaccattcttttcttgtgttgtcatttgtggaggaaaccagaatactgtcagtaggactaagttttaatgacatcagtgatgccgtgggattccagcctgatgtttgcactttagcatgtggtttggtggctgataatctgctagttcaaatttacagcaaaggtgttaaggtctgtttgcctacagtatacgctcaccctgaaggtgcccctttaacttctccaatttgcactgactggtatcctgctatcactatcagtgttggtgctgtaggacataatattgttgttgttgctacatctaatccttgttgcttatatgtccttggtgttagatcatcatcttcttaccagtacgagttgtatgcaacacatcatgtgcaattgcagtatgaagtatcatgcatatcaatcccacaagaggattgtatacatgataatgtatctttcagctgtggagagggtgatgacatttgtaagaacccccctcctaaagttaatgtttgcaagtttgctgttattggaactcatagaccttcagtggaaatcatctccttggaacctggagaagcattaagggcttgagaaacggaatgctactcagatttgagtcagaaacacgtgattatctccctggttttctctacaaggactcttctattccttctgttaatacattccttcagttgatttcgatacggcgtattggaattactcctgtactgttagtgccaatacatgattcagctaatgctgacatcattgttctcagtgatagaccttggctattacatgcagcaagacatagcctggcatattcgtccatttcatttctttctgcttctcatgtcacacctgtttcatctgttgattgccccaatggtctactgtttgttgctgagagctgtttgcatttggttgaactggttcatgggaagcgattgaatgcacaaaagttttcaattggagggactccaaggaaagtgctataccataatgaaagcagaacactgttggtactgagaactgggctaaatggtgcatcgtcttcttcagatgttgtacaagtagatccacaaaatggggtattactttccagatataaatgtgaacctggcgaaacagcgaaatgcatgcaaattgcaaaaataggaaatgatcaagttttaattgttgggaccactaagtctgctggacggccgatgatgtcaaatggtgaagcagaaagcatcaagggacgcctgattgttttaagcttggaggccgttgaaagtcctcgtgagagcagttcgtttattccaacttttagttttaatccctcttcacattctggttctcctttccacgagattgttggatatacaactgaggaattttctagtaacagcatgtgcagcagtcctgatgagtttagctgcaaccagatccaagctgaacaaatgacagggcaattgagatcattgactcaatatatattgaatggcgcagttcttgctctgtgtccctatctagatcgttatgtgttggcagctgctggtaatatgatttatgtatttggtttcacaaatgaaaatccccacagaataaaaaagtgtgctgttggtaggacacgatttacaataacttgcctgaagacatttgcatcacgaattgctgttggtgattgtcgtgatggtgttctcttctattcttataatgagagtcataggaagttggaattggtctattctgatcctgctcatagattggtgggtgatattgctcttttaaattgtgaaactgctgtggtatcagatcgacgtgggagcatatctgtattatcatgcaccagattggaagtttcagaaagtccacagaagaacttagccgtgaattgttcattttatatgggtgaaacagccatgagcattcagaaggctgcattcaggtatcggcttccaattgatgatgatactgacccggtgcttgagacagtttacaactgtatcgtggcaagtaccatgttggggagtctctttgttatgattccactttcaagtgaggagcatcagcttttgcaagatgtccaagaaaaactctcagtacacccattaactgcaccggtcctgggaaatgatcatgcagagttccgtcagcgtggtaccccttcggtagtgcctcccattcttgacggtgatatgcttgtgcaattcttggagctcaccggtgaacaacagcaagccatccttactcatgctttgccagggaaggggcaacataggcccctctcggttttccaggttttgcaaacattagagcgcgtccattacgctcttaactgaggctttcttcaatcacagttactacaaggtttggatattagagctggttgaccttcattgtttgagatgccgtcagagctgaggttttagtgaccttcgcaatctagacggccgattccaagtctgccatgatatttatcagaacgtttgattgatgatgcaactggagcttgatactgggaagtctcatggtggcgagtatcccgtggaggcaccagattcgtcgaacctcctgtgtatatacagtcggccgcttttggtagactgttgtatggcgcattctgcatagaaacgaatattctttccgtttgtttcaatagataatgtaatgtttcttacgtcagctggtcggatgctcaacgagaaataagggaaacaatgaattgcattggccgtcctgctctatcacatgccattactgattagtgatgaatg

SEQ ID NO: 68144 - DNA, 4814 bp, Zea Mays
ctcgactcgactcgtttggtttcaagacctataataacatattgggaactaggggataatgtcgtactgaattcgtgtaaattattattatgttaggatagaatagaaatcatttactattggtaggtatgatcccattttcaacttttgttgcctgtttggtttgttggtttggttccgctcagcggcgtcgctagttcgctgctggatccgctagtttaacttggcctcgttctccctgagccagaatccagaggctccgtccttcggctaggcgagatcacgtgtctgaatcaaccaaccaaaccctaacccttgcagaggctgcggatgaagccatccaccgccggcgacgcctctgcggcggcggcggcgtcctcttcggggccctctacctccgcgtcgacatccgcgtccacgtctaccgcggacgccacccactacatcgccaagcgggtgctccggggaagcgccgtgctccacgtcgccgagggctgcttccgctcgcccgactccgcggacgtcgtcctcgccaaggaaacttcactggagttggttgctgttggtgatgatggtgttttacagtcaatatgtgaacaagacatttttgggattataaaagatattggtgtattgcaatggcactctagacataatggtttaattccacagatagaatgcaaagatcttctggttgtcctttcagattctggaaagctttctcttctttacttttgttctgagatgcacaggttcttcgcaattgccaatattgagttatcgaaaccaggaaatctgaggcatcatctgggaagaattttagcgatagatcgagaatctaatttcgttgctgtcagttcatatgaggataagtttgcccttatacatgtttctgtttcccagagtggttctggcagcggtattatttctgagaagaaaatgaagatgacgcaaggatcataacttcgtctaggaccagcatccgtggtacaatttggacaatgcgcttcatatctgtgccccaagatgaagaatactatccagttctggcaatgataattaacaggaaaggctctgatgtgaatgacttgtcgttatttggatatgactccagcagctgtgttatcaaccacctctctagttattcagaaattggacctttggtacttgacgtatcagaaattcctgaaacgtttggctttgcacttctgttgcgtgttggtgatgctttattgttggatcttagaaatccaacaaatgtctgctgtatccaaagagtcagcttgacgactaacctgattggagagccaatcactgttgaagatccctgtccaggattagatgttgatgatgatgtggctgcttgtgctttgctagaattgagagattctggtaataacataatgaaggatgatggttatatggacattgatggtgttgacagcagaagtaatgtgaaaccaaggatcgtttgctcgtggagctgggagccacctgaccctgtcaggcgaggatgtgcaaggcttctattttgtttggatgatggagaatttcatattttggaatttactttggatgttgaaggggcgaagctgtacacatttgaatatattgataggactttgccttgtagacctcttttttggatgaaaaacagaatgataatagggtttgtagagatgggggacggcatgatttttaaacttggtcaccgcaggttgcttcataaaagcactattcagaatgtagcaccaatattggatctagcaattgctgattaccatggtgagaaacaggaccagatgtttgcatgttgtggaatgtcccctgagggctctcttcgagttttaaggaatggtgtcaatgtggacagacttctgaaaactgaagctatttaccagggtgtcactggtttgtggactttgagaatgaaggcaactgatgcctaccattcttttcttgtgttgtcatttgtggaggaaaccagaatactgtcagtaggactaagttttaatgacatcagtgatgccgtgggattccagcctgatgtttgcactttagcatgtggtttggtggctgataatctgctagttcaaatttacagcaaaggtgttaaggtctgtttgcctacagtatacgctcaccctgaaggtgcccctttaacttctccaatttgcactgactggtatcctgctatcactatcagtgttggtgctgtaggacataatattgttgttgttgctacatctaatccttgttgcttatatgtccttggtgttagatcatcatcttcttaccagtacgagttgtatgcaacacatcatgtgcaattgcagtatgaagtatcatgcatatcaatcccacaagaggattgtatacatgataatgtatctttcagctgtggagagggtgatgacatttgtaagaacccccctcctaaagttaatgtttgcaagtttgctgttattggaactcatagaccttcagtggaaatcatctccttggaacctggagaagcattaagggtattaactattgggactgtatctgtgaataatgcacttggcgcacctatgagtggttgtatacctgaaaatgtcaggtttgttgcggctgagaggttttacattcttgcaggcttgagaaacggaatgctactcagatttgagtcagaaacacgtgattatctccctggttttctctacaaggactcttctattccttctgttaatacattccttcagttgatttcgatacggcgtattggaattactcctgtactgttagtgccaatacatgattcagctaatgctgacatcattgttctcagtgatagaccttggctattacatgcagcaagacatagcctggcatattcgtccatttcatttctttctgcttctcatgtcacacctgtttcatctgttgattgccccaatggtctactgtttgttgctgagagctgtttgcatttggttgaactggttcatgggaagcgattgaatgcacaaaagttttcaattggagggactccaaggaaagtgctataccataatgaaagcagaacactgttggtactgagaactgggctaaatggtgcatcgtcttcttcagatgttgtacaagtagatccacaaaatggggtattactttccagatataaatgtgaacctggcgaaacagcgaaatgcatgcaaattgcaaaaataggaaatgatcaagttttaattgttgggaccactaagtctgctggacggccgatgatgtcaaatggtgaagcagaaagcatcaagggacgcctgattgttttaagcttggaggccgttgaaagtcctcgtgagagcagttcgtttattccaacttttagttttaatccctcttcacattctggttctcctttccacgagattgttggatatacaactgaggaattttctagtaacagcatgtgcagcagtcctgatgagtttagctgcaaccagatccaagctgaacaaatgacagggcaattgagatcattgactcaatatatattgaatggcgcagttcttgctctgtgtccctatctagatcgttatgtgttggcagctgctggtaatatgatttatgtatttggtttcacaaatgaaaatccccacagaataaaaaagtgtgctgttggtaggacacgatttacaataacttgcctgaagacatttgcatcacgaattgctgttggtgattgtcgtgatggtgttctcttctattcttataatgagagtcataggaagttggaattggtctattctgatcctgctcatagattggtgggtgatattgctcttttaaattgtgaaactgctgtggtatcagatcgacgtgggagcatatctgtattatcatgcaccagattggaagtttcagaaagtccacagaagaacttagccgtgaattgttcattttatatgggtgaaacagccatgagcattcagaaggctgcattcaggtatcggcttccaattgatgatgatactgacccggtgcttgagacagtttacaactgtatcgtggcaagtaccatgttggggagtctctttgttatgattccactttcaagtgaggagcatcagcttttgcaagatgtccaagaaaaactctcagtacacccattaactgcaccggtcctgggaaatgatcatgcagagttccgtcagcgtggtaccccttcggtagtgcctcccattcttgacggtgatatgcttgtgcaattcttggagctcaccggtgaacaacagcaagccatccttactcatgctttgccagggaaggggcaacataggcccctctcggttttccaggttttgcaaacattagagcgcgtccattacgctcttaactgaggctttcttcaatcacagttactacaaggtttggatattagagctggttgaccttcattgtttgagatgccgtcagagctgaggttttagtgaccttcgcaatctagacggccgattccaagtctgccatgatatttatcagaacgtttgattgatgatgcaactggagcttgatactgggaagtctcatggtggcgagtatcccgtggaggcaccagattcgtcgaacctcctgtgtatatacagtcggccgcttttggtagactgttgtatggcgcattctgcatagaaacgaatattctttccgtttgtttcaatagataatgtaatgtttcttacgtcagctggtcggatgctcaacgagaaataagggaaacaatgaattgcattggccgtcctgctctatcacatgccattactgattagtgatgaatg

SEQ ID NO: 68145 - DNA, 3951 bp, Zea Mays
gagccagaatccagaggctccgtccttcggctaggcgagatcacgtgtctgaatcaaccaaccaaaccctaacccttgcagaggctgcggatgaagccatccaccgccggcgacgcctctgcggcggcggcggcgtcctcttcggggccctctacctccgcgtcgacatccgcgtccacgtctaccgcggacgccacccactacatcgccaagcgggtgctccggggaagcgccgtgctccacgtcgccgagggctgcttccgctcgcccgactccgcggacgtcgtcctcgccaaggaaacttcactggagttggttgctgttggtgatgatggtgttttacagtcaatatgtgaacaagacatttttgggattataaaagatattggtgtattgcaatggcactctagacataatggtttaattccacagatagaatgcaaagatcttctggttgtcctttcagattctggaaagctttctcttctttacttttgttctgagatgcacaggttcttcgcaattgccaatattgagttatcgaaaccaggaaatctgaggcatcatctgggaagaattttagcgatagatcgagaatctaatttcgttgctgtcagttcatatgaggataagtttgcccttatacatgtttctgtttcccagagtggttctggcagcggtattatttctgagaagattttgaagatcttccatgtcataatttcagaaatatttttatccaccagaaaatgaagatgacgcaaggatcataacttcgtctaggaccagcatccgtggtacaatttggacaatgcgcttcatatctgtgccccaagatgaagaatactatccagttctggcaatgataattaacaggaaaggctctgatgtgaatgacttgtcgttatttggatatgactccagcagctgtgttatcaaccacctctctagttattcagaaattggacctttggtacttgacgtatcagaaattcctgaaacgtttggctttgcacttctgttgcgtgttggtgatgctttattgttggatcttagaaatccaacaaatgtctgctgtatccaaagagtcagcttgacgactaacctgattggagagccaatcactgttgaagatccctgtccaggattagatgttgatgatgatgtggctgcttgtgctttgctagaattgagagattctggtaataacataatgaaggatgatggttatatggacattgatggtgttgacagcagaagtaatgtgaaaccaaggatcgtttgctcgtggagctgggagccacctgaccctgtcaggcgaggatgtgcaaggcttctattttgtttggatgatggagaatttcatattttggaatttactttggatgttgaaggggcgaagctgtacacatttgaatatattgataggactttgccttgtagacctcttttttggatgaaaaacagaatgataatagggtttgtagagatgggggacggcatgatttttaaacttggtcaccgcaggttgcttcataaaagcactattcagaatgtagcaccaatattggatctagcaattgctgattaccatggtgagaaacaggaccagatgtttgcatgttgtggaatgtcccctgagggctctcttcgagttttaaggaatggtgtcaatgtggacagacttctgaaaactgaagctatttaccagggtgtcactggtttgtggactttgagaatgaaggcaactgatgcctaccattcttttcttgtgttgtcatttgtggaggaaaccagaatactgtcagtaggactaagttttaatgacatcagtgatgccgtgggattccagcctgatgtttgcactttagcatgtggtttggtggctgataatctgctagttcaaatttacagcaaaggtgttaaggtctgtttgcctacagtatacgctcaccctgaaggtgcccctttaacttctccaatttgcactgactggtatcctgctatcactatcagtgttggtgctgtaggacataatattgttgttgttgctacatctaatccttgttgcttatatgtccttggtgttagatcatcatcttcttaccagtacgagttgtatgcaacacatcatgtgcaattgcagtatgaagtatcatgcatatcaatcccacaagaggattgtatacatgataatgtatctttcagctgtggagagggtgatgacatttgtaagaacccccctcctaaagttaatgtttgcaagtttgctgttattggaactcatagaccttcagtggaaatcatctccttggaacctggagaagcattaagggtattaactattgggactgtatctgtgaataatgcacttggcgcacctatgagtggttgtatacctgaaaatgtcaggtttgttgcggctgagaggttttacattcttgcaggcttgagaaacggaatgctactcagatttgagtcagaaacacgtgattatctccctggttttctctacaaggactcttctattccttctgttaatacattccttcagttgatttcgatacggcgtattggaattactcctgtactgttagtgccaatacatgattcagctaatgctgacatcattgttctcagtgatagaccttggctattacatgcagcaagacatagcctggcatattcgtccatttcatttctttctgcttctcatgtcacacctgtttcatctgttgattgccccaatggtctactgtttgttgctgagagctgtttgcatttggttgaactggttcatgggaagcgattgaatgcacaaaagttttcaattggagggactccaaggaaagtgctataccataatgaaagcagaacactgttggtactgagaactgggctaaatggtgcatcgtcttcttcagatgttgtacaagtagatccacaaaatggggtattactttccagatataaatgtgaacctggcgaaacagcgaaatgcatgcaaattgcaaaaataggaaatgatcaagttttaattgttgggaccactaagtctgctggacggccgatgatgtcaaatggtgaagcagaaagcatcaagggacgcctgattgttttaagcttggaggccgttgaaagtcctcgtgagagcagttcgtttattccaacttttagttttaatccctcttcacattctggttctcctttccacgagattgttggatatacaactgaggaattttctagtaacagcatgtgcagcagtcctgatgagtttagctgcaaccagatccaagctgaacaaatgacagggcaattgagatcattgactcaatatatattgaatggcgcagttcttgctctgtgtccctatctagatcgttatgtgttggcagctgctggtaatatgatttatgtatttggtttcacaaatgaaaatccccacagaataaaaaagtgtgctgttggtaggacacgatttacaataacttgcctgaagacatttgcatcacgaattgctgttggtgattgtcgtgatggtgttctcttctattcttataatgagagtcataggaagttggaattggtctattctgatcctgctcatagattggtgggtgatattgctcttttaaattgtgaaactgctgtggtatcagatcgacgtgggagcatatctgtattatcatgcaccagattggaagtttcagaaagtccacagaagaacttagccgtgaattgttcattttatatgggtgaaacagccatgagcattcagaaggctgcattcaggtatcggcttccaattgatgatgatactgacccggtgcttgagacagtttacaactgtatcgtggcaagtaccatgttggggagtctctttgttatgattccactttcaagggtaaatgtaaatatgaagattatcattctgagagcagttagaag

SEQ ID NO: 68146 - DNA, 1586 bp, Zea Mays
  misc_feature (1)..(1): n is a, c, g, or t
nttttgtgtgctttcattttctgttgaatcctctgaagtgtttggcaaatggtgtgatacaatctaaaatataaaatatagagctacttctatcatagtagttgattgatatctggtgttacaaactgcttaattatcttttcctttcgggaagccagttgtttgaccagtggttgatctagaaaatgggttggccaatgactaatctttgatatttggtgatacaagctgcctattttttttgttttgttttggggaagccagttgtttgaagggcaagtcagatgcagagctgtctcactgaatcactaggtcatgagatcaaattagtctctctgcatttttttgggaagacttctctcagtttatcccttctccagattccacttatgtgggagcctccgcagggtcagaactttgtgaagccagttgtttgtgccaatggttgatcttgaatatggattgaccaatgactataacttttgtttgtgagtatatgtggaataaccatgtttattcttctcaggaaattgaactaattccagttttatataaactttaataatcctatgttctgattatacgaatatgtcaggttttttgcgattcatataacttctagtattcatttatgaaaacccgctattagtagtattatgcagctcatctccttggagttcaatgagtggagtgctgcaggagccagagggctccatggttgtccttaggtgtttaaagggttgcgggtcggagcagtgttaatgacctcaaggtgtctgcagaggtctgcatgcctctgataaatgctatcgtgactgagatcaagaatgggacttaccctcaaggatcattcttgaatgtagatgtacctacagatgctgcacaccccaagggctacaaaattacaaaacaaggaacatatatggccagaattagttgggagcagacggtttacaagaagcctgcagtagaaagttaccagacagcaaacatggatgttgatggtgaaaaggatagcgaactagttacttcagaaaatgacctactgtttaagagagtgattgtagggagaagttccaatggagtggaaggagaggaaacggaccacaattccctagttgatggatatatcactgttactcctttgggtgctctttcccgcacagaaccagacgccataccgtatttcaaagcttgtgtctcacgtctggttgataatttctcttctcctggctcttctttttctagaagcagaggatgagccatgaaatttctaaagctgtttatttatggccatgatcaagttccatattgctttttcctaacccatacatggttaccatacatgggcaatattgccattcatgctacctgaatgttattactgcaatcagcatgtgtattctgcttcatagcctatgtcagaattatgcattcacaaatggttgcccgcttctttaccatgcatcttgtaagaaaaataggttcatttacaaatttattttggtgtttaatattcaacaagagcatttgaactaacatcatttgttagtattcttgcttatagtttaaaggatatatatacc

SEQ ID NO: 68147 - DNA, 1394 bp, Zea Mays
cggaaaaaaaatcccattatggacggcgactggtactttttgttcgcggggacggcgactggtactttttgtcgctgcggagacggggagtcttccgactcttccccaacgggaattcctcattcacatccctacgcacgaacggaaacgccccatgctgcgctcgcagtctcgcatggactccaccactgctgctgctaccgcggccgcggctgcggcgccggcgccggtgctgctggtgacgaacgacgacggaatcgacgcgccggggctccgcttccttgtcgaccgtctcgtcgccgcagggcgataccgcgtactcgtctgcgcgcccgacacagacaaatcgggtgtgagccactgcatcacatggcgccctgcactccgctgtaaacgtgttgatataataggtgctacagcatttggagtttcaggaactcctgctgactgtgcttctttaggcatctctggaaaactatttgatggtttggttcctgatctggtacttagtggaatcaacattggaaataattgtgggtaccatgtggttgcgggtcggagcagtgttaatgacctcaaggtgtctgcagaggtctgcatgcctctgataaatgctatcgtgactgagatcaagaatgggacttaccctcaaggatcattcttgaatgtagatgtacctacagatgctgcacaccccaagggctacaaaattacaaaacaaggaacatatatggccagaattagttgggagcagacggtttacaagaagcctgcagtagaaagttaccagacagcaaacatggatgttgatggtgaaaaggatagcgaactagttacttcagaaaatgacctactgtttaagagagtgattgtagggagaagttccaatggagtggaaggagaggaaacggaccacaattccctagttgatggatatatcactgttactcctttgggtgctctttcccgcacagaaccagacgccataccgtatttcaaagcttgtgtctcacgtctggttgataatttctcttctcctggctcttctttttctagaagcagaggatgagccatgaaatttctaaagctgtttatttatggccatgatcaagttccatattgctttttcctaacccatacatggttaccatacatgggcaatattgccattcatgctacctgaatgttattactgcaatcagcatgtgtattctgcttcatagcctatgtcagaattatgcattcacaaatggttgcccgcttctttaccatgcatcttgtaagaaaaataggttcatttacaaatttattttggtgtttaatattcaacaagagcatttgaactaacatcatttgttagtattcttgcttatagtttaaaggatatatatacc

SEQ ID NO: 68148 - DNA, 848 bp, Zea Mays
cggaaaaaaaatcccattatggacggcgactggtactttttgttcgcggggacggcgactggtactttttgtcgctgcggagacggggagtcttccgactcttccccaacgggaattcctcattcacatccctacgcacgaacggaaacgccccatgctgcgctcgcagtctcgcatggactccaccactgctgctgctaccgcggccgcggctgcggcgccggcgccggtgctgctggtgacgaacgacgacggaatcgacgcgccggggctccgcttccttgtcgaccgtctcgtcgccgcagggcgataccgcgtactcgtctgcgcgcccgacacagacaaatcgggtgtgagccactgcatcacatggcgccctgcactccgctgtaaacgtgttgatataataggtgctacagcatttggagtttcaggaactcctgctgactgtgcttctttaggcatctctggaaaactatttgatggtttggttcctgatctggtacttagtggaatcaacattggaaataattgtgggtaccatgtgatcccactatgcaccggtgcctctagaggtctccgttgaacatgtccaaaccatctcaaccggtgttggacgagctttttttcaattggtgctatccctaacctatcacgccaacattctgcatcatgcaacatatcaggtctaattgtcatcatataaaacttgcctttttagctttcgtggcatcctcttgtcacatagaacgccagatgcttgacgttactttatccaccttgctttgattctatggctaatatcttcatcaatatctctgtctctgtaggattgatcttaaatacca

SEQ ID NO: 68149 - DNA, 738 bp, Zea Mays
cggaaaaaaaatcccattatggacggcgactggtactttttgttcgcggggacggcgactggtactttttgtcgctgcggagacggggagtcttccgactcttccccaacgggaattcctcattcacatccctacgcacgaacggaaacgccccatgctgcgctcgcagtctcgcatggactccaccactgctgctgctaccgcggccgcggctgcggcgccggcgccggtgctgctggtgacgaacgacgacggaatcgacgcgccggggctccgcttccttgtcgaccgtctcgtcgccgcagggcgataccgcgtactcgtctgcgcgcccgacacagacaaatcgggtgtgagccactgcatcacatggcgccctgcactccgctgtaaacgtgttgatataataggtgctacagcatttggagtttcaggaactcctgctgactgtgcttctttaggcatctctggaaaactatttgatggtttggttcctgatctggtacttagtggaatcaacattggaaataattgtgggtaccatgtgccaacattctgcatcatgcaacatatcaggtctaattgtcatcatataaaacttgcctttttagctttcgtggcatcctcttgtcacatagaacgccagatgcttgacgttactttatccaccttgctttgattctatggctaatatcttcatcaatatctctgtctctgtaggattgatcttaaatacca

SEQ ID NO: 68150 - DNA, 2370 bp, Zea Mays
cggaaaaaaaatcccattatggacggcgactggtactttttgttcgcggggacggcgactggtactttttgtcgctgcggagacggggagtcttccgactcttccccaacgggaattcctcattcacatccctacgcacgaacggaaacgccccatgctgcgctcgcagtctcgcatggactccaccactgctgctgctaccgcggccgcggctgcggcgccggcgccggtgctgctggtgacgaacgacgacggaatcgacgcgccggggctccgcttccttgtcgaccgtctcgtcgccgcagggcgataccgcgtactcgtctgcgcgcccgacacagacaaatcgggtgtgagccactgcatcacatggcgccctgcactccgctgtaaacgtgttgatataataggtgctacagcatttggagtttcaggaactcctgctgactgtgcttctttaggcatctctggaaaactatttgatggtttggttcctgatctggtacttagtggaatcaacattggaaataattgtgggtaccatgtgtaagtatctttgttgctacaaacatgatcttgaacatattactagagttgagaagtcctcattcctcaaaattgtatgttggaagttgtgacaacaacaaaaacaacaatgaagccttttagtctcaagcaagttaggataggttagagttgaaacccaacataaaccataagtcaagattcaggcacatggatagctatttttcatacactcttagtcaagactaaatctttgggtatattctgatgtgcacccgatctttcgatgagagggtgtggaacaactcgattggtggaggagacgacgttcacggtccgactacagccttccaaagacgctgcgccttagcaaccgatacaccatctcctatggctgtcatgatcttgtggagcgcgacaccctggccactagggttctcgttctgccaagcaatcgaagaactaacaagaacaagtagaacaagtactgaattaccagaatataaatgttaggtttccaaactcaatctccaataaagtggggttccgaagacaagaagacggacatctaaaccagcacgcacgcttataagcaagtagcgagagctaaacttgatctaaacaaaacccgttgttcttggtggcggctaggggatttataaacatgagaggacgaccacaagggtgttggggtcgtgctgcaacccgaggatgcgtctctaatgaatccaacttgatacacaacccattaggccaaaatagggtgacacagcaccatggacagaaaaggcaggaaaggtctcagtaaggaaacaatgattgcggcgtccttagagaagatatgactataattccagatccatatgaaagtgacttgataagctttccatgtagtacttgatcacccaaatcggagcctacatgcgactgtggtgaccgtcacaagttggtgttcttctacagtccgaatccagtttgctcaaatccttttccctttcggtcttctccctggttcctaagcaaaacaagagtgcacgggtctccatggtctaaatatgatggacatgaactcaagagtgtactcacctgatggttgagttgatgaacacgagcgcaagtaatgggaccagaaattggtacttgtattggcatggatgtatcagtggtgtggatgtcctcaaaattgtatgctggaagttgcgacaacaacaacaacaacgaagccttttagtctcaagcaaaaagttgaaacccaacataaaccataagtcaagattcaggcacatggataactgttttcatagttcatacactattagtcaagactaaatctttgggtatattccattgtttcaagtctctttttactgcatcttctcatgtcgactttggccttctcatgtctctctttccattgcccattgctatcacgtcttaggatcccactatgcaccggtgcctctagaggtctccgttgaacatgtccaaaccatctcaaccggtgttggacgagctttttttcaattggtgctatccctaacctatcacgtatatcatcgttccaaactctatcccttcttatatggacacagatccaacacaacatacgtatttctgcaacacttatatgttaacatgtctgtttttttgtaggccaacattctgcatcatgcaacatatcaggtctaattgtcatcatataaaacttgcctttttagctttcgtggcatcctcttgtcacatagaacgccagatgcttgacgttactttatccaccttgctttgattctatggctaatatcttcatcaatatctctgtctctgtaggattgatcttaaatacca

SEQ ID NO: 68151 - DNA, 1315 bp, Zea Mays
tctggagacagattgtccttcagactattttccttatcttgagctactttttgacaggatagatggttcttggttatggtgcaaatggtgctataatacactacagaccaaccccagagagctgcagctctgtaggaagtgacaatctgtttttgttagatagtggtgctcaatacattgatggaactactgacataaccagaacagtgcattttggtgaggcttccccaaggcaaaaggaatgcttcaccagagttttgcagggccatatagctctcgatcaagcagtgttccctgagagaactccaggctttgtgctagatgttctggcacggtcatctctgtggaagattggactggattatagacatggcacaggccatggagttggagctgcgctaaatgtccacgagggacctcagagcattagctatcgatatgggaatttgacagccttacagaagggcatgattgtcagcaacgagcctggttattatgaggacaactcatttggcattcgtatcgagaatttacttctggtaaaggagcttaatctggcaaattcgttcggtggaatttcataccttggttttgagaaactaacctttgttccaattcagagcaagcttattgagtcatccttgatgtcaccttcggagatcaattgggtcaatgattaccacgaagaagtctgggaaaaggtttcccctttgttgagtggccattctcgcgactggttatggaagaacactcgacctcttttagatgtgtaataataactcaacgcacagcacggcttgactgcgtaagtgaaagaaatgaacagacatgtttggctggagcatctcttgaagatctgatggccttcaatggaatgcaactatatggcagtaaacagaggcaagacaatagatgcgtaggctggccagggttcagcggatgataggttgaggctggtgtatttgacatccagccaatttggtgcaacacttgaaaaatgaattacatgcaagccttttctatttattacactatcgacgacaccgtccattgtttgatgaatttattatttattacatttggtacctttttttatacaaaaaaacatctttttagagtgatgaagccatttgagaccatggtttcgtatatggaatcagtcagattcttagggtgctcttggtagggctatggcgaaaacaatttgagctatgatttttgtggtgaattatgatggagctgaagctattttgaagaaaacgattgataaaatagtttggtgacttggcgttactattaaaaaagactgaaatat

SEQ ID NO: 68152 - DNA, 2375 bp, Zea Mays
tgtctaccttcttctaacagcttaagcttttgggtcgaattgagaggaagtgatgtcccacattcaccagtattttatagctacctcattgtggaggttagcactgctacactatttgtagacaacagcaaagtttctaaagatgttctggagcaccttgagcaagctggtgtgaaacttaagccatatgaagcaattatttctgaagtagaaaggtaaatcttgcaaaagcactaatctttaaaaaatttctatctcgattcaagcatatggtttgtgtttagttgttgatgtagacctttgtttctatagtaagacaatcatcatggtaaaaagcaaaatatattgatttaacagtcccattgggctcatggttcttcttcttccatattaaatttaatcaattggattgcttatggccttatctgtgcaaaatgcttcactgccctggaggtgatggagtttttgttctttttcttgtcattatttatttttttgtaaataaaatgtctgtcagggtttactagtgaattttcagatctcactattgacattaatatgtgtgttgtaccatatgtatatttctttttaataaaatgatgttcatctctcctgagtatcagaaaaaagatcttgcgacaattcaatagggaaaatataatttttgcaatgttgctgttgatcaaaacattgatcgctttgtcaagactggcagagaaaggtgcaaagctctggttggattcttcaagcgtgaatgcagccataattactgcatttaaatcaagttgtgacatgaaaaagaaaggaaaagcaggtgaagaagttggagaaaaagaagcatcttcaaacgaccggataactggagatcctagtgtccacaatggagtcataagtgctgtatacaatgtttcaccggttgcacttgccaagtcagttaaaaatgatgcagaaattgagggaatgaagaattcacacttaagagatgctgctgctttagcagaattctggtgctggctggaggaggaaatctgtaaaagtgtgccccttacagaggtgcaaattgctgaaaagcttcttgagtttcgtcaaaagcaagatggatttatcgagacaagcttcgacactataagtggttatggtgcaaatggtgctataatacactacagaccaaccccagagagctgcagctctgtaggaagtgacaatctgtttttgttagatagtggtgctcaatacattgatggaactactgacataaccagaacagtgcattttggtgaggcttccccaaggcaaaaggaatgcttcaccagagttttgcagggccatatagctctcgatcaagcagtgttccctgagagaactccaggctttgtgctagatgttctggcacggtcatctctgtggaagattggactggattatagacatggcacaggccatggagttggagctgcgctaaatgtccacgagggacctcagagcattagctatcgatatgggaatttgacagccttacagaagggcatgattgtcagcaacgagcctggttattatgaggacaactcatttggcattcgtatcgagaatttacttctggtaaaggagcttaatctggcaaattcgttcggtggaatttcataccttggttttgagaaactaacctttgttccaattcagagcaagcttattgagtcatccttgatgtcaccttcggagatcaattgggtcaatgattaccacgaagaagtctgggaaaaggtttcccctttgttgagtggccattctcgcgactggttatggaagaacactcgacctcttttagatgtgtaataataactcaacgcacagcacggcttgactgcgtaagtgaaagaaatgaacagacatgtttggctggagcatctcttgaagatctgatggccttcaatggaatgcaactatatggcagtaaacagaggcaagacaatagatgcgtaggctggccagggttcagcggatgataggttgaggctggtgtatttgacatccagccaatttggtgcaacacttgaaaaatgaattacatgcaagccttttctatttattacactatcgacgacaccgtccattgtttgatgaatttattatttattacatttggtacctttttttatacaaaaaaacatctttttagagtgatgaagccatttgagaccatggtttcgtatatggaatcagtcagattcttagggtgctcttggtagggctatggcgaaaacaatttgagctatgatttttgtggtgaattatgatggagctgaagctattttgaagaaaacgattgataaaatagtttggtgacttggcgttactattaaaaaagactgaaatat

SEQ ID NO: 68153 - DNA, 1994 bp, Zea Mays
agtggactgtctaccttcttctaacagcttaagcttttgggtcgaattgagaggaagtgatgtcccacattcaccagtattttatagctacctcattgtggaggttagcactgctacactatttgtagacaacagcaaagtttctaaagatgttctggagcaccttgagcaagctggtgtgaaacttaagccatatgaagcaattatttctgaagtagaaagactggcagagaaaggtgcaaagctctggttggattcttcaagcgtgaatgcagccataattactgcatttaaatcaagttgtgacatgaaaaagaaaggaaaagcaggtgaagaagttggagaaaaagaagcatcttcaaacgaccggataactggagatcctagtgtccacaatggagtcataagtgctgtatacaatgtttcaccggttgcacttgccaagtcagttaaaaatgatgcagaaattgagggaatgaagaattcacacttaagagatgctgctgctttagcagaattctggtgctggctggaggaggaaatctgtaaaagtgtgccccttacagaggtgcaaattgctgaaaagcttcttgagtttcgtcaaaagcaagatggatttatcgagacaagcttcgacactataagtggttatggtgcaaatggtgctataatacactacagaccaaccccagagagctgcagctctgtaggaagtgacaatctgtttttgttagatagtggtgctcaatacattgatggaactactgacataaccagaacagtgcattttggtgaggcttccccaaggcaaaaggaatgcttcaccagagttttgcagggccatatagctctcgatcaagcagtgttccctgagagaactccaggctttgtgctagatgttctggcacggtcatctctgtggaagattggactggattatagacatggtagtaacttttttaactacataaaataattctctaaagagaaggattggtttagtattccattgaaggtatgatgtgcaacattttcatgtttcttgatccaggcacaggccatggagttggagctgcgctaaatgtccacgagggacctcagagcattagctatcgatatgggaatttgacagccttacagaagggcatgattgtcagcaacgagcctggttattatgaggacaactcatttggcattcgtatcgagaatttacttctggtaaaggagcttaatctggcaaattcgttcggtggaatttcataccttggttttgagaaactaacctttgttccaattcagagcaagcttattgagtcatccttgatgtcaccttcggagatcaattgggtcaatgattaccacgaagaagtctgggaaaaggtttcccctttgttgagtggccattctcgcgactggttatggaagaacactcgacctcttttagatgtgtaataataactcaacgcacagcacggcttgactgcgtaagtgaaagaaatgaacagacatgtttggctggagcatctcttgaagatctgatggccttcaatggaatgcaactatatggcagtaaacagaggcaagacaatagatgcgtaggctggccagggttcagcggatgataggttgaggctggtgtatttgacatccagccaatttggtgcaacacttgaaaaatgaattacatgcaagccttttctatttattacactatcgacgacaccgtccattgtttgatgaatttattatttattacatttggtacctttttttatacaaaaaaacatctttttagagtgatgaagccatttgagaccatggtttcgtatatggaatcagtcagattcttagggtgctcttggtagggctatggcgaaaacaatttgagctatgatttttgtggtgaattatgatggagctgaagctattttgaagaaaacgattgataaaatagtttggtgacttggcgttactattaaaaaagactgaaatat

SEQ ID NO: 68154 - DNA, 2415 bp, Zea Mays
agagatattacttactttccatactccatagtagagtggcctgccttctcagagcgaattcattgcagaatgcttcacgaggcgtgcctatctgactgggttcactggcagtgctggtacagctgtggtcacaaaaaataaggctgctctctggactgatggccgttattttcttcaggcagagaaggaattgagccaccactggacactcatgcgcagtgggaatcatggtgttccaactactagtgagtggttgaatgatgttttaccatctggttgccgagttggtattgatccgtttcttttctcatttgatgctgctgaagaactgaaggattcaatcgccaataagaatcatgagttagttttggttcagggcatgaacctagttgatgagatatggggagatgcaaggccaaatcccccaaaagaaccaactagggtgcatgacatcaaatatgctggtattgatgtgccatcaaagttgtccttcattaggtcacaacttgctgaaaatgggtgtgatgctgtggtaatttcaatgctcgatgaagttgcttggttgttgaacatgagaggaagtgatgtcccacattcaccagtattttatagctacctcattgtggaggttagcactgctacactatttgtagacaacagcaaagtttctaaagatgttctggagcaccttgagcaagctggtgtgaaacttaagccatatgaagcaattatttctgaagtagaaagactggcagagaaaggtgcaaagctctggttggattcttcaagcgtgaatgcagccataattactgcatttaaatcaagttgtgacatgaaaaagaaaggaaaagcaggtgaagaagttggagaaaaagaagcatcttcaaacgaccggataactggagatcctagtgtccacaatggagtcataagtgctgtatacaatgtttcaccggttgcacttgccaagtcagttaaaaatgatgcagaaattgagggaatgaagaattcacacttaagagatgctgctgctttagcagaattctggtgctggctggaggaggaaatctgtaaaagtgtgccccttacagaggtgcaaattgctgaaaagcttcttgagtttcgtcaaaagcaagatggatttatcgagacaagcttcgacactataagtggttatggtgcaaatggtgctataatacactacagaccaaccccagagagctgcagctctgtaggaagtgacaatctgtttttgttagatagtggtgctcaatacattgatggaactactgacataaccagaacagtgcattttggtgaggcttccccaaggcaaaaggaatgcttcaccagagttttgcagggccatatagctctcgatcaagcagtgttccctgagagaactccaggctttgtgctagatgttctggcacggtcatctctgtggaagattggactggattatagacatggcacaggccatggagttggagctgcgctaaatgtccacgagggacctcagagcattagctatcgatatgggaatttgacagccttacagaagggcatgattgtcagcaacgagcctggttattatgaggacaactcatttggcattcgtatcgagaatttacttctggtaaaggagcttaatctggcaaattcgttcggtggaatttcataccttggttttgagaaactaacctttgttccaattcagagcaagcttattgagtcatccttgatgtcaccttcggagatcaattgggtcaatgattaccacgaagaagtctgggaaaaggtttcccctttgttgagtggccattctcgcgactggttatggaagaacactcgacctcttttagatgtgtaataataactcaacgcacagcacggcttgactgcgtaagtgaaagaaatgaacagacatgtttggctggagcatctcttgaagatctgatggccttcaatggaatgcaactatatggcagtaaacagaggcaagacaatagatgcgtaggctggccagggttcagcggatgataggttgaggctggtgtatttgacatccagccaatttggtgcaacacttgaaaaatgaattacatgcaagccttttctatttattacactatcgacgacaccgtccattgtttgatgaatttattatttattacatttggtacctttttttatacaaaaaaacatctttttagagtgatgaagccatttgagaccatggtttcgtatatggaatcagtcagattcttagggtgctcttggtagggctatggcgaaaacaatttgagctatgatttttgtggtgaattatgatggagctgaagctattttgaagaaaacgattgataaaatagtttggtgacttggcgttactattaaaaaagactgaaatat

SEQ ID NO: 68155 - DNA, 2824 bp, Zea Mays
cctagacgctcatgggccggttctgccttatctccctccctcctagtcctaccacttcctcattccccacgtactctctcggctgctcgcttatggcgatcgaagctgcgcgcctctcaccgtccatcgccgccgccgccttcctcgccagccgcccccctcttgccctccgcccgttctcccttcgtcgcaggtttcccctcctccgcgtcctcgccaactcatcgggaggggacggacgcgtcgtcgctctgtcctcgtctgagctccgaaagcgccgaggcctgtcttcctcctctggggctgcggactccgcatctgacggggatgagaagctacgctcgcttcgtcgactcttcgcgcggcccgacgttgctattgacgcctacatcgtcccttcacaggacgcccaccagagcgaattcattgcagaatgcttcacgaggcgtgcctatctgactgggttcactggcagtgctggtacagctgtggtcacaaaaaataaggctgctctctggactgatggccgttattttcttcagagaaggaattgagccaccactggacactcatgcgcagtgggaatcatggtgttccaactactagtgagtggttgaatgatgttttaccatctggttgccgagttggtattgatccggatgcagtttcttttctcatttgatgctgctgaagaactgaaggattcaatcgccaataagaatcatgagttagttttggttcagggcatgaacctagttgatgagatatggggagatgcaaggccaaatcccccaaaagaaccaactagggtgcatgacatcaaatatgctggtattgatgtgccatcaaagttgtccttcattaggtcacaacttgctgaaaatgggtgtgatgctgtggtaatttcaatgctcgatgaagttgcttggttgttgaacatggccttcctctctggctgcacgtgagtgggggtgctgaagtgtagaggaagtgatgtcccacattcaccagtattttatagctacctcattgtggaggttagcactgctacactatttgtagacaacagcaaagtttctaaagatgttctggagcaccttgagcaagctggtgtgaaacttaagccatatgaagcaattatttctgaagtagaaagactggcagagaaaggtgcaaagctctggttggattcttcaagcgtgaatgcagccataattactgcatttaaatcaagttgtgacatgaaaaagaaaggaaaagcaggtgaagaagttggagaaaaagaagcatcttcaaacgaccggataactggagatcctagtgtccacaatggagtcataagtgctgtatacaatgtttcaccggttgcacttgccaagtcagttaaaaatgatgcagaaattgagggaatgaagaattcacacttaagagatgctgctgctttagcagaattctggtgctggctggaggaggaaatctgtaaaagtgtgccccttacagaggtgcaaattgctgaaaagcttcttgagtttcgtcaaaagcaagatggatttatcgagacaagcttcgacactataagtggttatggtgcaaatggtgctataatacactacagaccaaccccagagagctgcagctctgtaggaagtgacaatctgtttttgttagatagtggtgctcaatacattgatggaactactgacataaccagaacagtgcattttggtgaggcttccccaaggcaaaaggaatgcttcaccagagttttgcagggccatatagctctcgatcaagcagtgttccctgagagaactccaggctttgtgctagatgttctggcacggtcatctctgtggaagattggactggattatagacatggcacaggccatggagttggagctgcgctaaatgtccacgagggacctcagagcattagctatcgatatgggaatttgacagccttacagaagggcatgattgtcagcaacgagcctggttattatgaggacaactcatttggcattcgtatcgagaatttacttctggtaaaggagcttaatctggcaaattcgttcggtggaatttcataccttggttttgagaaactaacctttgttccaattcagagcaagcttattgagtcatccttgatgtcaccttcggagatcaattgggtcaatgattaccacgaagaagtctgggaaaaggtttcccctttgttgagtggccattctcgcgactggttatggaagaacactcgacctcttttagatgtgtaataataactcaacgcacagcacggcttgactgcgtaagtgaaagaaatgaacagacatgtttggctggagcatctcttgaagatctgatggccttcaatggaatgcaactatatggcagtaaacagaggcaagacaatagatgcgtaggctggccagggttcagcggatgataggttgaggctggtgtatttgacatccagccaatttggtgcaacacttgaaaaatgaattacatgcaagccttttctatttattacactatcgacgacaccgtccattgtttgatgaatttattatttattacatttggtacctttttttatacaaaaaaacatctttttagagtgatgaagccatttgagaccatggtttcgtatatggaatcagtcagattcttagggtgctcttggtagggctatggcgaaaacaatttgagctatgatttttgtggtgaattatgatggagctgaagctattttgaagaaaacgattgataaaatagtttggtgacttggcgttactattaaaaaagactgaaatat

SEQ ID NO: 68156 - DNA, 2677 bp, Zea Mays
cctagacgctcatgggccggttctgccttatctccctccctcctagtcctaccacttcctcattccccacgtactctctcggctgctcgcttatggcgatcgaagctgcgcgcctctcaccgtccatcgccgccgccgccttcctcgccagccgcccccctcttgccctccgcccgttctcccttcgtcgcaggtttcccctcctccgcgtcctcgccaactcatcgggaggggacggacgcgtcgtcgctctgtcctcgtctgagctccgaaagcgccgaggcctgtcttcctcctctggggctgcggactccgcatctgacggggatgagaagctacgctcgcttcgtcgactcttcgcgcggcccgacgttgctattgacgcctacatcgtcccttcacaggacgcccaccagagcgaattcattgcagaatgcttcacgaggcgtgcctatctgactgggttcactggcagtgctggtacagctgtggtcacaaaaaataaggctgctctctggactgatggccgttattttcttcaggcagagaaggaattgagccaccactggacactcatgcgcagtgggaatcatggtgttccaactactagtgagtggttgaatgatgttttaccatctggttgccgagttggtattgatccggatgcagtttcttttctcatttgatgctgctgaagaactgaaggattcaatcgccaataagaatcatgagttagttttggttcagggcatgaacctagttgatgagatatggggagatgcaaggccaaatcccccaaaagaaccaactagggtgcatgacatcaaatatgctggtattgatgtgccatcaaagttgtccttcattaggtcacaacttgctgaaaatgggtgtgatgctgtggtaatttcaatgctcgatgaagttgcttggttgttgaacatgagaggaagtgatgtcccacattcaccagtattttatagctacctcattgtggaggttagcactgctacactatttgtagacaacagcaaagtttctaaagatgttctggagcaccttgagcaagctggtgtgaaacttaagccatatgaagcaattatttctgaagtagaaagactggcagagaaaggtgcaaagctctggttggattcttcaagcgtgaatgcagccataattactgcatttaaatcaagttgtgacatgaaaaagaaaggaaaagcaggtgaagaagttggagaaaaagaagcatcttcaaacgaccggataactggagatcctagtgtccacaatggagtcataagtgctgtatacaatgtttcaccggttgcacttgccaagtcagttaaaaatgatgcagaaattgagggaatgaagaattcacacttaagagatgctgctgctttagcagaattctggtgctggctggaggaggaaatctgtaaaagtgtgccccttacagaggtgcaaattgctgaaaagcttcttgagtttcgtcaaaagcaagatggatttatcgagacaagcttcgacactataagtggttatggtgcaaatggtgctataatacactacagaccaaccccagagagctgcagctctgtaggaagtgacaatctgtttttgttagatagtggtgctcaatacattgatggaactactgacataaccagaacagtgcattttggtgaggcttccccaaggcaaaaggaatgcttcaccagagttttgcaggcacaggccatggagttggagctgcgctaaatgtccacgagggacctcagagcattagctatcgatatgggaatttgacagccttacagaagggcatgattgtcagcaacgagcctggttattatgaggacaactcatttggcattcgtatcgagaatttacttctggtaaaggagcttaatctggcaaattcgttcggtggaatttcataccttggttttgagaaactaacctttgttccaattcagagcaagcttattgagtcatccttgatgtcaccttcggagatcaattgggtcaatgattaccacgaagaagtctgggaaaaggtttcccctttgttgagtggccattctcgcgactggttatggaagaacactcgacctcttttagatgtgtaataataactcaacgcacagcacggcttgactgcgtaagtgaaagaaatgaacagacatgtttggctggagcatctcttgaagatctgatggccttcaatggaatgcaactatatggcagtaaacagaggcaagacaatagatgcgtaggctggccagggttcagcggatgataggttgaggctggtgtatttgacatccagccaatttggtgcaacacttgaaaaatgaattacatgcaagccttttctatttattacactatcgacgacaccgtccattgtttgatgaatttattatttattacatttggtacctttttttatacaaaaaaacatctttttagagtgatgaagccatttgagaccatggtttcgtatatggaatcagtcagattcttagggtgctcttggtagggctatggcgaaaacaatttgagctatgatttttgtggtgaattatgatggagctgaagctattttgaagaaaacgattgataaaatagtttggtgacttggcgttactattaaaaaagactgaaatat

SEQ ID NO: 68157 - DNA, 2870 bp, Zea Mays
cctagacgctcatgggccggttctgccttatctccctccctcctagtcctaccacttcctcattccccacgtactctctcggctgctcgcttatggcgatcgaagctgcgcgcctctcaccgtccatcgccgccgccgccttcctcgccagccgcccccctcttgccctccgcccgttctcccttcgtcgcaggtttcccctcctccgcgtcctcgccaactcatcgggaggggacggacgcgtcgtcgctctgtcctcgtctgagctccgaaagcgccgaggcctgtcttcctcctctggggctgcggactccgcatctgacggggatgagaagctacgctcgcttcgtcgactcttcgcgcggcccgacgttgctattgacgcctacatcgtcccttcacaggacgcccaccagagcgaattcattgcagaatgcttcacgaggcgtgcctatctgactgggttcactggcagtgctggtacagctgtggtcacaaaaaataaggctgctctctggactgatggccgttattttcttcaggcagagaaggaattgagccaccactggacactcatgcgcagtgggaatcatggtgttccaactactagtgagtggttgaatgatgttttaccatctggttgccgagttggtattgatccggatgcagtttcttttctcatttgatgctgctgaagaactgaaggattcaatcgccaataagaatcatgagttagttttggttcagggcatgaacctagttgatgagatatggggagatgcaaggccaaatcccccaaaagaaccaactagggtgcatgacatcaaatatgctggtattgatgtgccatcaaagttgtccttcattaggtcacaacttgctgaaaatgggtgtgatgctgtggtaatttcaatgctcgatgaagttgcttggttgttgaacatgagaggaagtgatgtcccacattcaccagtattttatagctacctcattgtggaggttagcactgctacactatttgtagacaacagcaaagtttctaaagatgttctggagcaccttgagcaagctggtgtgaaacttaagccatatgaagcaattatttctgaagtagaaagaaaaaagatcttgcgacaattcaatagggaaaatataatttttgcaatgttgctgttgatcaaaacattgatcgctttgtcaagactggcagagaaaggtgcaaagctctggttggattcttcaagcgtgaatgcagccataattactgcatttaaatcaagttgtgacatgaaaaagaaaggaaaagcaggtgaagaagttggagaaaaagaagcatcttcaaacgaccggataactggagatcctagtgtccacaatggagtcataagtgctgtatacaatgtttcaccggttgcacttgccaagtcagttaaaaatgatgcagaaattgagggaatgaagaattcacacttaagagatgctgctgctttagcagaattctggtgctggctggaggaggaaatctgtaaaagtgtgccccttacagaggtgcaaattgctgaaaagcttcttgagtttcgtcaaaagcaagatggatttatcgagacaagcttcgacactataagtggttatggtgcaaatggtgctataatacactacagaccaaccccagagagctgcagctctgtaggaagtgacaatctgtttttgttagatagtggtgctcaatacattgatggaactactgacataaccagaacagtgcattttggtgaggcttccccaaggcaaaaggaatgcttcaccagagttttgcagggccatatagctctcgatcaagcagtgttccctgagagaactccaggctttgtgctagatgttctggcacggtcatctctgtggaagattggactggattatagacatggcacaggccatggagttggagctgcgctaaatgtccacgagggacctcagagcattagctatcgatatgggaatttgacagccttacagaagggcatgattgtcagcaacgagcctggttattatgaggacaactcatttggcattcgtatcgagaatttacttctggtaaaggagcttaatctggcaaattcgttcggtggaatttcataccttggttttgagaaactaacctttgttccaattcagagcaagcttattgagtcatccttgatgtcaccttcggagatcaattgggtcaatgattaccacgaagaagtctgggaaaaggtttcccctttgttgagtggccattctcgcgactggttatggaagaacactcgacctcttttagatgtgtaataataactcaacgcacagcacggcttgactgcgtaagtgaaagaaatgaacagacatgtttggctggagcatctcttgaagatctgatggccttcaatggaatgcaactatatggcagtaaacagaggcaagacaatagatgcgtaggctggccagggttcagcggatgataggttgaggctggtgtatttgacatccagccaatttggtgcaacacttgaaaaatgaattacatgcaagccttttctatttattacactatcgacgacaccgtccattgtttgatgaatttattatttattacatttggtacctttttttatacaaaaaaacatctttttagagtgatgaagccatttgagaccatggtttcgtatatggaatcagtcagattcttagggtgctcttggtagggctatggcgaaaacaatttgagctatgatttttgtggtgaattatgatggagctgaagctattttgaagaaaacgattgataaaatagtttggtgacttggcgttactattaaaaaagactgaaatat

SEQ ID NO: 68158 - DNA, 3278 bp, Zea Mays
cctagacgctcatgggccggttctgccttatctccctccctcctagtcctaccacttcctcattccccacgtactctctcggctgctcgcttatggcgatcgaagctgcgcgcctctcaccgtccatcgccgccgccgccttcctcgccagccgcccccctcttgccctccgcccgttctcccttcgtcgcaggtttcccctcctccgcgtcctcgccaactcatcgggaggggacggacgcgtcgtcgctctgtcctcgtctgagctccgaaagcgccgaggcctgtcttcctcctctggggctgcggactccgcatctgacggggatgagaagctacgctcgcttcgtcgactcttcgcgcggcccgacgttgctattgacgcctacatcgtcccttcacaggacgcccaccagagcgaattcattgcagaatgcttcacgaggcgtgcctatctgactgggttcactggcagtgctggtacagctgtggtcacaaaaaataaggctgctctctggactgatggccgttattttcttcaggcagagaaggaattgagccaccactggacactcatgcgcagtgggaatcatggtgttccaactactagtgagtggttgaatgatgttttaccatctggttgccgagttggtattgatccggatgcagtttcttttctcatttgatgctgctgaagaactgaaggattcaatcgccaataagaatcatgagttagttttggttcagggcatgaacctagttgatgagatatggggagatgcaaggccaaatcccccaaaagaaccaactagggtgcatgacatcaaatatgctggtattgatgtgccatcaaagttgtccttcattaggtcacaacttgctgaaaatgggtgtgatgctgtggtaatttcaatgctcgatgaagttgcttggttgttgaacatgagaggaagtgatgtcccacattcaccagtattttatagctacctcattgtggaggttagcactgctacactatttgtagacaacagcaaagtttctaaagatgttctggagcaccttgagcaagctggtgtgaaacttaagccatatgaagcaattatttctgaagtagaaaggtaaatcttgcaaaagcactaatctttaaaaaatttctatctcgattcaagcatatggtttgtgtttagttgttgatgtagacctttgtttctatagtaagacaatcatcatggtaaaaagcaaaatatattgatttaacagtcccattgggctcatggttcttcttcttccatattaaatttaatcaattggattgcttatggccttatctgtgcaaaatgcttcactgccctggaggtgatggagtttttgttctttttcttgtcattatttatttttttgtaaataaaatgtctgtcagggtttactagtgaattttcagatctcactattgacattaatatgtgtgttgtaccatatgtatatttctttttaataaaatgatgttcatctctcctgagtatcagaaaaaagatcttgcgacaattcaatagggaaaatataatttttgcaatgttgctgttgatcaaaacattgatcgctttgtcaagactggcagagaaaggtgcaaagctctggttggattcttcaagcgtgaatgcagccataattactgcatttaaatcaagttgtgacatgaaaaagaaaggaaaagcaggtgaagaagttggagaaaaagaagcatcttcaaacgaccggataactggagatcctagtgtccacaatggagtcataagtgctgtatacaatgtttcaccggttgcacttgccaagtcagttaaaaatgatgcagaaattgagggaatgaagaattcacacttaagagatgctgctgctttagcagaattctggtgctggctggaggaggaaatctgtaaaagtgtgccccttacagaggtgcaaattgctgaaaagcttcttgagtttcgtcaaaagcaagatggatttatcgagacaagcttcgacactataagtggttatggtgcaaatggtgctataatacactacagaccaaccccagagagctgcagctctgtaggaagtgacaatctgtttttgttagatagtggtgctcaatacattgatggaactactgacataaccagaacagtgcattttggtgaggcttccccaaggcaaaaggaatgcttcaccagagttttgcagggccatatagctctcgatcaagcagtgttccctgagagaactccaggctttgtgctagatgttctggcacggtcatctctgtggaagattggactggattatagacatggcacaggccatggagttggagctgcgctaaatgtccacgagggacctcagagcattagctatcgatatgggaatttgacagccttacagaagggcatgattgtcagcaacgagcctggttattatgaggacaactcatttggcattcgtatcgagaatttacttctggtaaaggagcttaatctggcaaattcgttcggtggaatttcataccttggttttgagaaactaacctttgttccaattcagagcaagcttattgagtcatccttgatgtcaccttcggagatcaattgggtcaatgattaccacgaagaagtctgggaaaaggtttcccctttgttgagtggccattctcgcgactggttatggaagaacactcgacctcttttagatgtgtaataataactcaacgcacagcacggcttgactgcgtaagtgaaagaaatgaacagacatgtttggctggagcatctcttgaagatctgatggccttcaatggaatgcaactatatggcagtaaacagaggcaagacaatagatgcgtaggctggccagggttcagcggatgataggttgaggctggtgtatttgacatccagccaatttggtgcaacacttgaaaaatgaattacatgcaagccttttctatttattacactatcgacgacaccgtccattgtttgatgaatttattatttattacatttggtacctttttttatacaaaaaaacatctttttagagtgatgaagccatttgagaccatggtttcgtatatggaatcagtcagattcttagggtgctcttggtagggctatggcgaaaacaatttgagctatgatttttgtggtgaattatgatggagctgaagctattttgaagaaaacgattgataaaatagtttggtgacttggcgttactattaaaaaagactgaaatat

SEQ ID NO: 68159 - DNA, 3271 bp, Zea Mays
cctagacgctcatgggccggttctgccttatctccctccctcctagtcctaccacttcctcattccccacgtactctctcggctgctcgcttatggcgatcgaagctgcgcgcctctcaccgtccatcgccgccgccgccttcctcgccagccgcccccctcttgccctccgcccgttctcccttcgtcgcaggtttcccctcctccgcgtcctcgccaactcatcgggaggggacggacgcgtcgtcgctctgtcctcgtctgagctccgaaagcgccgaggcctgtcttcctcctctggggctgcggactccgcatctgacggggatgagaagctacgctcgcttcgtcgactcttcgcgcggcccgacgttgctattgacgcctacatcgtcccttcacaggacgcccaccagagcgaattcattgcagaatgcttcacgaggcgtgcctatctgactgggttcactggcagtgctggtacagctgtggtcacaaaaaataaggctgctctctggactgatggccgttattttcttcaggcagagaaggaattgagccaccactggacactcatgcgcagtgggaatcatggtgttccaactactagtgagtggttgaatgatgttttaccatctggttgccgagttggtattgatccgtttcttttctcatttgatgctgctgaagaactgaaggattcaatcgccaataagaatcatgagttagttttggttcagggcatgaacctagttgatgagatatggggagatgcaaggccaaatcccccaaaagaaccaactagggtgcatgacatcaaatatgctggtattgatgtgccatcaaagttgtccttcattaggtcacaacttgctgaaaatgggtgtgatgctgtggtaatttcaatgctcgatgaagttgcttggttgttgaacatgagaggaagtgatgtcccacattcaccagtattttatagctacctcattgtggaggttagcactgctacactatttgtagacaacagcaaagtttctaaagatgttctggagcaccttgagcaagctggtgtgaaacttaagccatatgaagcaattatttctgaagtagaaaggtaaatcttgcaaaagcactaatctttaaaaaatttctatctcgattcaagcatatggtttgtgtttagttgttgatgtagacctttgtttctatagtaagacaatcatcatggtaaaaagcaaaatatattgatttaacagtcccattgggctcatggttcttcttcttccatattaaatttaatcaattggattgcttatggccttatctgtgcaaaatgcttcactgccctggaggtgatggagtttttgttctttttcttgtcattatttatttttttgtaaataaaatgtctgtcagggtttactagtgaattttcagatctcactattgacattaatatgtgtgttgtaccatatgtatatttctttttaataaaatgatgttcatctctcctgagtatcagaaaaaagatcttgcgacaattcaatagggaaaatataatttttgcaatgttgctgttgatcaaaacattgatcgctttgtcaagactggcagagaaaggtgcaaagctctggttggattcttcaagcgtgaatgcagccataattactgcatttaaatcaagttgtgacatgaaaaagaaaggaaaagcaggtgaagaagttggagaaaaagaagcatcttcaaacgaccggataactggagatcctagtgtccacaatggagtcataagtgctgtatacaatgtttcaccggttgcacttgccaagtcagttaaaaatgatgcagaaattgagggaatgaagaattcacacttaagagatgctgctgctttagcagaattctggtgctggctggaggaggaaatctgtaaaagtgtgccccttacagaggtgcaaattgctgaaaagcttcttgagtttcgtcaaaagcaagatggatttatcgagacaagcttcgacactataagtggttatggtgcaaatggtgctataatacactacagaccaaccccagagagctgcagctctgtaggaagtgacaatctgtttttgttagatagtggtgctcaatacattgatggaactactgacataaccagaacagtgcattttggtgaggcttccccaaggcaaaaggaatgcttcaccagagttttgcagggccatatagctctcgatcaagcagtgttccctgagagaactccaggctttgtgctagatgttctggcacggtcatctctgtggaagattggactggattatagacatggcacaggccatggagttggagctgcgctaaatgtccacgagggacctcagagcattagctatcgatatgggaatttgacagccttacagaagggcatgattgtcagcaacgagcctggttattatgaggacaactcatttggcattcgtatcgagaatttacttctggtaaaggagcttaatctggcaaattcgttcggtggaatttcataccttggttttgagaaactaacctttgttccaattcagagcaagcttattgagtcatccttgatgtcaccttcggagatcaattgggtcaatgattaccacgaagaagtctgggaaaaggtttcccctttgttgagtggccattctcgcgactggttatggaagaacactcgacctcttttagatgtgtaataataactcaacgcacagcacggcttgactgcgtaagtgaaagaaatgaacagacatgtttggctggagcatctcttgaagatctgatggccttcaatggaatgcaactatatggcagtaaacagaggcaagacaatagatgcgtaggctggccagggttcagcggatgataggttgaggctggtgtatttgacatccagccaatttggtgcaacacttgaaaaatgaattacatgcaagccttttctatttattacactatcgacgacaccgtccattgtttgatgaatttattatttattacatttggtacctttttttatacaaaaaaacatctttttagagtgatgaagccatttgagaccatggtttcgtatatggaatcagtcagattcttagggtgctcttggtagggctatggcgaaaacaatttgagctatgatttttgtggtgaattatgatggagctgaagctattttgaagaaaacgattgataaaatagtttggtgacttggcgttactattaaaaaagactgaaatat

SEQ ID NO: 68160 - DNA, 2775 bp, Zea Mays
cctagacgctcatgggccggttctgccttatctccctccctcctagtcctaccacttcctcattccccacgtactctctcggctgctcgcttatggcgatcgaagctgcgcgcctctcaccgtccatcgccgccgccgccttcctcgccagccgcccccctcttgccctccgcccgttctcccttcgtcgcaggtttcccctcctccgcgtcctcgccaactcatcgggaggggacggacgcgtcgtcgctctgtcctcgtctgagctccgaaagcgccgaggcctgtcttcctcctctggggctgcggactccgcatctgacggggatgagaagctacgctcgcttcgtcgactcttcgcgcggcccgacgttgctattgacgcctacatcgtcccttcacaggacgcccaccagagcgaattcattgcagaatgcttcacgaggcgtgcctatctgactgggttcactggcagtgctggtacagctgtggtcacaaaaaataaggctgctctctggactgatggccgttattttcttcagagaaggaattgagccaccactggacactcatgcgcagtgggaatcatggtgttccaactactagtgagtggttgaatgatgttttaccatctggttgccgagttggtattgatccgtttcttttctcatttgatgctgctgaagaactgaaggattcaatcgccaataagaatcatgagttagttttggttcagggcatgaacctagttgatgagatatggggagatgcaaggccaaatcccccaaaagaaccaactagggtgcatgacatcaaatatgctggtattgatgtgccatcaaagttgtccttcattaggtcacaacttgctgaaaatgggtgtgatgctgtggtaatttcaatgctcgatgaagttgcttggttgttgaacatgagaggaagtgatgtcccacattcaccagtattttatagctacctcattgtggaggttagcactgctacactatttgtagacaacagcaaagtttctaaagatgttctggagcaccttgagcaagctggtgtgaaacttaagccatatgaagcaattatttctgaagtagaaagactggcagagaaaggtgcaaagctctggttggattcttcaagcgtgaatgcagccataattactgcatttaaatcaagttgtgacatgaaaaagaaaggaaaagcaggtgaagaagttggagaaaaagaagcatcttcaaacgaccggataactggagatcctagtgtccacaatggagtcataagtgctgtatacaatgtttcaccggttgcacttgccaagtcagttaaaaatgatgcagaaattgagggaatgaagaattcacacttaagagatgctgctgctttagcagaattctggtgctggctggaggaggaaatctgtaaaagtgtgccccttacagaggtgcaaattgctgaaaagcttcttgagtttcgtcaaaagcaagatggatttatcgagacaagcttcgacactataagtggttatggtgcaaatggtgctataatacactacagaccaaccccagagagctgcagctctgtaggaagtgacaatctgtttttgttagatagtggtgctcaatacattgatggaactactgacataaccagaacagtgcattttggtgaggcttccccaaggcaaaaggaatgcttcaccagagttttgcagggccatatagctctcgatcaagcagtgttccctgagagaactccaggctttgtgctagatgttctggcacggtcatctctgtggaagattggactggattatagacatggcacaggccatggagttggagctgcgctaaatgtccacgagggacctcagagcattagctatcgatatgggaatttgacagccttacagaagggcatgattgtcagcaacgagcctggttattatgaggacaactcatttggcattcgtatcgagaatttacttctggtaaaggagcttaatctggcaaattcgttcggtggaatttcataccttggttttgagaaactaacctttgttccaattcagagcaagcttattgagtcatccttgatgtcaccttcggagatcaattgggtcaatgattaccacgaagaagtctgggaaaaggtttcccctttgttgagtggccattctcgcgactggttatggaagaacactcgacctcttttagatgtgtaataataactcaacgcacagcacggcttgactgcgtaagtgaaagaaatgaacagacatgtttggctggagcatctcttgaagatctgatggccttcaatggaatgcaactatatggcagtaaacagaggcaagacaatagatgcgtaggctggccagggttcagcggatgataggttgaggctggtgtatttgacatccagccaatttggtgcaacacttgaaaaatgaattacatgcaagccttttctatttattacactatcgacgacaccgtccattgtttgatgaatttattatttattacatttggtacctttttttatacaaaaaaacatctttttagagtgatgaagccatttgagaccatggtttcgtatatggaatcagtcagattcttagggtgctcttggtagggctatggcgaaaacaatttgagctatgatttttgtggtgaattatgatggagctgaagctattttgaagaaaacgattgataaaatagtttggtgacttggcgttactattaaaaaagactgaaatat

SEQ ID NO: 68161 - DNA, 2776 bp, Zea Mays
cggaacctagacgctcatgggccggttctgccttatctccctccctcctagtcctaccacttcctcattccccacgtactctctcggctgctcgcttatggcgatcgaagctgcgcgcctctcaccgtccatcgccgccgccgccttcctcgccagccgcccccctcttgccctccgcccgttctcccttcgtcgcaggtttcccctcctccgcgtcctcgccaactcatcgggaggggacggacgcgtcgtcgctctgtcctcgtctgagctccgaaagcgccgaggcctgtcttcctcctctggggctgcggactccgcatctgacggggatgagaagctacgctcgcttcgtcgactcttcgcgcggcccgacgttgctattgacgcctacatcgtcccttcacaggacgcccaccagagcgaattcattgcagaatgcttcacgaggcgtgcctatctgactgggttcactggcagtgctggtacagctgtggtcacaaaaaataaggctgctctctggactgatggccgttattttcttcaggcagagaaggaattgagccaccactggacactcatgcgcagtgggaatcatggtgttccaactactagtgagtggttgaatgatgttttaccatctggttgccgagttggtattgatccgtttcttttctcatttgatgctgctgaagaactgaaggattcaatcgccaataagaatcatgagttagttttggttcagggcatgaacctagttgatgagatatggggagatgcaaggccaaatcccccaaaagaaccaactagggtgcatgacatcaaatatgctggtattgatgtgccatcaaagttgtccttcattaggtcacaacttgctgaaaatgggtgtgatgctgtggtaatttcaatgctcgatgaagttgcttggttgttgaacatgagaggaagtgatgtcccacattcaccagtattttatagctacctcattgtggaggttagcactgctacactatttgtagacaacagcaaagtttctaaagatgttctggagcaccttgagcaagctggtgtgaaacttaagccatatgaagcaattatttctgaagtagaaagagaaaggtgcaaagctctggttggattcttcaagcgtgaatgcagccataattactgcatttaaatcaagttgtgacatgaaaaagaaaggaaaagcaggtgaagaagttggagaaaaagaagcatcttcaaacgaccggataactggagatcctagtgtccacaatggagtcataagtgctgtatacaatgtttcaccggttgcacttgccaagtcagttaaaaatgatgcagaaattgagggaatgaagaattcacacttaagagatgctgctgctttagcagaattctggtgctggctggaggaggaaatctgtaaaagtgtgccccttacagaggtgcaaattgctgaaaagcttcttgagtttcgtcaaaagcaagatggatttatcgagacaagcttcgacactataagtggttatggtgcaaatggtgctataatacactacagaccaaccccagagagctgcagctctgtaggaagtgacaatctgtttttgttagatagtggtgctcaatacattgatggaactactgacataaccagaacagtgcattttggtgaggcttccccaaggcaaaaggaatgcttcaccagagttttgcagggccatatagctctcgatcaagcagtgttccctgagagaactccaggctttgtgctagatgttctggcacggtcatctctgtggaagattggactggattatagacatggcacaggccatggagttggagctgcgctaaatgtccacgagggacctcagagcattagctatcgatatgggaatttgacagccttacagaagggcatgattgtcagcaacgagcctggttattatgaggacaactcatttggcattcgtatcgagaatttacttctggtaaaggagcttaatctggcaaattcgttcggtggaatttcataccttggttttgagaaactaacctttgttccaattcagagcaagcttattgagtcatccttgatgtcaccttcggagatcaattgggtcaatgattaccacgaagaagtctgggaaaaggtttcccctttgttgagtggccattctcgcgactggttatggaagaacactcgacctcttttagatgtgtaataataactcaacgcacagcacggcttgactgcgtaagtgaaagaaatgaacagacatgtttggctggagcatctcttgaagatctgatggccttcaatggaatgcaactatatggcagtaaacagaggcaagacaatagatgcgtaggctggccagggttcagcggatgataggttgaggctggtgtatttgacatccagccaatttggtgcaacacttgaaaaatgaattacatgcaagccttttctatttattacactatcgacgacaccgtccattgtttgatgaatttattatttattacatttggtacctttttttatacaaaaaaacatctttttagagtgatgaagccatttgagaccatggtttcgtatatggaatcagtcagattcttagggtgctcttggtagggctatggcgaaaacaatttgagctatgatttttgtggtgaattatgatggagctgaagctattttgaagaaaacgattgataaaatagtttggtgacttggcgttactattaaaaaagactgaaatat

SEQ ID NO: 68162 - DNA, 2792 bp, Zea Mays
ccggaacctagacgctcatgggccggttctgccttatctccctccctcctagtcctaccacttcctcattccccacgtactctctcggctgctcgcttatggcgatcgaagctgcgcgcctctcaccgtccatcgccgccgccgccttcctcgccagccgcccccctcttgccctccgcccgttctcccttcgtcgcaggtttcccctcctccgcgtcctcgccaactcatcgggaggggacggacgcgtcgtcgctctgtcctcgtctgagctccgaaagcgccgaggcctgtcttcctcctctggggctgcggactccgcatctgacggggatgagaagctacgctcgcttcgtcgactcttcgcgcggcccgacgttgctattgacgcctacatcgtcccttcacaggacgcccaccagagcgaattcattgcagaatgcttcacgaggcgtgcctatctgactgggttcactggcagtgctggtacagctgtggtcacaaaaaataaggctgctctctggactgatggccgttattttcttcaggcagagaaggaattgagccaccactggacactcatgcgcagtgggaatcatggtgttccaactactagtgagtggttgaatgatgttttaccatctggttgccgagttggtattgatccggatgcagtttcttttctcatttgatgctgctgaagaactgaaggattcaatcgccaataagaatcatgagttagttttggttcagggcatgaacctagttgatgagatatggggagatgcaaggccaaatcccccaaaagaaccaactagggtgcatgacatcaaatatgctggtattgatgtgccatcaaagttgtccttcattaggtcacaacttgctgaaaatgggtgtgatgctgtggtaatttcaatgctcgatgaagttgcttggttgttgaacatgagaggaagtgatgtcccacattcaccagtattttatagctacctcattgtggaggttagcactgctacactatttgtagacaacagcaaagtttctaaagatgttctggagcaccttgagcaagctggtgtgaaacttaagccatatgaagcaattatttctgaagtagaaagactggcagagaaaggtgcaaagctctggttggattcttcaagcgtgaatgcagccataattactgcatttaaatcaagttgtgacatgaaaaagaaaggaaaagcaggtgaagaagttggagaaaaagaagcatcttcaaacgaccggataactggagatcctagtgtccacaatggagtcataagtgctgtatacaatgtttcaccggttgcacttgccaagtcagttaaaaatgatgcagaaattgagggaatgaagaattcacacttaagagatgctgctgctttagcagaattctggtgctggctggaggaggaaatctgtaaaagtgtgccccttacagaggtgcaaattgctgaaaagcttcttgagtttcgtcaaaagcaagatggatttatcgagacaagcttcgacactataagtggttatggtgcaaatggtgctataatacactacagaccaaccccagagagctgcagctctgtaggaagtgacaatctgtttttgttagatagtggtgctcaatacattgatggaactactgacataaccagaacagtgcattttggtgaggcttccccaaggcaaaaggaatgcttcaccagagttttgcagggccatatagctctcgatcaagcagtgttccctgagagaactccaggctttgtgctagatgttctggcacggtcatctctgtggaagattggactggattatagacatggcacaggccatggagttggagctgcgctaaatgtccacgagggacctcagagcattagctatcgatatgggaatttgacagccttacagaagggcatgattgtcagcaacgagcctggttattatgaggacaactcatttggcattcgtatcgagaatttacttctggtaaaggagcttaatctggcaaattcgttcggtggaatttcataccttggttttgagaaactaacctttgttccaattcagagcaagcttattgagtcatccttgatgtcaccttcggagatcaattgggtcaatgattaccacgaagaagtctgggaaaaggtttcccctttgttgagtggccattctcgcgactggttatggaagaacactcgacctcttttagatgtgtaataataactcaacgcacagcacggcttgactgcgtaagtgaaagaaatgaacagacatgtttggctggagcatctcttgaagatctgatggccttcaatggaatgcaactatatggcagtaaacagaggcaagacaatagatgcgtaggctggccagggttcagcggatgataggttgaggctggtgtatttgacatccagccaatttggtgcaacacttgaaaaatgaattacatgcaagccttttctatttattacactatcgacgacaccgtccattgtttgatgaatttattatttattacatttggtacctttttttatacaaaaaaacatctttttagagtgatgaagccatttgagaccatggtttcgtatatggaatcagtcagattcttagggtgctcttggtagggctatggcgaaaacaatttgagctatgatttttgtggtgaattatgatggagctgaagctattttgaagaaaacgattgataaaatagtttggtgacttggcgttactattaaaaaagactgaaatat

SEQ ID NO: 68163 - DNA, 2877 bp, Zea Mays
cgaccagcccggaacctagacgctcatgggccggttctgccttatctccctccctcctagtcctaccacttcctcattccccacgtactctctcggctgctcgcttatggcgatcgaagctgcgcgcctctcaccgtccatcgccgccgccgccttcctcgccagccgcccccctcttgccctccgcccgttctcccttcgtcgcaggtttcccctcctccgcgtcctcgccaactcatcgggaggggacggacgcgtcgtcgctctgtcctcgtctgagctccgaaagcgccgaggcctgtcttcctcctctggggctgcggactccgcatctgacggggatgagaagctacgctcgcttcgtcgactcttcgcgcggcccgacgttgctattgacgcctacatcgtcccttcacaggacgcccaccagagcgaattcattgcagaatgcttcacgaggcgtgcctatctgactgggttcactggcagtgctggtacagctgtggtcacaaaaaataaggctgctctctggactgatggccgttattttcttcaggcagagaaggaattgagccaccactggacactcatgcgcagtgggaatcatggtgttccaactactagtgagtggttgaatgatgttttaccatctggttgccgagttggtattgatccgtttcttttctcatttgatgctgctgaagaactgaaggattcaatcgccaataagaatcatgagttagttttggttcagggcatgaacctagttgatgagatatggggagatgcaaggccaaatcccccaaaagaaccaactagggtgcatgacatcaaatatgctggtattgatgtgccatcaaagttgtccttcattaggtcacaacttgctgaaaatgggtgtgatgctgtggtaatttcaatgctcgatgaagttgcttggttgttgaacatgagaggaagtgatgtcccacattcaccagtattttatagctacctcattgtggaggttagcactgctacactatttgtagacaacagcaaagtttctaaagatgttctggagcaccttgagcaagctggtgtgaaacttaagccatatgaagcaattatttctgaagtagaaagaaaaaagatcttgcgacaattcaatagggaaaatataatttttgcaatgttgctgttgatcaaaacattgatcgctttgtcaagactggcagagaaaggtgcaaagctctggttggattcttcaagcgtgaatgcagccataattactgcatttaaatcaagttgtgacatgaaaaagaaaggaaaagcaggtgaagaagttggagaaaaagaagcatcttcaaacgaccggataactggagatcctagtgtccacaatggagtcataagtgctgtatacaatgtttcaccggttgcacttgccaagtcagttaaaaatgatgcagaaattgagggaatgaagaattcacacttaagagatgctgctgctttagcagaattctggtgctggctggaggaggaaatctgtaaaagtgtgccccttacagaggtgcaaattgctgaaaagcttcttgagtttcgtcaaaagcaagatggatttatcgagacaagcttcgacactataagtggttatggtgcaaatggtgctataatacactacagaccaaccccagagagctgcagctctgtaggaagtgacaatctgtttttgttagatagtggtgctcaatacattgatggaactactgacataaccagaacagtgcattttggtgaggcttccccaaggcaaaaggaatgcttcaccagagttttgcagggccatatagctctcgatcaagcagtgttccctgagagaactccaggctttgtgctagatgttctggcacggtcatctctgtggaagattggactggattatagacatggcacaggccatggagttggagctgcgctaaatgtccacgagggacctcagagcattagctatcgatatgggaatttgacagccttacagaagggcatgattgtcagcaacgagcctggttattatgaggacaactcatttggcattcgtatcgagaatttacttctggtaaaggagcttaatctggcaaattcgttcggtggaatttcataccttggttttgagaaactaacctttgttccaattcagagcaagcttattgagtcatccttgatgtcaccttcggagatcaattgggtcaatgattaccacgaagaagtctgggaaaaggtttcccctttgttgagtggccattctcgcgactggttatggaagaacactcgacctcttttagatgtgtaataataactcaacgcacagcacggcttgactgcgtaagtgaaagaaatgaacagacatgtttggctggagcatctcttgaagatctgatggccttcaatggaatgcaactatatggcagtaaacagaggcaagacaatagatgcgtaggctggccagggttcagcggatgataggttgaggctggtgtatttgacatccagccaatttggtgcaacacttgaaaaatgaattacatgcaagccttttctatttattacactatcgacgacaccgtccattgtttgatgaatttattatttattacatttggtacctttttttatacaaaaaaacatctttttagagtgatgaagccatttgagaccatggtttcgtatatggaatcagtcagattcttagggtgctcttggtagggctatggcgaaaacaatttgagctatgatttttgtggtgaattatgatggagctgaagctattttgaagaaaacgattgataaaatagtttggtgacttggcgttactattaaaaaagactgaaatat

SEQ ID NO: 68164 - DNA, 2203 bp, Zea Mays
cctagacgctcatgggccggttctgccttatctccctccctcctagtcctaccacttcctcattccccacgtactctctcggctgctcgcttatggcgatcgaagctgcgcgcctctcaccgtccatcgccgccgccgccttcctcgccagccgcccccctcttgccctccgcccgttctcccttcgtcgcaggtttcccctcctccgcgtcctcgccaactcatcgggaggggacggacgcgtcgtcgctctgtcctcgtctgagctccgaaagcgccgaggcctgtcttcctcctctggggctgcggactccgcatctgacggggatgagaagctacgctcgcttcgtcgactcttcgcgcggcccgacgttgctattgacgcctacatcgtcccttcacaggacgcccaccagagcgaattcattgcagaatgcttcacgaggcgtgcctatctgactgggttcactggcagtgctggtacagctgtggtcacaaaaaataaggctgctctctggactgatggccgttattttcttcaggcagagaaggaattgagccaccactggacactcatgcgcagtgggaatcatggtgttccaactactagtgagtggttgaatgatgttttaccatctggttgccgagttggtattgatccggatgcagtttcttttctcatttgatgctgctgaagaactgaaggattcaatcgccaataagaatcatgagttagttttggttcagggcatgaacctagttgatgagatatggggagatgcaaggccaaatcccccaaaagaaccaactagggtgcatgacatcaaatatgctggtattgatgtgccatcaaagttgtccttcattaggtcacaacttgctgaaaatgggtgtgatgctgtggtaatttcaatgctcgatgaagttgcttggttgttgaacatgagaggaagtgatgtcccacattcaccagtattttatagctacctcattgtggaggttagcactgctacactatttgtagacaacagcaaagtttctaaagatgttctggagcaccttgagcaagctggtgtgaaacttaagccatatgaagcaattatttctgaagtagaaagagaaaggtgcaaagctctggttggattcttcaagcgtgaatgcagccataattactgcatttaaatcaagttgtgacatgaaaaagaaaggaaaagcaggtgaagaagttggagaaaaagaagcatcttcaaacgaccggataactggagatcctagtgtccacaatggagtcataagtgctgtatacaatgtttcaccggttgcacttgccaagtcagttaaaaatgatgcagaaattgagggaatgaagaattcacacttaagaattctggtgctggctggaggaggaaatctgtaaaagtgtgccccttacagaggtgcaaattgctgaaaagcttcttgagtttcgtcaaaagcaagatggatttatcgagacaagcttcgacactataagtggttatggtgcaaatggtgctataatacactacagaccaaccccagagagctgcagctctgtaggaagtgacaatctgtttttgttagatagtggtgctcaatacattgatggaactactgacataaccagaacagtgcattttggtgaggcttccccaaggcaaaaggaatgcttcaccagagttttgcagggccatatagctctcgatcaagcagtgttccctgagagaactccaggctttgtgctagatgttctggcacggtcatctctgtggaagattggactggattatagacatggcacaggccatggagttggagctgcgctaaatgtccacgagggacctcagagcattagctatcgatatgggaatttgacagccttacagaagggcatgattgtcagcaacgagcctggttattatgaggacaactcatttggcattcgtatcgagaatttacttctggtaaaggagcttaatctggcaaattcgttcggtggaatttcataccttggttttgagaaactaacctttgttccaattcaggagctccacctctcaattaagaagaataggattgacccagttttaaggaaaatcgagcccaaaacctacacagggcgcacgacaaagaaaccggcggaaagccccacaaacaacctagacaacgacagcctcacactcac

SEQ ID NO: 68165 - DNA, 366 bp, Zea Mays
ataccaatttggattgactggagtctatggccctcggaagatgaatccacaattacttgtatggtgcatagaacaaaacaagtttgtgtaacctccaaccatgatcggcagaaccatctctttatcactctgcattaccaaagcagagccaaaataattatcaagacaagaattcaagtgtttagcacacgcatgatgtaaacttcttcatggtagtaccttagctgaaatgacctgcatcgcaatcaaatcaaatcaaatcaaagggcggtggagcagagcaggcaactggtggaagcacgaggagatagagagcgtgggcccatcgaagaactctgcatcgacgacgacggcgaggtcgagcgc

SEQ ID NO: 68166 - DNA, 1777 bp, Zea Mays
  misc_feature (1547)..(1646): n is a, c, g, or t
gcgagcgatctgcttagagttagcaaacaaaaatagaaaatagggcttcttcataggctccgttgctgcactaaaataaacaaacaacagtagaaagcaatgacaaggagttggcaaaatgaagaaaatcatccatctagagctaggaggcagaaaattcacataacttccaacacagagcaggatgactaatccgttctaggccctgccatcgcctccgccacatcgtcgcgccagaaaagtagcaaaaatatgaactccagaccacatactatatttggctgattacctggaaatcaaacaaaagtcacagattgtttacatcacaagtgtaatgccccaacattgtcatatgaattaggcacacataaacctgaaagggcgtccataaaaacacagaatttttttctctagtccgagcgattgggtgacatcgacgcggattggtcgacgggagacggaggcgggggcatggaaccaaggacgacacggttgggtgacatcgacgagctacgcccccgcggaggtgtggaggtggggtcaggcagaaatgcggtggatggagcggtgggtgcagcggagggatgagcggccattgcgtggggagcaagcgtggtttaggggttggggtgtcgcaggggcggaggcaggcgggggcacggtgaagcattttggacacccacaataggtccttatagagtagtagagattacttaccacgtagaacttatcattttggatctacacctggcaaggggtctcccctcatggagcgggtttttggatcatagtatgtagagttgacattgggattcaaaagatattttgtgtgtcttctctgatacacaaattcatgcggaaacataaaaatttaccatcaaagtttaaattggtcactaatacatccttgacattctagaaggaatgcaatctattttctgagcagtagtgcagtagttacctaacagtaccaggcttccaccaccgatagtgcgcacatgcttctctaccttaccaaagtctatatgggcattgtggtctttatttaattcagtaggaactaatagaatgatgcaggatattattaaatccatgtgtaaccgatgacacaccttatgaggaggaacccacctggccgtctcagatcagcaacaaaagatcactggagagattagttcagcaggatacatggggactgaatagtatataattcatgaataagttatttggatttttcccattatagttacagctgcaagttagtcggcttgtcgaacggttttacgaatgaagtttttaaggaatggttaccaaaaaacaaatgatttcttttgaaacaactttacattccacaaaccccttattgatggaagacacgggacatcatttgcaactattttaaaagatggcggaagaggaaatacctcacttgtaggctatgccataaacataaatgctaatgatgtaggcatttgacactcggacactgtacaggctcagatctgtcggctgaaaatggctgcgagggacaagcagcaacctttaannnnnnnnnnnnnnnnnnnnnnnnnnnnnnnnnnnnnnnnnnnnnnnnnnnnnnnnnnnnnnnnnnnnnnnnnnnnnnnnnnnnnnnnnnnnnnnnnnnncaagaaatctagaaaattcgtcggctacaatttgctgcgagggatcaagcgcaccttgaaccaagcggagcaatgtatcatctgtgtcacagaaaaaagaaacatcaaatcagtaatgcccaactcgttga

SEQ ID NO: 68167 - DNA, 1505 bp, Zea Mays
cgccatcacttttctcccttttttctttgtttttttgtgggcctgtccacgtgcatttgatccgtcccggccgcctacacgatgtccaagtcgggagcgctggatcttgcttctggcctcggagggaagatcaacaaggtggaagtcaagtcggccgtcgatgagtatgagaaatatcatggatactatggagggaaggaggaagcaaggaagtccaactatactgatatggttaataaatactatgatcttgccactagcttctatgagtatggttggggtgaatccttccactttgctcacagatggaatggagaatccttacgtgaaagcatcaagcgacatgagcattttcttgccctgcaacttggtttgaaaccaggaatgaaggttttagatgtgggctgtggaataggtggaccactgagagaaattgcaagatttagctcaacttcagttaccggattgaataacaacgaataccagataaccaggggaaaggagctcaaccgtttagcaggaattagtggaacatgtgattttgtcaaggcggacttcatgaagatgccgttcgatgacaacacttttgatgctgtttacgccattgaggcaacatgtcatgcacctgatccagttggttgctacaaggagatatatcgtgtgttgaagcctggccagtgctttgccgtgtacgagtggtgcattacggatcactatgatcctaacaatgcaacccacaaaaggatcaaggatgaaattgagcttggcaatggcctgccagatatcagaagcactcggcaatgtctccaggcagtaaaagacgccgggtttgaggttgtttgggataaggatcttgctgaagattctcccttgccttggtacttgcccttggatccaagccgattctccctgagtagcttccgtttgacctctgtgggacgcatgattacccgcacaatggtcaaggccctggagtacgttggtcttgctccgcagggcagtgagagggtctctaatttcctggagaaggctgcagaagggctggtagagggcggaaagaaggagatcttcacgccaatgtacttctttcttgttcggaagcctcttctggaatgagctcttggatcaccttttcagagagagaaggcaagtggtcatttcgaagaagccgaggagagggaacctggaatcaagaaaaccttcagctctcctgtgtaggaggaaagttaacgaacagtgtagtaactgttcagctttgtgtttattcagttgttttgctgcttgaggttattcgtttctaggtgggggttggaatccttttcgccataaacctctcagtggcataaataagatggtttgcataagagtacttcatggataccgtaagggctactactgaaagagaaatgtttaagcagcatggtatgtgagcaactagtgataattattccatccttttttttaatataaagcaggagttttgtcatgcgtcatgtctagggccg

SEQ ID NO: 68168 - DNA, 1494 bp, Zea Mays
cgcctgcctgcctgcctgagcgccaatgcagtgcatttgatccgtcccggccgcctacacgatgtccaagtcgggagcgctggatcttgcttctggcctcggagggaagatcaacaaggtggaagtcaagtcggccgtcgatgagtatgagaaatatcatggatactatggagggaaggaggaagcaaggaagtccaactatactgatatggttaataaatactatgatcttgccactagcttctatgagtatggttggggtgaatccttccactttgctcacagatggaatggagaatccttacgtgaaagcatcaagcgacatgagcattttcttgccctgcaacttggtttgaaaccaggaatgaaggttttagatgtgggctgtggaataggtggaccactgagagaaattgcaagatttagctcaacttcagttaccggattgaataacaacgaataccagataaccaggggaaaggagctcaaccgtttagcaggaattagtggaacatgtgattttgtcaaggcggacttcatgaagatgccgttcgatgacaacacttttgatgctgtttacgccattgaggcaacatgtcatgcacctgatccagttggttgctacaaggagatatatcgtgtgttgaagcctggccagtgctttgccgtgtacgagtggtgcattacggatcactatgatcctaacaatgcaacccacaaaaggatcaaggatgaaattgagcttggcaatggcctgccagatatcagaagcactcggcaatgtctccaggcagtaaaagacgccgggtttgaggttgtttgggataaggatcttgctgaagattctcccttgccttggtacttgcccttggatccaagccgattctccctgagtagcttccgtttgacctctgtgggacgcatgattacccgcacaatggtcaaggccctggagtacgttggtcttgctccgcagggcagtgagagggtctctaatttcctggagaaggctgcagaagggctggtagagggcggaaagaaggagatcttcacgccaatgtacttctttcttgttcggaagcctcttctggaatgagctcttggatcaccttttcaggtcagcaagagagagaaggcaagtggtcatttcgaagaagccgaggagagggaacctggaatcaagaaaaccttcagctctcctgtgtaggaggaaagttaacgaacagtgtagtaactgttcagctttgtgtttattcagttgttttgctgcttgaggttattcgtttctaggtgggggttggaatccttttcgccataaacctctcagtggcataaataagatggtttgcataagagtacttcatggataccgtaagggctactactgaaagagaaatgtttaagcagcatggtatgtgagcaactagtgataattattccatccttttttttaatataaagcaggagttttgtcatgcgtcatgtctagggccg

SEQ ID NO: 68169 - DNA, 1816 bp, Zea Mays
agacacgcggaggcgcgttcctccccatcctcggcaaccacgagtctctccttcctctcccattccactagattaccaccacctccacctccggctcctagcagaggcgcaccaggtcccactgccaccgcaaccaagcgcaccttgccggccgccgctcgtcctcatcttcaaatcccctcttgcacggctgcacctcctagcccgtagtgtggatccatccccacacggccctcgccaaatctactcctccagtcggcaggaaaggaacccctctctacctcggaggctcggacagagtgaacgcgccacccgccccggcgagcattgtccgctgccgcgcgccaccttccgctcacgggtgcatttgatccgtcccggccgcctacacgatgtccaagtcgggagcgctggatcttgcttctggcctcggagggaagatcaacaaggtggaagtcaagtcggccgtcgatgagtatgagaaatatcatggatactatggagggaaggaggaagcaaggaagtccaactatactgatatggttaataaatactatgatcttgccactagcttctatgagtatggttggggtgaatccttccactttgctcacagatggaatggagaatccttacgtgaaagcatcaagcgacatgagcattttcttgccctgcaacttggtttgaaaccaggaatgaaggttttagatgtgggctgtggaataggtggaccactgagagaaattgcaagatttagctcaacttcagttaccggattgaataacaacgaataccagataaccaggggaaaggagctcaaccgtttagcaggaattagtggaacatgtgattttgtcaaggcggacttcatgaagatgccgttcgatgacaacacttttgatgctgtttacgccattgaggcaacatgtcatgcacctgatccagttggttgctacaaggagatatatcgtgtgttgaagcctggccagtgctttgccgtgtacgagtggtgcattacggatcactatgatcctaacaatgcaacccacaaaaggatcaaggatgaaattgagcttggcaatggcctgccagatatcagaagcactcggcaatgtctccaggcagtaaaagacgccgggtttgaggttgtttgggataaggatcttgctgaagattctcccttgccttggtacttgcccttggatccaagccgattctccctgagtagcttccgtttgacctctgtgggacgcatgattacccgcacaatggtcaaggccctggagtacgttggtcttgctccgcagggcagtgagagggtctctaatttcctggagaaggctgcagaagggctggtagagggcggaaagaaggagatcttcacgccaatgtacttctttcttgttcggaagcctcttctggaatgagctcttggatcaccttttcagagagagaaggcaagtggtcatttcgaagaagccgaggagagggaacctggaatcaagaaaaccttcagctctcctgtgtaggaggaaagttaacgaacagtgtagtaactgttcagctttgtgtttattcagttgttttgctgcttgaggttattcgtttctaggtgggggttggaatccttttcgccataaacctctcagtggcataaataagatggtttgcataagagtacttcatggataccgtaagggctactactgaaagagaaatgtttaagcagcatggtatgtgagcaactagtgataattattccatccttttttttaatataaagcaggagttttgtcatgcgtcatgtctagggccg

SEQ ID NO: 68170 - DNA, 1684 bp, Zea Mays
agacacgcggaggcgcgttcctccccatcctcggcaaccacgagtctctccttcctctcccattccactagattaccaccacctccacctcgtcgtctcccaccaccgccgagcgcgagccctagcccgatctagccggcggcaggcaccagatcccgccgcccgcggcgtcccgggacgcgccccgccgaatccgccgctcctcgcactgcaacacgcccggaccacggtgcatttgatccgtcccggccgcctacacgatgtccaagtcgggagcgctggatcttgcttctggcctcggagggaagatcaacaaggtggaagtcaagtcggccgtcgatgagtatgagaaatatcatggatactatggagggaaggaggaagcaaggaagtccaactatactgatatggttaataaatactatgatcttgccactagcttctatgagtatggttggggtgaatccttccactttgctcacagatggaatggagaatccttacgtgaaagcatcaagcgacatgagcattttcttgccctgcaacttggtttgaaaccaggaatgaaggttttagatgtgggctgtggaataggtggaccactgagagaaattgcaagatttagctcaacttcagttaccggattgaataacaacgaataccagataaccaggggaaaggagctcaaccgtttagcaggaattagtggaacatgtgattttgtcaaggcggacttcatgaagatgccgttcgatgacaacacttttgatgctgtttacgccattgaggcaacatgtcatgcacctgatccagttggttgctacaaggagatatatcgtgtgttgaagcctggccagtgctttgccgtgtacgagtggtgcattacggatcactatgatcctaacaatgcaacccacaaaaggatcaaggatgaaattgagcttggcaatggcctgccagatatcagaagcactcggcaatgtctccaggcagtaaaagacgccgggtttgaggttgtttgggataaggatcttgctgaagattctcccttgccttggtacttgcccttggatccaagccgattctccctgagtagcttccgtttgacctctgtgggacgcatgattacccgcacaatggtcaaggccctggagtacgttggtcttgctccgcagggcagtgagagggtctctaatttcctggagaaggctgcagaagggctggtagagggcggaaagaaggagatcttcacgccaatgtacttctttcttgttcggaagcctcttctggaatgagctcttggatcaccttttcagagagagaaggcaagtggtcatttcgaagaagccgaggagagggaacctggaatcaagaaaaccttcagctctcctgtgtaggaggaaagttaacgaacagtgtagtaactgttcagctttgtgtttattcagttgttttgctgcttgaggttattcgtttctaggtgggggttggaatccttttcgccataaacctctcagtggcataaataagatggtttgcataagagtacttcatggataccgtaagggctactactgaaagagaaatgtttaagcagcatggtatgtgagcaactagtgataattattccatccttttttttaatataaagcaggagttttgtcatgcgtcatgtctagggccg

SEQ ID NO: 68171 - DNA, 772 bp, Zea Mays
tttatttatcttagcttttatttgttttattaaatttcttgttcgaaaaatccagtttaaaacaatattatttaccaattgtaccaaataacaatggtaggttctgacagtactagtcacgtttgccgctaaagctgcggcggcttattccgtagttacgaacaggaattatggatacaagcgggcatattattcctcaccactctcactcttgacaaaaataaatagatcgacggtacaagtctgcgagcatagttcgggaacagcactcctcagttcttgacggtggtgacatgccgcagaagcatctgaatgacatccggggagatgcttgcggcctgctgggtgagttgctcgatcttcgccgccgtttcttcctcgagacgcttgacgtttgcaccggagtcgccgctgctctctgcaaccttcctctgaaactcagcctccatctgggcacggtattcggctatttcccgctcagcctcctcttttgcttgcctgagcctcgctgacttggctctctagcggcattcacaatttgctgagcctcctgctccgcagccagcaactgctggatcccactctggcgcctgttcgcgtccatccctcagctcctgatctggatcggggcgggtcgattcggcagccggagtggaggacggtggagcggctgcggaggttggggaacagatcgcgttcgccgagccgagcgggagggcgacaggaaggcgattggtgaatggagatccgcatatacaacgtggctccacct

SEQ ID NO: 68172 - DNA, 2003 bp, Zea Mays
ttagcgtgtattgctggaggcagtctaatcctcaacgcaatatgctatcggacatcggtgtacaacagtggcgttcacctagcctctcatggtggggtatccactgccctttcgcacactctctcagtactactgtagtactagaatttcaacccatatgttgagcaagaagaccaccttcgggctttcctctctcctctcgtccactttctttctctcagtcacagaaacacattccctctctctctctccccgacggagtgcgagtgggagcgagcggcggcggcagcagcagcagccacggcccctgtcgccgtgtggtgtgcgggggcccccctctctccgctcctcccctaccataccaggctaccacccaaaaccacacagaaaagcaggcgcacgaacacgcacacgccaggcctgggcaccaccaccaccactgccttcccttgcccccggctcgccccagggcccaggccaagaatccccacccccaaatgccttcctccaccccttgctaccgccgcagcttcctcttcttggccctcctctcggcgtgctcctcggcgccggggacggtggacggcgccgggacagccggcggcggcggggatgccgcggcaatgcaggcgctgcggcgggacctggcgccgccgggctggggcccgggcgcggaccactgcgcgtggcgcggcgtcacctgcgccggcggcggcggcgcggtgaccgcgatcgacctgccgcgccgtgggctccggggggacttcgccgccgccgccgagctccgcgagctggcacgcctcgacctctccgccaactcgctcagcggcggagtcccgcaggcgctcggcgcgctcacccgcctcgagttcctcgacctctcgatgaacgcgctcgccggcgccgtgccgcccgcgctaggcggcgcgtcgaggctccggttcctgaacctctccaacaacgcgctgtccggcgccatccccgacgagctcaggggcctcaaggggctccaggagctgcagatatcgggcaacaacctgaccggcgccctccccggctggctcgcggggctgccgggcctccgcgtgctgtccgcctacgagaacgcgctgtccggcccatcgggtacgtcctctacgacgacgtcgcgctgctgctgcaccagcacctggcgaacggcaccctgctccagctgctgcacgacaacggcgagaggcggaaggctgactggcccaggctgctgtccatcgccgtcgacgtcgcccaggggctggcgttcctccaccaggtggccaccgtccacctcgacgtctgctcggggaacgtgttcctcgactcgcgctacaacgcgctgctcggcgaggtcgagatctccaggctgctggacccgtgctcagggtcgccatgctgtgcacggagcgcgcccccgcgaagcggccccggatgaagaaggtggtggaaatgctgcaggaggccagggacagctgagtggtctggttcctctgctcaatgatgtgtggttggctgcttggaacttggaacttggaagtcgaggcgagaaactctgaactgatcatcgttggagttcgagtatggagtccatccggtagcgtttgattctctgtatatattcggtaattagtatcccgatcatgcgccatggatcactggatgttcggtcttggagcaatgtctggaactctggatgcgtctttagcaaagcaattcggtgttctgcattgagggttttattttcatttgtttttgtttttgttttttttttgaaaaaaaaaggagagagaagagaaattctatcccgatgtcgtccgctagaggaggtggttgtctgggtgctatttcttctctctaggagagcctggcccatggcgacgtggcagggatggcctctgtctgctgaggaagaggaatcgtgcctgtctgttaatacatgtatatagtatttttcttatttggtagaagaatatctgtggcacagaaaatca

SEQ ID NO: 68173 - DNA, 1918 bp, Zea Mays
ctaacattccagctcccgcgccgctctaccgtcgtcgcttgagctctctcgctggcggaccgcccccctcatccctgcggtcacgcgcgacctccatgacctccaccgctgcaggtgcaggaagcggtagcttgaaccctccgcattcgaaccctagcggcgatggcggccctaggatccggtcgccgccggggaaagggaataagcccgtcgctctcgccgacatcactaacactgggaagcccaacgccgccagatccatcaccgtccccgacctcgttaaggagaacaccaagttgctgactctgctcaacgagaagacaaagattattgacctcagcagggttgagatatacaagctccgtcttgccctgcaagcatcaaagcaacagaatctacaccttacacaaaccaattcgcagatgcttgcggaaataaacacagggaaagatcgtattaagatgctgcagcatgagctttcttgtacaacagcactgcttaaagtaaaggattcagagcttgatagaaagaaaaacgctggtaatgtacagcagaagggagtaaaatctcaggtcttgaaaaccaaagcttccacagtagcagtagaggctcaccacgttggtgactcagtaaccagtggtgttgaacaccatgtggttgaatctcaatctgccgtatcatcaaatactgtctgccaggagccaccacaagatggaaagcaaaagagaatgcctcaacggagaaggtcttcaagactgaaccaaggttcctgtgagatcaggggagtatctcagaacacactgcatgagaaccctgtagtgcctgtagctccttccactttaagtcttgagaaacagtatggacaaaccactggaaaacatatgaagtcactgcaaaatgagtgcagtgcaactgtgcatgaagtaataatggcttcagaattcgagaaaactgagataaatgagctaccacaaaaaacagatctgaaggagataccagaagcatgttccagtgaaactgaagttcagtctcataaaattggtgataaggccttcaacagtaaacaaaaccatttgacaggaagccaatcatctttgtcattcaataccgttgacacccccgagccaccagaagacaacactgtcaagcggtgctcaaaaaaacggtcatccatagaggatgtaaatgccaaactagacacgattaccagtgagccattgcgacatgaagaaaagagaaaatctcgaaggaaaatatctgcaagactgaattcagtatcttctgagcacacagatatcgttgttgagactgagcacaaagatgttattgtttctttggccggttccacttcaaatgtctcaatggagcagcggacaaatcaagagcaggatggtgattgtttctcaaggaaatccaatgaaaatcagatattagggaggaggtctctaagacgagctgctgaaaaggtcgtctcttacaaggagatgcccttgaatgttaagatgcgacgaccttaactgccaggaggatgaccatggtgacatgttgtagcttgctgtcctgactagccttaagcaggtatccttctgtttttttgtgtgctccagaatcagtgattgcttgcacatctcgttctacttcaaacgaaccaccaaacagtggcgaagctagagcaaacttgaaggttgtacaattgttttgtgggtgcatagacatcatgtgatcgttgtgtatgtaagatgaaagtttgttctttataattagttctgcactttttagactccaacagcgaactcgttaaatataggggttggtcagctcctttctcttttcaacaagagactgtaaaaagtctgtaatacctaaaattctattttaggaaatgtcttctaaaaatgggttccccactttattcttt

SEQ ID NO: 68174 - DNA, 2133 bp, Zea Mays
ctaacattccagctcccgcgccgctctaccgtcgtcgcttgagctctctcgctggcggaccgcccccctcatccctgcggtcacgcgcgacctccatgacctccaccgctgcagaaggtgcaggaagcggtagcttgaaccctccgcattcgaaccctagcggcgatggcggccctaggatccggtcgccgccggggaaagggaataagcccgtcgctctcgccgacatcactaacactgggaagcccaacgccgccagatccatcaccgtccccgacctcgttaaggagaacaccaagttgctgactctgctcaacgagaagacaaagattattgacctcagcagggttgagatatacaagctccgtcttgccctgcaagcatcaaagcaacagaatctacaccttacacaaaccaattcgcagatgcttgcggaaataaacacagggaaagatcgtattaagatgctgcagcatgagctttcttgtacaacagcactgcttaaagtaaaggattcagagcttgatagaaagaaaaacgctggtaatgtacagcagaagggagtaaaatctcaggtcttgaaaaccaaagcttccacagtagcagtagaggctcaccacgttggtgactcagtaaccagtggtgttgaacaccatgtggttgaatctcaatctgccgtatcatcaaatactgtctgccaggagccaccacaagatggaaagcaaaagagaatgcctcaacggagaaggtcttcaagactgaaccaaggttcctgtgagatcaggggagtatctcagaacacactgcatgagaaccctgtagtgcctgtagctccttccactttaagtcttgagaaacagtatggacaaaccactggaaaacatatgaagtcactgcaaaatgagtgcagtgcaactgtgcatgaagtaataatggcttcagaattcgagaaaactgagataaatgagctaccacaaaaaacagatctgaaggtatgggacacatttaataaccagttaaagattaaagatggaaccatttgcagatttaatctacttgtttcctataatgttattcaggagataccagaagcatgttccagtgaaactgaagttcagtctcataaaattggtgataaggccttcaacagtaaacaaaaccatttgacaggaagccaatcatctttgtcattcaataccgttgacacccccgagccaccagaagacaacactgtcaagcggtgagggtcatccttttcattgttgtttaagatgcaattgtagccagaattgagaagactggtatattgctgggctgactctaactgtctggtctggttttcaccccagaagggccttttttgtggtgctcaaaaaaacggtcatccatagaggatgtaaatgccaaactagacacgattaccagtgagccattgcgacatgaagaaaagagaaaatctcgaaggaaaatatctgcaagactgaattcagtatcttctgagcacacagatatcgttgttgagactgagcacaaagatgttattgtttctttggccggttccacttcaaatgtctcaatggagcagcggacaaatcaagagcaggatggtgattgtttctcaaggaaatccaatgaaaatcagatattagggaggaggtctctaagacgagctgctgaaaaggtcgtctcttacaaggagatgcccttgaatgttaagatgcgacgaccttaactgccaggaggatgaccatggtgacatgttgtagcttgctgtcctgactagccttaagcaggtatccttctgtttttttgtgtgctccagaatcagtgattgcttgcacatctcgttctacttcaaacgaaccaccaaacagtggcgaagctagagcaaacttgaaggttgtacaattgttttgtgggtgcatagacatcatgtgatcgttgtgtatgtaagatgaaagtttgttctttataattagttctgcactttttagactccaacagcgaactcgttaaatataggggttggtcagctcctttctcttttcaacaagagactgtaaaaagtctgtaatacctaaaattctattttaggaaatgtcttctaaaaatgggttccccactttattcttt

SEQ ID NO: 68175 - DNA, 1982 bp, Zea Mays
ctaacattccagctcccgcgccgctctaccgtcgtcgcttgagctctctcgctggcggaccgcccccctcatccctgcggtcacgcgcgacctccatgacctccaccgctgcagaaggtgcaggaagcggtagcttgaaccctccgcattcgaaccctagcggcgatggcggccctaggatccggtcgccgccggggaaagggaataagcccgtcgctctcgccgacatcactaacactgggaagcccaacgccgccagatccatcaccgtccccgacctcgttaaggagaacaccaagttgctgactctgctcaacgagaagacaaagattattgacctcagcagggttgagatatacaagctccgtcttgccctgcaagcatcaaagcaacagaatctacaccttacacaaaccaattcgcagatgcttgcggaaataaacacagggaaagatcgtattaagatgctgcagcatgagctttcttgtacaacagcactgcttaaagtaaaggattcagagcttgatagaaagaaaaacgctggtaatgtacagcagaagggagtaaaatctcaggtcttgaaaaccaaagcttccacagtagcagtagaggctcaccacgttggtgactcagtaaccagtggtgttgaacaccatgtggttgaatctcaatctgccgtatcatcaaatactgtctgccaggagccaccacaagatggaaagcaaaagagaatgcctcaacggagaaggtcttcaagactgaaccaaggttcctgtgagatcaggggagtatctcagaacacactgcatgagaaccctgtagtgcctgtagctccttccactttaagtcttgagaaacagtatggacaaaccactggaaaacatatgaagtcactgcaaaatgagtgcagtgcaactgtgcatgaagtaataatggcttcagaattcgagaaaactgagataaatgagctaccacaaaaaacagatctgaaggagataccagaagcatgttccagtgaaactgaagttcagtctcataaaattggtgataaggccttcaacagtaaacaaaaccatttgacaggaagccaatcatctttgtcattcaataccgttgacacccccgagccaccagaagacaacactgtcaagcggtgagggtcatccttttcattgttgtttaagatgcaattgtagccagaattgagaagactggtgctcaaaaaaacggtcatccatagaggatgtaaatgccaaactagacacgattaccagtgagccattgcgacatgaagaaaagagaaaatctcgaaggaaaatatctgcaagactgaattcagtatcttctgagcacacagatatcgttgttgagactgagcacaaagatgttattgtttctttggccggttccacttcaaatgtctcaatggagcagcggacaaatcaagagcaggatggtgattgtttctcaaggaaatccaatgaaaatcagatattagggaggaggtctctaagacgagctgctgaaaaggtcgtctcttacaaggagatgcccttgaatgttaagatgcgacgaccttaactgccaggaggatgaccatggtgacatgttgtagcttgctgtcctgactagccttaagcaggtatccttctgtttttttgtgtgctccagaatcagtgattgcttgcacatctcgttctacttcaaacgaaccaccaaacagtggcgaagctagagcaaacttgaaggttgtacaattgttttgtgggtgcatagacatcatgtgatcgttgtgtatgtaagatgaaagtttgttctttataattagttctgcactttttagactccaacagcgaactcgttaaatataggggttggtcagctcctttctcttttcaacaagagactgtaaaaagtctgtaatacctaaaattctattttaggaaatgtcttctaaaaatgggttccccactttattcttt

SEQ ID NO: 68176 - DNA, 1860 bp, Zea Mays
ctaacattccagctcccgcgccgctctaccgtcgtcgcttgagctctctcgctggcggaccgcccccctcatccctgcggtcacgcgcgacctccatgacctccaccgctgcagaaggtgcaggaagcggtagcttgaaccctccgcattcgaaccctagcggcgatggcggccctaggatccggtcgccgccggggaaagggaataagcccgtcgctctcgccgacatcactaacactgggaagcccaacgccgccagatccatcaccgtccccgacctcgttaaggagaacaccaagttgctgactctgctcaacgagaagacaaagattattgacctcagcagggttgagatatacaagctccgtcttgccctgcaagcatcaaagcaacagaatctacaccttacacaaaccaattcgcagatgcttgcggaaataaacacagggaaagatcgtattaagatgctgcagcatgagctttcttgtacaacagcactgcttaaagtaaaggattcagagcttgatagaaagaaaaacgctggtaatgtacagcagaagggagtaaaatctcaggtcttgaaaaccaaagcttccacagtagcagtagaggctcaccacgttggtgactcagtaaccagtggtgttgaacaccatgtggttgaatctcaatctgccgtatcatcaaatactgtctgccaggagccaccacaagatggaaagcaaaagagaatgcctcaacggagaaggtcttcaagactgaaccaaggttcctgtgagatcaggggagtatctcagaacacactgcatgagaaccctgtagtgcctgtagctccttccactttaagtcttgagaaacagtatggacaaaccactggaaaacatatgaagtcactgcaaaatgagtgcagtgcaactgtgcatgaagtaataatggcttcagaattcgagaaaactgagataaatgagctaccacaaaaaacagatctgaaggagataccagaagcatgttccagtgaaactgaagttcagtctcataaaattggtgataaggccttcaacagtaaacaaaaccatttgacaggaagccaatgtgctcaaaaaaacggtcatccatagaggatgtaaatgccaaactagacacgattaccagtgagccattgcgacatgaagaaaagagaaaatctcgaaggaaaatatctgcaagactgaattcagtatcttctgagcacacagatatcgttgttgagactgagcacaaagatgttattgtttctttggccggttccacttcaaatgtctcaatggagcagcggacaaatcaagagcaggatggtgattgtttctcaaggaaatccaatgaaaatcagatattagggaggaggtctctaagacgagctgctgaaaaggtcgtctcttacaaggagatgcccttgaatgttaagatgcgacgaccttaactgccaggaggatgaccatggtgacatgttgtagcttgctgtcctgactagccttaagcaggtatccttctgtttttttgtgtgctccagaatcagtgattgcttgcacatctcgttctacttcaaacgaaccaccaaacagtggcgaagctagagcaaacttgaaggttgtacaattgttttgtgggtgcatagacatcatgtgatcgttgtgtatgtaagatgaaagtttgttctttataattagttctgcactttttagactccaacagcgaactcgttaaatataggggttggtcagctcctttctcttttcaacaagagactgtaaaaagtctgtaatacctaaaattctattttaggaaatgtcttctaaaaatgggttccccactttattcttt

SEQ ID NO: 68177 - DNA, 2136 bp, Zea Mays
ctaacattccagctcccgcgccgctctaccgtcgtcgcttgagctctctcgctggcggaccgcccccctcatccctgcggtcacgcgcgacctccatgacctccaccgctgcagaaggtgcaggaagcggtagcttgaaccctccgcattcgaaccctagcggcgatggcggccctaggatccggtcgccgccggggaaagggaataagcccgtcgctctcgccgacatcactaacactgggaagcccaacgccgccagatccatcaccgtccccgacctcgttaaggagaacaccaagttgctgactctgctcaacgagaagacaaagattattgacctcagcagggttgagatatacaagctccgtcttgccctgcaagcatcaaagcaacagaatctacaccttacacaaaccaattcgcagatgcttgcgtgtcatatcggagagatggatactgtcaatgttaatggacctacattaaagaaaacattgcacacagtgcttattttgtggtgcgaaatagagcactgcctaatatttctgttttgtgcttcattgcaggaaataaacacagggaaagatcgtattaagatgctgcagcatgagctttcttgtacaacagcactgcttaaagtaaaggattcagagcttgatagaaagaaaaacgctggtaatgtacagcagaagggagtaaaatctcaggtcttgaaaaccaaagcttccacagtagcagtagaggctcaccacgttggtgactcagtaaccagtggtgttgaacaccatgtggttgaatctcaatctgccgtatcatcaaatactgtctgccaggagccaccacaagatggaaagcaaaagagaatgcctcaacggagaaggtcttcaagactgaaccaaggttcctgtgagatcaggggagtatctcagaacacactgcatgagaaccctgtagtgcctgtagctccttccactttaagtcttgagaaacagtatggacaaaccactggaaaacatatgaagtcactgcaaaatgagtgcagtgcaactgtgcatgaagtaataatggcttcagaattcgaggtgctatatgtctatgttgcagttttttagctctagtcattggtgttaatacgtatcttttgacaactggtgtttgatcctatcagaaaactgagataaatgagctaccacaaaaaacagatctgaaggagataccagaagcatgttccagtgaaactgaagttcagtctcataaaattggtgataaggccttcaacagtaaacaaaaccatttgacaggaagccaatcatctttgtcattcaataccgttgacacccccgagccaccagaagacaacactgtcaagcggtgctcaaaaaaacggtcatccatagaggatgtaaatgccaaactagacacgattaccagtgagccattgcgacatgaagaaaagagaaaatctcgaaggaaaatatctgcaagactgaattcagtatcttctgagcacacagatatcgttgttgagactgagcacaaagatgttattgtttctttggccggttccacttcaaatgtctcaatggagcagcggacaaatcaagagcaggatggtgattgtttctcaaggaaatccaatgaaaatcagatattagggaggaggtctctaagacgagctgctgaaaaggtcgtctcttacaaggagatgcccttgaatgttaagatgcgacgaccttaactgccaggaggatgaccatggtgacatgttgtagcttgctgtcctgactagccttaagcaggtatccttctgtttttttgtgtgctccagaatcagtgattgcttgcacatctcgttctacttcaaacgaaccaccaaacagtggcgaagctagagcaaacttgaaggttgtacaattgttttgtgggtgcatagacatcatgtgatcgttgtgtatgtaagatgaaagtttgttctttataattagttctgcactttttagactccaacagcgaactcgttaaatataggggttggtcagctcctttctcttttcaacaagagactgtaaaaagtctgtaatacctaaaattctattttaggaaatgtcttctaaaaatgggttccccactttattcttt

SEQ ID NO: 68178 - DNA, 2202 bp, Zea Mays
ctcaaacaccccctaacattccagctcccgcgccgctctaccgtcgtcgcttgagctctctcgctggcggaccgcccccctcatccctgcggtcacgcgcgacctccatgacctccaccgctgcagaaggtgcaggaagcggtagcttgaaccctccgcattcgaaccctagcggcgatggcggccctaggatccggtcgccgccggggaaagggaataagcccgtcgctctcgccgacatcactaacactgggaagcccaacgccgccagatccatcaccgtccccgacctcgttaaggagaacaccaagttgctgactctgctcaacgagaagacaaagattattgacctcagcagggttgagatatacaagctccgtcttgccctgcaagcatcaaagcaacagaatctacaccttacacaaaccaattcgcagatgcttgcggaaataaacacagggaaagatcgtattaagatgctgcagcatgagctttcttgtacaacagcactgcttaaagtaaaggattcagagcttgatagaaagaaaaacgctggtaatgtacagcagaagggagtaaaatctcaggtcttgaaaaccaaagcttccacagtagcagtagaggctcaccacgttggtgactcagtaaccagtggtgttgaacaccatgtggttgaatctcaatctgccgtatcatcaaatactgtctgccaggagccaccacaagatggaaagcaaaagagaatgcctcaacggagaaggtcttcaagactgaaccaaggttcctgtgagatcaggggagtatctcagaacacactgcatgagaaccctgtagtgcctgtagctccttccactttaagtcttgagaaacagtatggacaaaccactggaaaacatatgaagtcactgcaaaatgagtgcagtgcaactgtgcatgaagtaataatggcttcagaattcgagaaaactgagataaatgagctaccacaaaaaacagatctgaaggagataccagaagcatgttccagtgaaactgaagttcagtctcataaaattggtgataaggccttcaacagtaaacaaaaccatttgacaggaagccaatgtaacgaccctcatttttctgttttccaacaattcttatgtgtcacttattttataattatccagttcattccagttgaaacaaattccagtatccagtttgaatagacacattctggtttatttgttcccataagcacatattgtatgctagaaatttaatcttaaaccccaagggtacttcccaagtacatgctaattgctgcagctttttctgaacacagattttgacaaataattaatcttcacccaattacaattcttttacagcatctttgtcattcaataccgttgacacccccgagccaccagaagacaacactgtcaagcggtgctcaaaaaaacggtcatccatagaggatgtaaatgccaaactagacacgattaccagtgagccattgcgacatgaagaaaagagaaaatctcgaaggaaaatatctgcaagactgaattcagtatcttctgagcacacagatatcgttgttgagactgagcacaaagatgttattgtttctttggccggttccacttcaaatgtctcaatggagcagcggacaaatcaagagcaggatggtgattgtttctcaaggaaatccaatgaaaatcagatattagggaggaggtctctaagacgagctgctgaaaaggtcgtctcttacaaggagatgcccttgaatgttaagatgcgacgaccttaactgccaggaggatgaccatggtgacatgttgtagcttgctgtcctgactagccttaagcaggtatccttctgtttttttgtgtgctccagaatcagtgattgcttgcacatctcgttctacttcaaacgaaccaccaaacagtggcgaagctagagcaaacttgaaggttgtacaattgttttgtgggtgcatagacatcatgtgatcgttgtgtatgtaagatgaaagtttgttctttataattagttctgcactttttagactccaacagcgaactcgttaaatataggggttggtcagctcctttctcttttcaacaagagactgtaaaaagtctgtaatacctaaaattctattttaggaaatgtcttctaaaaatgggttccccactttattcttt

SEQ ID NO: 68179 - DNA, 4277 bp, Zea Mays
cacccttcttccacctccgcctcactggcacacatgctccccgacaccgcctcccgccaactcggcgttaaactaatcccaacccagcccaccagaggcacgcgaattaactaggatcaaaaccgtctcgccgctgcaataatcttttgtcaattcttaatccctcgcgtcgacagcgacagcggaaccaactcacgttgccgcggcttcctccatcggtgcggtgccctgtccttttctctcgtccctcctccccccgtatagttaagccccgccccgctactactactactagcagcagcagcgctctcgcagcgggagatgcggtgttgatccgtgccccgctcggatctcgggactggtgccggctctgcccaggccccaggctccaggccagctccctcgacgtttctcggcgagctcgcttgccatggagggcgacgcggacggcgtgaagtcggggaggcgcggtggcggacaggtgtgccagatctgcggcgacggcgtgggcaccacggcggagggggacgtcttcgccgcctgcgacgtctgcgggtttccggtgtgccgcccctgctacgagtacgagcgcaaggacggcacgcaggcgtgcccccagtgcaagaccaagtacaagcgccacaaggggagcccggcgatccgtggggaggaaggagacgacactgatgccgatagcgacttcaactaccctgcatctggcaatgaagaccagaagcagaagattgccgacagaatgcgcagctggcgcatgaacgctgggggcagcggggatgttggtcgccccaagtatgacagtggcgagatcgggcttaccaagtatgacagtggcgagatccctcggggatacatcccatcagtcactaacagccagatctcaggagaaatccctggtgcttcccctgaccatcatatgatgtccccaactgggaacattggcaagcgtgctccatttccctatgtgaaccattcgccaaatccgtcaagggagttctctggtagcattgggaatgttgcctggaaagagagggttgatggctggaaaatgaagcaggacaaggggacgattcccatgacgaatggcacaagcattgctccctctgagggtcggggtgttggtgatattgatgcatcaactgattacaacatggaagatgccttattgaacgacgaaactcgacagcctctatctaggaaagttccacttccttcctccaggataaatccatacaggatggtcattgtgctgcgattgattgttctaagcatcttcttgcactaccgtatcacaaatcctgtgcgcaatgcatacccattatggcttctatctgttatatgtgagatctggtttgctctttcgtggatattggatcagttccctaagtggtttccaatcaaccgggagacgtaccttgataggctggcattaaggtatgaccgggaaggtgagccatctcagttggctgctgttgacattttcgtcagtacagtcgacccaatgaaggagcctcctcttgtcactgccaataccgtgctatccattcttgctgtggattaccctgtggataaggtctcttgctatgtatctgatgatggagctgcgatgctgacatttgatgcactagctgagacttcagagtttgctagaaaatgggtaccatttgttaagaagtacaacattgaacctagagctcctgaatggtacttctcccagaaaattgattacttgaaggacaaagtgcacccttcatttgttaaagaccgccgggccatgaagagagaatatgaagaattcaaagttagggtaaatggccttgttgctaaggcacagaaagttcctgaggaaggatggatcatgcaagatggcacaccatggccaggaaacaataccagggaccatcctggaatgattcaggttttccttggtcacagtggtggccttgatactgagggcaatgagctaccccgtttggtctatgtttctcgtgaaaagcgtcctggattccagcatcacaagaaagctggtgccatgaatgctcttgttcgtgtctcagctgtgcttaccaatggacaatacatgttgaatcttgattgtgatcactacattaacaacagtaaggctctcagggaagctatgtgcttccttatggaccctaacctaggaaggagtgtctgctacgtccagtttccccagagattcgatggcattgacaggaatgatcgatatgccaacaggaacaccgtgtttttcgatattaacttgagaggtcttgatggcatccaaggaccagtttatgtcggaactggctgtgttttcaaccgaacagctctatatggttatgagcccccaattaagcagaagaagggtggtttcttgtcatcactatgtggcggtaggaagaaggcaagcaaatcaaagaagggctcggacaagaagaagtcgcagaagcatgtggacagttctgtgccagtattcaaccttgaagatatagaggagggagttgaaggcgctggatttgacgacgagaaatcacttcttatgtctcaaatgagcctggagaagagatttggccagtccgcagcgtttgttgcctccactctgatggagtatggtggtgttcctcagtccgcaactccggagtctcttctgaaagaagctatccatgttataagctgtggctatgaggacaagactgaatggggaactgaggtaacgtggcaaaatccccacataatctcttctgaaagattagaagctagctatacatgcatgttataacttgataaccatatgctagcagtaacaagttcatttcaaaatcgcagatcgggtggatctacggttctgtgacagaagacattctcaccggattcaagatgcacgcgcgaggctggcggtcgatctactgcatgcccaagcggccagctttcaaggggtctgcccccatcaatctttcggaccgtctgaaccaggtgctccggtgggctcttgggtccgtggagatcctcttcagccggcactgccccctgtggtacggctacggagggcggctcaagttcctggagagattcgcgtacatcaacaccaccatctacccgctcacgtccatcccgcttctcatctactgcatcctgcccgccatctgtctgctcaccggaaagttcatcattccagagcaacttcgccagcatctggttcatctccctcttcatctcgatcttcgccacgggcatcctggagatgaggtggagcggggtgggcatcgacgagtggtggaggaacgagcagttctgggtgatcgggggcatctccgcgcacctcttcgccgtgttccagggcctgctcaaggtgctggccggcatcgacaccaacttcaccgtcacctccaaggcctcggacgaggacggcgacttcgcggagctgtacatgttcaagtggacgacgctcctgatcccgcccaccaccatcctgatcatcaacctggtcggcgtcgtcgccggcatctcctacgccatcaacagcggataccagtcgtggggcccgctcttcggcaagctcttcttcgccttctgggtcatcgtccacctgtacccgttcctcaagggcctcatgggcaggcagaaccgcaccccgaccatcgtcgtcgtctgggccatcctgctggcgtccatcttctccttgctgtgggttcgcatcgaccccttcaccacccgcgtcactggcccggatacccagacgtgtggcatcaactgctagggaagtggaaggtttgtactttgtagaaacggaggaataccacgtgccatctgttgtctgttaagttatatatatataagcagcaagtggcgttatttacagctacgtacagaccagtggatattgtttaccacaaagttttacttgtgttaatatgcattcttttgttgatataatttatactttgtggagagttgctgacagacgagttttgtatgctacgaaaaacaaagaaattactccctccgtccagtgaagcaagtcgttttagcattgcaaggcgttagagtagtaacatgagagattacaagaataccctccattaaatgtaaagattcttgtgtcacatacggatgatgtagctagtcatctcagcatttattgattttttatccatcaggcgccaaaagtagaaatgtgtacacaggcacacgcgccaaacacattaacaaaaacgaaaaacaggcacacgcgccaaacacattaacaaaaacgaaaaaca

SEQ ID NO: 68180 - DNA, 3930 bp, Zea Mays
cacccttcttccacctccgcctcactggcacacatgctccccgacaccgcctcccgccaactcggcgttaaactaatcccaacccagcccaccagaggcacgcgaattaactaggatcaaaaccgtctcgccgctgcaataatcttttgtcaattcttaatccctcgcgtcgacagcgacagcggaaccaactcacgttgccgcggcttcctccatcgaagtcggggaggcgcggtggcggacaggtgtgccagatctgcggcgacggcgtgggcaccacggcggagggggacgtcttcgccgcctgcgacgtctgcgggtttccggtgtgccgcccctgctacgagtacgagcgcaaggacggcacgcaggcgtgcccccagtgcaagaccaagtacaagcgccacaaggggagcccggcgatccgtggggaggaaggagacgacactgatgccgatagcgacttcaactaccctgcatctggcaatgaagaccagaagcagaagattgccgacagaatgcgcagctggcgcatgaacgctgggggcagcggggatgttggtcgccccaagtatgacagtggcgagatcgggcttaccaagtatgacagtggcgagatccctcggggatacatcccatcagtcactaacagccagatctcaggagaaatccctggtgcttcccctgaccatcatatgatgtccccaactgggaacattggcaagcgtgctccatttccctatgtgaaccattcgccaaatccgtcaagggagttctctggtagcattgggaatgttgcctggaaagagagggttgatggctggaaaatgaagcaggacaaggggacgattcccatgacgaatggcacaagcattgctccctctgagggtcggggtgttggtgatattgatgcatcaactgattacaacatggaagatgccttattgaacgacgaaactcgacagcctctatctaggaaagttccacttccttcctccaggataaatccatacaggatggtcattgtgctgcgattgattgttctaagcatcttcttgcactaccgtatcacaaatcctgtgcgcaatgcatacccattatggcttctatctgttatatgtgagatctggtttgctctttcgtggatattggatcagttccctaagtggtttccaatcaaccgggagacgtaccttgataggctggcattaaggtatgaccgggaaggtgagccatctcagttggctgctgttgacattttcgtcagtacagtcgacccaatgaaggagcctcctcttgtcactgccaataccgtgctatccattcttgctgtggattaccctgtggataaggtctcttgctatgtatctgatgatggagctgcgatgctgacatttgatgcactagctgagacttcagagtttgctagaaaatgggtaccatttgttaagaagtacaacattgaacctagagctcctgaatggtacttctcccagaaaattgattacttgaaggacaaagtgcacccttcatttgttaaagaccgccgggccatgaagagagaatatgaagaattcaaagttagggtaaatggccttgttgctaaggcacagaaagttcctgaggaaggatggatcatgcaagatggcacaccatggccaggaaacaataccagggaccatcctggaatgattcaggttttccttggtcacagtggtggccttgatactgagggcaatgagctaccccgtttggtctatgtttctcgtgaaaagcgtcctggattccagcatcacaagaaagctggtgccatgaatgctcttgttcgtgtctcagctgtgcttaccaatggacaatacatgttgaatcttgattgtgatcactacattaacaacagtaaggctctcagggaagctatgtgcttccttatggaccctaacctaggaaggagtgtctgctacgtccagtttccccagagattcgatggcattgacaggaatgatcgatatgccaacaggaacaccgtgtttttcgatattaacttgagaggtcttgatggcatccaaggaccagtttatgtcggaactggctgtgttttcaaccgaacagctctatatggttatgagcccccaattaagcagaagaagggtggtttcttgtcatcactatgtggcggtaggaagaaggcaagcaaatcaaagaagggctcggacaagaagaagtcgcagaagcatgtggacagttctgtgccagtattcaaccttgaagatatagaggagggagttgaaggcgctggatttgacgacgagaaatcacttcttatgtctcaaatgagcctggagaagagatttggccagtccgcagcgtttgttgcctccactctgatggagtatggtggtgttcctcagtccgcaactccggagtctcttctgaaagaagctatccatgttataagctgtggctatgaggacaagactgaatggggaactgagatcgggtggatctacggttctgtgacagaagacattctcaccggattcaagatgcacgcgcgaggctggcggtcgatctactgcatgcccaagcggccagctttcaaggggtctgcccccatcaatctttcggaccgtctgaaccaggtgctccggtgggctcttgggtccgtggagatcctcttcagccggcactgccccctgtggtacggctacggagggcggctcaagttcctggagagattcgcgtacatcaacaccaccatctacccgctcacgtccatcccgcttctcatctactgcatcctgcccgccatctgtctgctcaccggaaagttcatcattccagagatcagcaacttcgccagcatctggttcatctccctcttcatctcgatcttcgccacgggcatcctggagatgaggtggagcggggtgggcatcgacgagtggtggaggaacgagcagttctgggtgatcgggggcatctccgcgcacctcttcgccgtgttccagggcctgctcaaggtgctggccggcatcgacaccaacttcaccgtcacctccaaggcctcggacgaggacggcgacttcgcggagctgtacatgttcaagtggacgacgctcctgatcccgcccaccaccatcctgatcatcaacctggtcggcgtcgtcgccggcatctcctacgccatcaacagcggataccagtcgtggggcccgctcttcggcaagctcttcttcgccttctgggtcatcgtccacctgtacccgttcctcaagggcctcatgggcaggcagaaccgcaccccgaccatcgtcgtcgtctgggccatcctgctggcgtccatcttctccttgctgtgggttcgcatcgaccccttcaccacccgcgtcactggcccggatacccagacgtgtggcatcaactgctagggaagtggaaggtttgtactttgtagaaacggaggaataccacgtgccatctgttgtctgttaagttatatatatataagcagcaagtggcgttatttacagctacgtacagaccagtggatattgtttaccacaaagttttacttgtgttaatatgcattcttttgttgatataatttatactttgtggagagttgctgacagacgagttttgtatgctacgaaaaacaaagaaattactccctccgtccagtgaagcaagtcgttttagcattgcaaggcgttagagtagtaacatgagagattacaagaataccctccattaaatgtaaagattcttgtgtcacatacggatgatgtagctagtcatctcagcatttattgattttttatccatcaggcgccaaaagtagaaatgtgtacacaggcacacgcgccaaacacattaacaaaaacgaaaaacaggcacacgcgccaaacacattaacaaaaacgaaaaaca

SEQ ID NO: 68181 - DNA, 3976 bp, Zea Mays
cacccttcttccacctccgcctcactggcacacatgctccccgacaccgcctcccgccaactcggcgttaaactaatcccaacccagcccaccagaggcacgcgaattaactaggatcaaaaccgtctcgccgctgcaataatcttttgtcaattcttaatccctcgcgtcgacagcgacagcggaaccaactcacgttgccgcggcttcctccatcgaagtcggggaggcgcggtggcggacaggtgtgccagatctgcggcgacggcgtgggcaccacggcggagggggacgtcttcgccgcctgcgacgtctgcgggtttccggtgtgccgcccctgctacgagtacgagcgcaaggacggcacgcaggcgtgcccccagtgcaagaccaagtacaagcgccacaaggggagcccggcgatccgtggggaggaaggagacgacactgatgccgatagcgacttcaactaccctgcatctggcaatgaagaccagaagcagaagattgccgacagaatgcgcagctggcgcatgaacgctgggggcagcggggatgttggtcgccccaagtatgacagtggcgagatcgggcttaccaagtatgacagtggcgagatccctcggggatacatcccatcagtcactaacagccagatctcaggagaaatccctggtgcttcccctgaccatcatatgatgtccccaactgggaacattggcaagcgtgctccatttccctatgtgaaccattcgccaaatccgtcaagggagttctctggtagcattgggaatgttgcctggaaagagagggttgatggctggaaaatgaagcaggacaaggggacgattcccatgacgaatggcacaagcattgctccctctgagggtcggggtgttggtgatattgatgcatcaactgattacaacatggaagatgccttattgtgagtttcaacaccctccttcagctcactcatgttttacaggatggaacgacgaaactcgacagcctctatctaggaaagttccacttccttcctccaggataaatccatacaggatggtcattgtgctgcgattgattgttctaagcatcttcttgcactaccgtatcacaaatcctgtgcgcaatgcatacccattatggcttctatctgttatatgtgagatctggtttgctctttcgtggatattggatcagttccctaagtggtttccaatcaaccgggagacgtaccttgataggctggcattaaggtatgaccgggaaggtgagccatctcagttggctgctgttgacattttcgtcagtacagtcgacccaatgaaggagcctcctcttgtcactgccaataccgtgctatccattcttgctgtggattaccctgtggataaggtctcttgctatgtatctgatgatggagctgcgatgctgacatttgatgcactagctgagacttcagagtttgctagaaaatgggtaccatttgttaagaagtacaacattgaacctagagctcctgaatggtacttctcccagaaaattgattacttgaaggacaaagtgcacccttcatttgttaaagaccgccgggccatgaagagagaatatgaagaattcaaagttagggtaaatggccttgttgctaaggcacagaaagttcctgaggaaggatggatcatgcaagatggcacaccatggccaggaaacaataccagggaccatcctggaatgattcaggttttccttggtcacagtggtggccttgatactgagggcaatgagctaccccgtttggtctatgtttctcgtgaaaagcgtcctggattccagcatcacaagaaagctggtgccatgaatgctcttgttcgtgtctcagctgtgcttaccaatggacaatacatgttgaatcttgattgtgatcactacattaacaacagtaaggctctcagggaagctatgtgcttccttatggaccctaacctaggaaggagtgtctgctacgtccagtttccccagagattcgatggcattgacaggaatgatcgatatgccaacaggaacaccgtgtttttcgatattaacttgagaggtcttgatggcatccaaggaccagtttatgtcggaactggctgtgttttcaaccgaacagctctatatggttatgagcccccaattaagcagaagaagggtggtttcttgtcatcactatgtggcggtaggaagaaggcaagcaaatcaaagaagggctcggacaagaagaagtcgcagaagcatgtggacagttctgtgccagtattcaaccttgaagatatagaggagggagttgaaggcgctggatttgacgacgagaaatcacttcttatgtctcaaatgagcctggagaagagatttggccagtccgcagcgtttgttgcctccactctgatggagtatggtggtgttcctcagtccgcaactccggagtctcttctgaaagaagctatccatgttataagctgtggctatgaggacaagactgaatggggaactgagatcgggtggatctacggttctgtgacagaagacattctcaccggattcaagatgcacgcgcgaggctggcggtcgatctactgcatgcccaagcggccagctttcaaggggtctgcccccatcaatctttcggaccgtctgaaccaggtgctccggtgggctcttgggtccgtggagatcctcttcagccggcactgccccctgtggtacggctacggagggcggctcaagttcctggagagattcgcgtacatcaacaccaccatctacccgctcacgtccatcccgcttctcatctactgcatcctgcccgccatctgtctgctcaccggaaagttcatcattccagagatcagcaacttcgccagcatctggttcatctccctcttcatctcgatcttcgccacgggcatcctggagatgaggtggagcggggtgggcatcgacgagtggtggaggaacgagcagttctgggtgatcgggggcatctccgcgcacctcttcgccgtgttccagggcctgctcaaggtgctggccggcatcgacaccaacttcaccgtcacctccaaggcctcggacgaggacggcgacttcgcggagctgtacatgttcaagtggacgacgctcctgatcccgcccaccaccatcctgatcatcaacctggtcggcgtcgtcgccggcatctcctacgccatcaacagcggataccagtcgtggggcccgctcttcggcaagctcttcttcgccttctgggtcatcgtccacctgtacccgttcctcaagggcctcatgggcaggcagaaccgcaccccgaccatcgtcgtcgtctgggccatcctgctggcgtccatcttctccttgctgtgggttcgcatcgaccccttcaccacccgcgtcactggcccggatacccagacgtgtggcatcaactgctagggaagtggaaggtttgtactttgtagaaacggaggaataccacgtgccatctgttgtctgttaagttatatatatataagcagcaagtggcgttatttacagctacgtacagaccagtggatattgtttaccacaaagttttacttgtgttaatatgcattcttttgttgatataatttatactttgtggagagttgctgacagacgagttttgtatgctacgaaaaacaaagaaattactccctccgtccagtgaagcaagtcgttttagcattgcaaggcgttagagtagtaacatgagagattacaagaataccctccattaaatgtaaagattcttgtgtcacatacggatgatgtagctagtcatctcagcatttattgattttttatccatcaggcgccaaaagtagaaatgtgtacacaggcacacgcgccaaacacattaacaaaaacgaaaaacaggcacacgcgccaaacacattaacaaaaacgaaaaaca

SEQ ID NO: 68182 - DNA, 1723 bp, Zea Mays
atcaggttcacctgaaagttgacggtagccagttagttccagttgaaagaagcggacctaagggttttggtggatcagtggaccagaacgcagtcctcgaatttattgatgctgggcatgacatgatcctggcggcagattcctctgcctctgatctcattcgtggcattgcaacagagtgtggggttgattttgatgaggatccagaggcaatggttattgaccatatgaactatgccgtcacagatgttgaaggtgatcacaccttgattgctggtgacgatcttatccattcggatgtgatactagggtctgaaaagattgaggctcctgtattgtttcgaggaattggacacatggctaatccatcaaacagtttggttctatcagcctctccatcagcatattcagctaatccaaagactaagttagcgtctcctccatcgctcactgggtcagctatatcattggtttcggttatgcaggcaagaaataatgctcgggtgctgttatctggatcactcgatctgtttagcaaccggttcctgaagtctggtgttcaaaaggctgatagcaaaacaagatatgagagagctggaaacgagcaatttgtggcagagataagcaaatgggttttccatgagaggggacatctaaaggctgttaatgttaggcatcacaaggttggggagaccaatgaaccaggcatgtaccgcattaatgatgacctggaatactctgttgagatctatgaatggtccggaacaagctggaagccgtatgttgctgatgatgtgcagcttcaatttttcatgatgagcccttacgttctgaaaactatgtcgactgacaacaagggtttgtattcaacaaccttcaaagttccagatgtttatggagttttccagttcaaagttgagtaccaaagactgggatatactggtctgtcttttacaaagcagattccagtacgtccttacagacataatgagtatgagagattcataacatcagcgtacccatactacaccgcctcattttcaacaatgggtgctttcttcgtattctcgtttgtgtacctgtaccacaaataaaggactcatgggagcgcacaagtctctggaggctgacgtgaccaagatctgtgggcactgaatgttgtgctataagccaagagttacccggcgccaattttatggaaccatgtttttgtactgccaacttagataacatttgacgaccgtgaccgcactcatgggaaatttactcgtgctaggatgttcgatctgcccccacttcttttttttctttcttggaccctttctgatcagcacttgtcagaacgtttacagtctatagcactgaaacgtgattttggaagtactacacccccagtaattttgcactcgtgcccagttctgatttctgatcctgggtgtggacttcaaagtctgcctattatacttccgcaattgttcgtgtttataacctggacgcacgtattttttttcacgggcttattgaacatgatgctcgaagagtgcactaaacatgccatgcacgtattttttttcacgggcttgttgaacatgaatgctcgaagagtgcactaaacatgccgcttcatgtacagaattcgaaatttgtaatgttatatgagcattttctcgggcagtggatgcattttaggtgccgtttggttcacatttgtcatgtacatttg

SEQ ID NO: 68183 - DNA, 4321 bp, Zea Mays
cctcatttgtagctacaaatgaggggttttttgggctccccagaaacaatctgtcgctttaagggatctgttggagaaaggattaaaatctacccccacttattatttagatgtcccttaaaactgattttgaggagtcgttttatggagagctcttggagatgctcttaagcttttggattgaactggtcaattaaataaaataattgttgctcgctcctatattccacgtcagaggctcgatgtgagggggagtgttagaatataatataagtgaattgtctacctccttccaccagcttaagcttttggattgaactggttggtgtatgcaatttaatagtatataaaaaggattctgattctgccggatagaatctcatcatgatgttacatttttccttgaaagtgtgttattccattaaacattcttcattttcttgtaggaattaaaccagggtcggatgttttgtgtatgtttcattaccttttctttttagtctgaactattttgcattcgttgtgtagcaaaaccacatttaggaactctaatgttatttgagagccttctagtaggtttctgtattgtagccaagttacaccaacatgggatctggaatggtgctataactgaatatgaactttatccttgtctcccaggttgcatctatcaagcaaagatgttcttcctccgccttctatctggagggattcttgggtggcaacaagatctgtcatgaaagtgaagacgtttcagatcattgtcctgcaagggatcattggctcgttgccgtggactgctatagttttcttcacaatgtggttcgaactcattggttttgacaacaacagctcagcagcactgaacagcctcttcgccatcgggtgtgccagcggagcatttattggcggggtgatagcagatcacctgtcaaagtacttcccagattcggcacgggtcatgtgtgcccagtttagtgccttcatgggcatcccgttttcttggatcctcctcacagtcatcccccagtcagttgactactggtatgccttcgccgtcacgcttttcttcatgggcatcacgataagctggtgcgccacctcggcaaacaaccccatgttcgccgaggtggtccctcccaagcaccgcaccatgatctacgccttcgaccgcgcgttcgagggctcattcgcctcgttggctgcccctgccgtgggcctaatcaccgagaagatctatggctatgataccaagaccgtgaaccttgcgaacgggtcagcggaaggggcgtacgcgctctcaagggggctgctgaccatgatgatcgtgcctttcggtgtgtgtgtcctgttctacagccccctgtaccttgtgttcaagcacgacagagagaacgctaaatttgccagcttcaaggagcaggagctagtatgatcaatgatcatacgaatgtgcttccttggtccgcattcataacctctcgtcatcccgggctggagctttgcgtgatgattatgaagataactgccttgatcggcattcagaacatctggtcataccgtcctgggtcattctgagtttcttgttgagattatggcaattgtgccacggagaggtgtggatcaacgtttgttctggcagattttgaagattgttataaggcgacctttttttttgtgctgatcacctatccagaaagccatggcttctcccgacgactgatttgtgttgttaagggatgatttgcttttttgcatggcttctcctgacgactgatttgtgttgttaagggatgatttgcttttttggtaattcttagtcttacaagagaaccccaaggagaagcatatgatatgatctgaaccatgctgaattgctgatgttacatgtagttggaacagatcactaataatgttctgatcactgggatcagctcgttttcagtaatctttctggtttttttttcgcaggaaaaaatttctgtgttttttttgggaaaaacacaggaaattttgcttctgttgattatgaaagcagtgctagcagtttgatttcatctattaaaactatgtgcggaagcaaattccgcaaagaagcaaaggaagaaaatggaaaatgctagctgcctcacgtgggacctcctgtcagagacagacccctttgcacgctttggagccgcagcaaagctcgaactcgatccgggtctccgggccattcgatctccgatcggacggcccagacagctcacttcctctccacctttgcacgctatagctcctctccgagtcgtcgtctccgtcgctgcctgctctgcttgctgcgccactccaaacccaacccaaaacccccacacgagatctgcgcagcaatggcgacgcggtgccacgtcctgctcctcctcgccgccgccttcgcgtccctcctcgcgctcgtggccgcggaagggggcgaagaggggccccgcgggcgccggctgctcgtcctcctggacgacctggccgtgcggtcgtcgcactcggccttcttcggctcgctccaggcgcgtgggttcgatctcgacttccgcctcgctgacgatccaaagctctcgctccaccgctacggccagtacctctacgacggcctcgtgctcttcgccccctccacaccacgttttggtggatcagtggaccagaacgcagtcctcgaatttattgatgctgggcatgacatgatcctggcggcagattcctctgcctctgatctcattcgtggcattgcaacagagtgtggggttgattttgatgaggatccagaggcaatggttattgaccatatgaactatgccgtcacagatgttgaaggtgatcacaccttgattgctggtgacgatcttatccattcggatgtgatactagggtctgaaaagattgaggctcctgtattgtttcgaggaattggacacatggctaatccatcaaacagtttggttctgaaggttctatcagcctctccatcagcatattcagctaatccaaagactaagttagcgtctcctccatcgctcactgggtcagctatatcattggtttcggttatgcaggcaagaaataatgctcgggtgctgttatctggatcactcgatctgtttagcaaccggttcctgaagtctggtgttcaaaaggctgatagcaaaacaagatatgagagagctggaaacgagcaatttgtggcagagataagcaaatgggttttccatgagaggggacatctaaaggctgttaatgttaggcatcacaaggttggggagaccaatgaaccaggcatgtaccgcattaatgatgacctggaatactctgttgagatctatgaatggtccggaacaagctggaagccgtatgttgctgatgatgtgcagcttcaatttttcatgatgagcccttacgttctgaaaactatgtcgactgacaacaagggtttgtattcaacaaccttcaaagttccagatgtttatggagttttccagttcaaagttgagtaccaaagactgggatatactggtctgtcttttacaaagcagattccagtacgtccttacagacataatgagtatgagagattcataacatcagcgtacccatactacaccgcctcattttcaacaatgggtgctttcttcgtattctcgtttgtgtacctgtaccacaaataaaggactcatgggagcgcacaagtctctggaggctgacgtgaccaagatctgtgggcactgaatgttgtgctataagccaagagttacccggcgccaattttatggaaccatgtttttgtactgccaacttagataacatttgacgaccgtgaccgcactcatgggaaatttactcgtgctaggatgttcgatctgcccccacttcttttttttctttcttggaccctttctgatcagcacttgtcagaacgtttacagtctatagcactgaaacgtgattttggaagtactacacccccagtaattttgcactcgtgcccagttctgatttctgatcctgggtgtggacttcaaagtctgcctattatacttccgcaattgttcgtgtttataacctggacgcacgtattttttttcacgggcttattgaacatgatgctcgaagagtgcactaaacatgccatgcacgtattttttttcacgggcttgttgaacatgaatgctcgaagagtgcactaaacatgccgcttcatgtacagaattcgaaatttgtaatgttatatgagcattttctcgggcagtggatgcattttaggtgccgtttggttcacatttgtcatgtacatttg

SEQ ID NO: 68184 - DNA, 2713 bp, Zea Mays
cctcatttgtagctacaaatgaggggttttttgggctccccagaaacaatctgtcgctttaagggatctgttggagaaaggattaaaatctacccccacttattatttagatgtcccttaaaactgattttgaggagtcgttttatggagagctcttggagatgctcttaagcttttggattgaactggtcaattaaataaaataattgttgctcgctcctatattccacgtcagaggctcgatgtgagggggagtgttagaatataatataagtgaattgtctacctccttccaccagcttaagcttttggattgaactggttggtgtatgcaatttaatagtatataaaaaggattctgattctgccggatagaatctcatcatgatgttacatttttccttgaaagtgtgttattccattaaacattcttcattttcttgtaggaattaaaccagggtcggatgttttgtgtatgtttcattaccttttctttttagtctgaactattttgcattcgttgtgtagcaaaaccacatttaggaactctaatgttatttgagagccttctagtaggtttctgtattgtagccaagttacaccaacatgggatctggaatggtgctataactgaatatgaactttatccttgtctcccaggttgcatctatcaagcaaagatgttcttcctccgccttctatctggagggattcttgggtggcaacaagatctgtcatgaaagtgaagacgtttcagatcattgtcctgcaagggatcattggctcgttgccgtggactgctatagttttcttcacaatgtggttcgaactcattggttttgacaacaacagctcagcagcactgaacagcctcttcgccatcgggtgtgccagcggagcatttattggcggggtgatagcagatcacctgtcaaagtacttcccagattcggcacgggtcatgtgtgcccagtttagtgccttcatgggcatcccgttttcttggatcctcctcacagtcatcccccagtcagttgactactggttttggtggatcagtggaccagaacgcagtcctcgaatttattgatgctgggcatgacatgatcctggcggcagattcctctgcctctgatctcattcgtggcattgcaacagagtgtggggttgattttgatgaggatccagaggcaatggttattgaccatatgaactatgccgtcacagatgttgaaggtgatcacaccttgattgctggtgacgatcttatccattcggatgtgatactagggtctgaaaagattgaggctcctgtattgtttcgaggaattggacacatggctaatccatcaaacagtttggttctgaaggttctatcagcctctccatcagcatattcagctaatccaaagactaagttagcgtctcctccatcgctcactgggtcagctatatcattggtttcggttatgcaggcaagaaataatgctcgggtgctgttatctggatcactcgatctgtttagcaaccggttcctgaagtctggtgttcaaaaggctgatagcaaaacaagatatgagagagctggaaacgagcaatttgtggcagagataagcaaatgggttttccatgagaggggacatctaaaggctgttaatgttaggcatcacaaggttggggagaccaatgaaccaggcatgtaccgcattaatgatgacctggaatactctgttgagatctatgaatggtccggaacaagctggaagccgtatgttgctgatgatgtgcagcttcaatttttcatgatgagcccttacgttctgaaaactatgtcgactgacaacaagggtttgtattcaacaaccttcaaagttccagatgtttatggagttttccagttcaaagttgagtaccaaagactgggatatactggtctgtcttttacaaagcagattccagtacgtccttacagacataatgagtatgagagattcataacatcagcgtacccatactacaccgcctcattttcaacaatgggtgctttcttcgtattctcgtttgtgtacctgtaccacaaataaaggactcatgggagcgcacaagtctctggaggctgacgtgaccaagatctgtgggcactgaatgttgtgctataagccaagagttacccggcgccaattttatggaaccatgtttttgtactgccaacttagataacatttgacgaccgtgaccgcactcatgggaaatttactcgtgctaggatgttcgatctgcccccacttcttttttttctttcttggaccctttctgatcagcacttgtcagaacgtttacagtctatagcactgaaacgtgattttggaagtactacacccccagtaattttgcactcgtgcccagttctgatttctgatcctgggtgtggacttcaaagtctgcctattatacttccgcaattgttcgtgtttataacctggacgcacgtattttttttcacgggcttattgaacatgatgctcgaagagtgcactaaacatgccatgcacgtattttttttcacgggcttgttgaacatgaatgctcgaagagtgcactaaacatgccgcttcatgtacagaattcgaaatttgtaatgttatatgagcattttctcgggcagtggatgcattttaggtgccgtttggttcacatttgtcatgtacatttg

SEQ ID NO: 68185 - DNA, 4410 bp, Zea Mays
cccatgggccatggaagatggtgatctcgtcaccaagcgcttgttgctcgtgcaaccggcgttgacgttcccgccgccccccactttctcggtgggcactgggcagggggggcaaggaaagcgagaacaaacaagatacttggtttctctgtatctctcatcctcatcaatctggcttcaattatggagcgtgctgatgagaatctccttccagcagtttacaaggaagtcagtgcagccttcaatgctggtcctgcagatctgggatacctcacctttgtaatgaactttctgaagtcaatagcatctcccttggcaggtatccttgctctgcactatgatcggccaatagtgcttgcaatagggactgttttctgggccttatcaacaggggctgtcggtgttagccagcgttttgggcaggttgcattctggagagccgtaaatggcctagggcttgccattgtaataccagcgcttcagtcgttcattgctgatagctataaagatggtacgcgtggtgcagggttcggtttgttaagcctcattggcgctgtaggtggtataggtggtagtattttggcaacaatcatggctggaaaggactattggggattcccaggatggcgtgttgcatttatgatggtcgcacttgtcagcttgataattggaattcttgtgtacttatatgcgactgatccaagaagaatacctggcaatcgccttcttgacgaagatgagtatgagaggttgcatctatcaagcaaagatgttcttcctccgccttctatctggagggattcttgggtggcaacaagatctgtcatgaaagtgaagacgtttcagatcattgtcctgcaagggatcattggctcgttgccgtggactgctatagttttcttcacaatgtggttcgaactcattggttttgacaacaacagctcagcagcactgaacagcctcttcgccatcgggtgtgccagcggagcatttattggcggggtgatagcagatcacctgtcaaagtacttcccagattcggcacgggtcatgtgtgcccagtttagtgccttcatgggcatcccgttttcttggatcctcctcacagtcatcccccagtcagttgactactggtatgccttcgccgtcacgcttttcttcatgggcatcacgataagctggtgcgccacctcggcaaacaaccccatgttcgccgaggtggtccctcccaagcaccgcaccatgatctacgccttcgaccgcgcgttcgagggctcattcgcctcgttggctgcccctgccgtgggcctaatcaccgagaagatctatggctatgataccaagaccgtgaaccttgcgaacgggtcagcggaaggggcgtacgcgctctcaagggggctgctgaccatgatgatcgtgcctttcggtgtgtgtgtcctgttctacagccccctgtaccttgtgttcaagcacgacagagagaacgctaaatttgccagcttcaaggagcaggagctagtatgatcaatgatcatacgaatgtgcttccttggtccgcattcataacctctcgtcatcccgggctggagctttgcgtgatgattatgaagataactgccttgatcggcattcagaacatctggtcataccgtcctgggtcattctgagtttcttgttgagattatggcaattgtgccacggagaggtgtggatcaacgtttgttctggcagattttgaagattgttataaggcgacctttttttttgtgctgatcacctatccagaaagccatggcttctcccgacgactgatttgtgttgttaagggatgatttgcttttttgcatggcttctcctgacgactgatttgtgttgttaagggatgatttgcttttttggtaattcttagtcttacaagagaaccccaaggagaagcatatgatatgatctgaaccatgctgaattgctgatgttacatgtagttggaacagatcactaataatgttctgatcactgggatcagctcgttttcagtaatctttctggtttttttttcgcaggaaaaaatttctgtgttttttttgggaaaaacacaggaaattttgcttctgttgattatgaaagcagtgctagcagtttgatttcatctattaaaactatgtgcggaagcaaattccgcaaagaagcaaaggaagaaaatggaaaatgctagctgcctcacgtgggacctcctgtcagagacagacccctttgcacgctttggagccgcagcaaagctcgaactcgatccgggtctccgggccattcgatctccgatcggacggcccagacagctcacttcctctccacctttgcacgctatagctcctctccgagtcgtcgtctccgtcgctgcctgctctgcttgctgcgccactccaaacccaacccaaaacccccacacgagatctgcgcagcaatggcgacgcggtgccacgtcctgctcctcctcgccgccgccttcgcgtccctcctcgcgctcgtggccgcggaagggggcgaagaggggccccgcgggcgccggctgctcgtcctcctggacgacctggccgtgcggtcgtcgcactcggccttcttcggctcgctccaggcgcgtgggttcgatctcgacttccgcctcgctgacgatccaaagctctcgctccaccgctacggccagtacctctacgacggcctcgtgctcttcgccccctccacaccacgttttggtggatcagtggaccagaacgcagtcctcgaatttattgatgctgggcatgacatgatcctggcggcagattcctctgcctctgatctcattcgtggcattgcaacagagtgtggggttgattttgatgaggatccagaggcaatggttattgaccatatgaactatgccgtcacagatgttgaaggtgatcacaccttgattgctggtgacgatcttatccattcggatgtgatactagggtctgaaaagattgaggctcctgtattgtttcgaggaattggacacatggctaatccatcaaacagtttggttctgaaggttctatcagcctctccatcagcatattcagctaatccaaagactaagttagcgtctcctccatcgctcactgggtcagctatatcattggtttcggttatgcaggcaagaaataatgctcgggtgctgttatctggatcactcgatctgtttagcaaccggttcctgaagtctggtgttcaaaaggctgatagcaaaacaagatatgagagagctggaaacgagcaatttgtggcagagataagcaaatgggttttccatgagaggggacatctaaaggctgttaatgttaggcatcacaaggttggggagaccaatgaaccaggcatgtaccgcattaatgatgacctggaatactctgttgagatctatgaatggtccggaacaagctggaagccgtatgttgctgatgatgtgcagcttcaatttttcatgatgagcccttacgttctgaaaactatgtcgactgacaacaagggtttgtattcaacaaccttcaaagttccagatgtttatggagttttccagttcaaagttgagtaccaaagactgggatatactggtctgtcttttacaaagcagattccagtacgtccttacagacataatgagtatgagagattcataacatcagcgtacccatactacaccgcctcattttcaacaatgggtgctttcttcgtattctcgtttgtgtacctgtaccacaaataaaggactcatgggagcgcacaagtctctggaggctgacgtgaccaagatctgtgggcactgaatgttgtgctataagccaagagttacccggcgccaattttatggaaccatgtttttgtactgccaacttagataacatttgacgaccgtgaccgcactcatgggaaatttactcgtgctaggatgttcgatctgcccccacttcttttttttctttcttggaccctttctgatcagcacttgtcagaacgtttacagtctatagcactgaaacgtgattttggaagtactacacccccagtaattttgcactcgtgcccagttctgatttctgatcctgggtgtggacttcaaagtctgcctattatacttccgcaattgttcgtgtttataacctggacgcacgtattttttttcacgggcttattgaacatgatgctcgaagagtgcactaaacatgccatgcacgtattttttttcacgggcttgttgaacatgaatgctcgaagagtgcactaaacatgccgcttcatgtacagaattcgaaatttgtaatgttatatgagcattttctcgggcagtggatgcattttaggtgccgtttggttcacatttgtcatgtacatttg

SEQ ID NO: 68186 - DNA, 4543 bp, Zea Mays
atcctgccttgagtgttcgtgcaacgctgcccctgccgcgtcgtcttctggaccgcttctccactccgcccagctcgcagtcgcagctcgctcaaagcagcacagcagcaagcagaaggaagaaaaagagcagcgagagccgagaagagaagcgcgccgccgctcgagctcatcccgccgccggacacaccgcatggccatgaggcacagggcgcggtcctcccccacctccccgctcaccccgtcctccagcgcaagaacaaacaagatacttggtttctctgtatctctcatcctcatcaatctggcttcaattatggagcgtgctgatgagaatctccttccagcagtttacaaggaagtcagtgcagccttcaatgctggtcctgcagatctgggatacctcacctttgtaatgaactttctgaagtcaatagcatctcccttggcaggtatccttgctctgcactatgatcggccaatagtgcttgcaatagggactgttttctgggccttatcaacaggggctgtcggtgttagccagcgttttgggcaggttgcattctggagagccgtaaatggcctagggcttgccattgtaataccagcgcttcagtcgttcattgctgatagctataaagatggtacgcgtggtgcagggttcggtttgttaagcctcattggcgctgtaggtggtataggtggtagtattttggcaacaatcatggctggaaaggactattggggattcccaggatggcgtgttgcatttatgatggtcgcacttgtcagcttgataattggaattcttgtgtacttatatgcgactgatccaagaagaatacctggcaatcgccttcttgacgaagatgagtatgagaggttgcatctatcaagcaaagatgttcttcctccgccttctatctggagggattcttgggtggcaacaagatctgtcatgaaagtgaagacgtttcagatcattgtcctgcaagggatcattggctcgttgccgtggactgctatagttttcttcacaatgtggttcgaactcattggttttgacaacaacagctcagcagcactgaacagcctcttcgccatcgggtgtgccagcggagcatttattggcggggtgatagcagatcacctgtcaaagtacttcccagattcggcacgggtcatgtgtgcccagtttagtgccttcatgggcatcccgttttcttggatcctcctcacagtcatcccccagtcagttgactactggtatgccttcgccgtcacgcttttcttcatgggcatcacgataagctggtgcgccacctcggcaaacaaccccatgttcgccgaggtggtccctcccaagcaccgcaccatgatctacgccttcgaccgcgcgttcgagggctcattcgcctcgttggctgcccctgccgtgggcctaatcaccgagaagatctatggctatgataccaagaccgtgaaccttgcgaacgggtcagcggaaggggcgtacgcgctctcaagggggctgctgaccatgatgatcgtgcctttcggtgtgtgtgtcctgttctacagccccctgtaccttgtgttcaagcacgacagagagaacgctaaatttgccagcttcaaggagcaggagctagtatgatcaatgatcatacgaatgtgcttccttggtccgcattcataacctctcgtcatcccgggctggagctttgcgtgatgattatgaagataactgccttgatcggcattcagaacatctggtcataccgtcctgggtcattctgagtttcttgttgagattatggcaattgtgccacggagaggtgtggatcaacgtttgttctggcagattttgaagattgttataaggcgacctttttttttgtgctgatcacctatccagaaagccatggcttctcccgacgactgatttgtgttgttaagggatgatttgcttttttgcatggcttctcctgacgactgatttgtgttgttaagggatgatttgcttttttggtaattcttagtcttacaagagaaccccaaggagaagcatatgatatgatctgaaccatgctgaattgctgatgttacatgtagttggaacagatcactaataatgttctgatcactgggatcagctcgttttcagtaatctttctggtttttttttcgcaggaaaaaatttctgtgttttttttgggaaaaacacaggaaattttgcttctgttgattatgaaagcagtgctagcagtttgatttcatctattaaaactatgtgcggaagcaaattccgcaaagaagcaaaggaagaaaatggaaaatgctagctgcctcacgtgggacctcctgtcagagacagacccctttgcacgctttggagccgcagcaaagctcgaactcgatccgggtctccgggccattcgatctccgatcggacggcccagacagctcacttcctctccacctttgcacgctatagctcctctccgagtcgtcgtctccgtcgctgcctgctctgcttgctgcgccactccaaacccaacccaaaacccccacacgagatctgcgcagcaatggcgacgcggtgccacgtcctgctcctcctcgccgccgccttcgcgtccctcctcgcgctcgtggccgcggaagggggcgaagaggggccccgcgggcgccggctgctcgtcctcctggacgacctggccgtgcggtcgtcgcactcggccttcttcggctcgctccaggcgcgtgggttcgatctcgacttccgcctcgctgacgatccaaagctctcgctccaccgctacggccagtacctctacgacggcctcgtgctcttcgccccctccacaccacgttttggtggatcagtggaccagaacgcagtcctcgaatttattgatgctgggcatgacatgatcctggcggcagattcctctgcctctgatctcattcgtggcattgcaacagagtgtggggttgattttgatgaggatccagaggcaatggttattgaccatatgaactatgccgtcacagatgttgaaggtgatcacaccttgattgctggtgacgatcttatccattcggatgtgatactagggtctgaaaagattgaggctcctgtattgtttcgaggaattggacacatggctaatccatcaaacagtttggttctgaaggttctatcagcctctccatcagcatattcagctaatccaaagactaagttagcgtctcctccatcgctcactgggtcagctatatcattggtttcggttatgcaggcaagaaataatgctcgggtgctgttatctggatcactcgatctgtttagcaaccggttcctgaagtctggtgttcaaaaggctgatagcaaaacaagatatgagagagctggaaacgagcaatttgtggcagagataagcaaatgggttttccatgagaggggacatctaaaggctgttaatgttaggcatcacaaggttggggagaccaatgaaccaggcatgtaccgcattaatgatgacctggaatactctgttgagatctatgaatggtccggaacaagctggaagccgtatgttgctgatgatgtgcagcttcaatttttcatgatgagcccttacgttctgaaaactatgtcgactgacaacaagggtttgtattcaacaaccttcaaagttccagatgtttatggagttttccagttcaaagttgagtaccaaagactgggatatactggtctgtcttttacaaagcagattccagtacgtccttacagacataatgagtatgagagattcataacatcagcgtacccatactacaccgcctcattttcaacaatgggtgctttcttcgtattctcgtttgtgtacctgtaccacaaataaaggactcatgggagcgcacaagtctctggaggctgacgtgaccaagatctgtgggcactgaatgttgtgctataagccaagagttacccggcgccaattttatggaaccatgtttttgtactgccaacttagataacatttgacgaccgtgaccgcactcatgggaaatttactcgtgctaggatgttcgatctgcccccacttcttttttttctttcttggaccctttctgatcagcacttgtcagaacgtttacagtctatagcactgaaacgtgattttggaagtactacacccccagtaattttgcactcgtgcccagttctgatttctgatcctgggtgtggacttcaaagtctgcctattatacttccgcaattgttcgtgtttataacctggacgcacgtattttttttcacgggcttattgaacatgatgctcgaagagtgcactaaacatgccatgcacgtattttttttcacgggcttgttgaacatgaatgctcgaagagtgcactaaacatgccgcttcatgtacagaattcgaaatttgtaatgttatatgagcattttctcgggcagtggatgcattttaggtgccgtttggttcacatttgtcatgtacatttg

SEQ ID NO: 68187 - DNA, 4529 bp, Zea Mays
atcctgccttgagtgttcgtgcaacgctgcccctgccgcgtcgtcttctggaccgcttctccactccgcccagctcgcagtcgcagctcgctcaaagcagcacagcagcaagcagaaggaagaaaaagagcagcgagagccgagaagagaagcgcgccgccgctcgagctcatcccgccgccggacacaccgcatggccatgaggcacagggcgcggtcctcccccacctccccgctcaccccgtcctccagcgcaagaacaaacaagatacttggtttctctgtatctctcatcctcatcaatctggcttcaattatggagcgtgctgatgagaatctccttccagcagtttacaaggaagtcagtgcagccttcaatgctggtcctgcagatctgggatacctcacctttgtaatgaactttctgaagtcaatagcatctcccttggcaggtatccttgctctgcactatgatcggccaatagtgcttgcaatagggactgttttctgggccttatcaacaggggctgtcggtgttagccagcgttttgggcaggttgcattctggagagccgtaaatggcctagggcttgccattgtaataccagcgcttcagtcgttcattgctgatagctataaagatggtacgcgtggtgcagggttcggtttgttaagcctcattggcgctgtaggtggtataggtggtagtattttggcaacaatcatggctggaaaggactattggggattcccaggatggcgtgttgcatttatgatggtcgcacttgtcagcttgataattggaattcttgtgtacttatatgcgactgatccaagaagaatacctggcaatcgccttcttgacgaagatgagtatgagaggttgcatctatcaagcaaagatgttcttcctccgccttctatctggagggattcttgggtggcaacaagatctgtcatgaaagtgaagacgtttcagatcattgtcctgcaagggatcattggctcgttgccgtggactgctatagttttcttcacaatgtggttttgacaacaacagctcagcagcactgaacagcctcttcgccatcgggtgtgccagcggagcatttattggcggggtgatagcagatcacctgtcaaagtacttcccagattcggcacgggtcatgtgtgcccagtttagtgccttcatgggcatcccgttttcttggatcctcctcacagtcatcccccagtcagttgactactggtatgccttcgccgtcacgcttttcttcatgggcatcacgataagctggtgcgccacctcggcaaacaaccccatgttcgccgaggtggtccctcccaagcaccgcaccatgatctacgccttcgaccgcgcgttcgagggctcattcgcctcgttggctgcccctgccgtgggcctaatcaccgagaagatctatggctatgataccaagaccgtgaaccttgcgaacgggtcagcggaaggggcgtacgcgctctcaagggggctgctgaccatgatgatcgtgcctttcggtgtgtgtgtcctgttctacagccccctgtaccttgtgttcaagcacgacagagagaacgctaaatttgccagcttcaaggagcaggagctagtatgatcaatgatcatacgaatgtgcttccttggtccgcattcataacctctcgtcatcccgggctggagctttgcgtgatgattatgaagataactgccttgatcggcattcagaacatctggtcataccgtcctgggtcattctgagtttcttgttgagattatggcaattgtgccacggagaggtgtggatcaacgtttgttctggcagattttgaagattgttataaggcgacctttttttttgtgctgatcacctatccagaaagccatggcttctcccgacgactgatttgtgttgttaagggatgatttgcttttttgcatggcttctcctgacgactgatttgtgttgttaagggatgatttgcttttttggtaattcttagtcttacaagagaaccccaaggagaagcatatgatatgatctgaaccatgctgaattgctgatgttacatgtagttggaacagatcactaataatgttctgatcactgggatcagctcgttttcagtaatctttctggtttttttttcgcaggaaaaaatttctgtgttttttttgggaaaaacacaggaaattttgcttctgttgattatgaaagcagtgctagcagtttgatttcatctattaaaactatgtgcggaagcaaattccgcaaagaagcaaaggaagaaaatggaaaatgctagctgcctcacgtgggacctcctgtcagagacagacccctttgcacgctttggagccgcagcaaagctcgaactcgatccgggtctccgggccattcgatctccgatcggacggcccagacagctcacttcctctccacctttgcacgctatagctcctctccgagtcgtcgtctccgtcgctgcctgctctgcttgctgcgccactccaaacccaacccaaaacccccacacgagatctgcgcagcaatggcgacgcggtgccacgtcctgctcctcctcgccgccgccttcgcgtccctcctcgcgctcgtggccgcggaagggggcgaagaggggccccgcgggcgccggctgctcgtcctcctggacgacctggccgtgcggtcgtcgcactcggccttcttcggctcgctccaggcgcgtgggttcgatctcgacttccgcctcgctgacgatccaaagctctcgctccaccgctacggccagtacctctacgacggcctcgtgctcttcgccccctccacaccacgttttggtggatcagtggaccagaacgcagtcctcgaatttattgatgctgggcatgacatgatcctggcggcagattcctctgcctctgatctcattcgtggcattgcaacagagtgtggggttgattttgatgaggatccagaggcaatggttattgaccatatgaactatgccgtcacagatgttgaaggtgatcacaccttgattgctggtgacgatcttatccattcggatgtgatactagggtctgaaaagattgaggctcctgtattgtttcgaggaattggacacatggctaatccatcaaacagtttggttctgaaggttctatcagcctctccatcagcatattcagctaatccaaagactaagttagcgtctcctccatcgctcactgggtcagctatatcattggtttcggttatgcaggcaagaaataatgctcgggtgctgttatctggatcactcgatctgtttagcaaccggttcctgaagtctggtgttcaaaaggctgatagcaaaacaagatatgagagagctggaaacgagcaatttgtggcagagataagcaaatgggttttccatgagaggggacatctaaaggctgttaatgttaggcatcacaaggttggggagaccaatgaaccaggcatgtaccgcattaatgatgacctggaatactctgttgagatctatgaatggtccggaacaagctggaagccgtatgttgctgatgatgtgcagcttcaatttttcatgatgagcccttacgttctgaaaactatgtcgactgacaacaagggtttgtattcaacaaccttcaaagttccagatgtttatggagttttccagttcaaagttgagtaccaaagactgggatatactggtctgtcttttacaaagcagattccagtacgtccttacagacataatgagtatgagagattcataacatcagcgtacccatactacaccgcctcattttcaacaatgggtgctttcttcgtattctcgtttgtgtacctgtaccacaaataaaggactcatgggagcgcacaagtctctggaggctgacgtgaccaagatctgtgggcactgaatgttgtgctataagccaagagttacccggcgccaattttatggaaccatgtttttgtactgccaacttagataacatttgacgaccgtgaccgcactcatgggaaatttactcgtgctaggatgttcgatctgcccccacttcttttttttctttcttggaccctttctgatcagcacttgtcagaacgtttacagtctatagcactgaaacgtgattttggaagtactacacccccagtaattttgcactcgtgcccagttctgatttctgatcctgggtgtggacttcaaagtctgcctattatacttccgcaattgttcgtgtttataacctggacgcacgtattttttttcacgggcttattgaacatgatgctcgaagagtgcactaaacatgccatgcacgtattttttttcacgggcttgttgaacatgaatgctcgaagagtgcactaaacatgccgcttcatgtacagaattcgaaatttgtaatgttatatgagcattttctcgggcagtggatgcattttaggtgccgtttggttcacatttgtcatgtacatttg

SEQ ID NO: 68188 - DNA, 4336 bp, Zea Mays
atcctgccttgagtgttcgtgcaacgctgcccctgccgcgtcgtcttctggaccgcttctccactccgcccagctcgcagtcgcagctcgctcaaagcagcacagcagcaagcagaaggaagaaaaagagcagcgagagccgagaagagaagcgcgccgccgctcgagctcatcccgccgccggacacaccgcatggccatgaggcacagggcgcggtcctcccccacctccccgctcaccccgtcctccagcgcaagaacaaacaagatacttggtttctctgtatctctcatcctcatcaatctggcttcaattatggagcgtgctgatgagaatctccttccagcagtttacaaggaagtcagtgcagccttcaatgctggtcctgcagatctgggatacctcacctttgtaatgaactttctgaagtcaatagcatctcccttggcagggttcggtttgttaagcctcattggcgctgtaggtggtataggtggtagtattttggcaacaatcatggctggaaaggactattggggattcccaggatggcgtgttgcatttatgatggtcgcacttgtcagcttgataattggaattcttgtgtacttatatgcgactgatccaagaagaatacctggcaatcgccttcttgacgaagatgagtatgagaggttgcatctatcaagcaaagatgttcttcctccgccttctatctggagggattcttgggtggcaacaagatctgtcatgaaagtgaagacgtttcagatcattgtcctgcaagggatcattggctcgttgccgtggactgctatagttttcttcacaatgtggttcgaactcattggttttgacaacaacagctcagcagcactgaacagcctcttcgccatcgggtgtgccagcggagcatttattggcggggtgatagcagatcacctgtcaaagtacttcccagattcggcacgggtcatgtgtgcccagtttagtgccttcatgggcatcccgttttcttggatcctcctcacagtcatcccccagtcagttgactactggtatgccttcgccgtcacgcttttcttcatgggcatcacgataagctggtgcgccacctcggcaaacaaccccatgttcgccgaggtggtccctcccaagcaccgcaccatgatctacgccttcgaccgcgcgttcgagggctcattcgcctcgttggctgcccctgccgtgggcctaatcaccgagaagatctatggctatgataccaagaccgtgaaccttgcgaacgggtcagcggaaggggcgtacgcgctctcaagggggctgctgaccatgatgatcgtgcctttcggtgtgtgtgtcctgttctacagccccctgtaccttgtgttcaagcacgacagagagaacgctaaatttgccagcttcaaggagcaggagctagtatgatcaatgatcatacgaatgtgcttccttggtccgcattcataacctctcgtcatcccgggctggagctttgcgtgatgattatgaagataactgccttgatcggcattcagaacatctggtcataccgtcctgggtcattctgagtttcttgttgagattatggcaattgtgccacggagaggtgtggatcaacgtttgttctggcagattttgaagattgttataaggcgacctttttttttgtgctgatcacctatccagaaagccatggcttctcccgacgactgatttgtgttgttaagggatgatttgcttttttgcatggcttctcctgacgactgatttgtgttgttaagggatgatttgcttttttggtaattcttagtcttacaagagaaccccaaggagaagcatatgatatgatctgaaccatgctgaattgctgatgttacatgtagttggaacagatcactaataatgttctgatcactgggatcagctcgttttcagtaatctttctggtttttttttcgcaggaaaaaatttctgtgttttttttgggaaaaacacaggaaattttgcttctgttgattatgaaagcagtgctagcagtttgatttcatctattaaaactatgtgcggaagcaaattccgcaaagaagcaaaggaagaaaatggaaaatgctagctgcctcacgtgggacctcctgtcagagacagacccctttgcacgctttggagccgcagcaaagctcgaactcgatccgggtctccgggccattcgatctccgatcggacggcccagacagctcacttcctctccacctttgcacgctatagctcctctccgagtcgtcgtctccgtcgctgcctgctctgcttgctgcgccactccaaacccaacccaaaacccccacacgagatctgcgcagcaatggcgacgcggtgccacgtcctgctcctcctcgccgccgccttcgcgtccctcctcgcgctcgtggccgcggaagggggcgaagaggggccccgcgggcgccggctgctcgtcctcctggacgacctggccgtgcggtcgtcgcactcggccttcttcggctcgctccaggcgcgtgggttcgatctcgacttccgcctcgctgacgatccaaagctctcgctccaccgctacggccagtacctctacgacggcctcgtgctcttcgccccctccacaccacgttttggtggatcagtggaccagaacgcagtcctcgaatttattgatgctgggcatgacatgatcctggcggcagattcctctgcctctgatctcattcgtggcattgcaacagagtgtggggttgattttgatgaggatccagaggcaatggttattgaccatatgaactatgccgtcacagatgttgaaggtgatcacaccttgattgctggtgacgatcttatccattcggatgtgatactagggtctgaaaagattgaggctcctgtattgtttcgaggaattggacacatggctaatccatcaaacagtttggttctgaaggttctatcagcctctccatcagcatattcagctaatccaaagactaagttagcgtctcctccatcgctcactgggtcagctatatcattggtttcggttatgcaggcaagaaataatgctcgggtgctgttatctggatcactcgatctgtttagcaaccggttcctgaagtctggtgttcaaaaggctgatagcaaaacaagatatgagagagctggaaacgagcaatttgtggcagagataagcaaatgggttttccatgagaggggacatctaaaggctgttaatgttaggcatcacaaggttggggagaccaatgaaccaggcatgtaccgcattaatgatgacctggaatactctgttgagatctatgaatggtccggaacaagctggaagccgtatgttgctgatgatgtgcagcttcaatttttcatgatgagcccttacgttctgaaaactatgtcgactgacaacaagggtttgtattcaacaaccttcaaagttccagatgtttatggagttttccagttcaaagttgagtaccaaagactgggatatactggtctgtcttttacaaagcagattccagtacgtccttacagacataatgagtatgagagattcataacatcagcgtacccatactacaccgcctcattttcaacaatgggtgctttcttcgtattctcgtttgtgtacctgtaccacaaataaaggactcatgggagcgcacaagtctctggaggctgacgtgaccaagatctgtgggcactgaatgttgtgctataagccaagagttacccggcgccaattttatggaaccatgtttttgtactgccaacttagataacatttgacgaccgtgaccgcactcatgggaaatttactcgtgctaggatgttcgatctgcccccacttcttttttttctttcttggaccctttctgatcagcacttgtcagaacgtttacagtctatagcactgaaacgtgattttggaagtactacacccccagtaattttgcactcgtgcccagttctgatttctgatcctgggtgtggacttcaaagtctgcctattatacttccgcaattgttcgtgtttataacctggacgcacgtattttttttcacgggcttattgaacatgatgctcgaagagtgcactaaacatgccatgcacgtattttttttcacgggcttgttgaacatgaatgctcgaagagtgcactaaacatgccgcttcatgtacagaattcgaaatttgtaatgttatatgagcattttctcgggcagtggatgcattttaggtgccgtttggttcacatttgtcatgtacatttg

SEQ ID NO: 68189 - DNA, 3924 bp, Zea Mays
gtcatatcctgccttgagtgttcgtgcaacgctgcccctgccgcgtcgtcttctggaccgcttctccactccgcccagctcgcagtcgcagctcgctcaaagcagcacagcagcaagcagaaggaagaaaaagagcagcgagagccgagaagagaagcgcgccgccgctcgagctcatcccgccgccggacacaccgcatggccatgaggcacagggcgcggtcctcccccacctccccgctcaccccgtcctccagcgcaaggttgcatctatcaagcaaagatgttcttcctccgccttctatctggagggattcttgggtggcaacaagatctgtcatgaaagtgaagacgtttcagatcattgtcctgcaagggatcattggctcgttgccgtggactgctatagttttcttcacaatgtggttcgaactcattggttttgacaacaacagctcagcagcactgaacagcctcttcgccatcgggtgtgccagcggagcatttattggcggggtgatagcagatcacctgtcaaagtacttcccagattcggcacgggtcatgtgtgcccagtttagtgccttcatgggcatcccgttttcttggatcctcctcacagtcatcccccagtcagttgactactggtatgccttcgccgtcacgcttttcttcatgggcatcacgataagctggtgcgccacctcggcaaacaaccccatgttcgccgaggtggtccctcccaagcaccgcaccatgatctacgccttcgaccgcgcgttcgagggctcattcgcctcgttggctgcccctgccgtgggcctaatcaccgagaagatctatggctatgataccaagaccgtgaaccttgcgaacgggtcagcggaaggggcgtacgcgctctcaagggggctgctgaccatgatgatcgtgcctttcggtgtgtgtgtcctgttctacagccccctgtaccttgtgttcaagcacgacagagagaacgctaaatttgccagcttcaaggagcaggagctagtatgatcaatgatcatacgaatgtgcttccttggtccgcattcataacctctcgtcatcccgggctggagctttgcgtgatgattatgaagataactgccttgatcggcattcagaacatctggtcataccgtcctgggtcattctgagtttcttgttgagattatggcaattgtgccacggagaggtgtggatcaacgtttgttctggcagattttgaagattgttataaggcgacctttttttttgtgctgatcacctatccagaaagccatggcttctcccgacgactgatttgtgttgttaagggatgatttgcttttttgcatggcttctcctgacgactgatttgtgttgttaagggatgatttgcttttttggtaattcttagtcttacaagagaaccccaaggagaagcatatgatatgatctgaaccatgctgaattgctgatgttacatgtagttggaacagatcactaataatgttctgatcactgggatcagctcgttttcagtaatctttctggtttttttttcgcaggaaaaaatttctgtgttttttttgggaaaaacacaggaaattttgcttctgttgattatgaaagcagtgctagcagtttgatttcatctattaaaactatgtgcggaagcaaattccgcaaagaagcaaaggaagaaaatggaaaatgctagctgcctcacgtgggacctcctgtcagagacagacccctttgcacgctttggagccgcagcaaagctcgaactcgatccgggtctccgggccattcgatctccgatcggacggcccagacagctcacttcctctccacctttgcacgctatagctcctctccgagtcgtcgtctccgtcgctgcctgctctgcttgctgcgccactccaaacccaacccaaaacccccacacgagatctgcgcagcaatggcgacgcggtgccacgtcctgctcctcctcgccgccgccttcgcgtccctcctcgcgctcgtggccgcggaagggggcgaagaggggccccgcgggcgccggctgctcgtcctcctggacgacctggccgtgcggtcgtcgcactcggccttcttcggctcgctccaggcgcgtgggttcgatctcgacttccgcctcgctgacgatccaaagctctcgctccaccgctacggccagtacctctacgacggcctcgtgctcttcgccccctccacaccacgttttggtggatcagtggaccagaacgcagtcctcgaatttattgatgctgggcatgacatgatcctggcggcagattcctctgcctctgatctcattcgtggcattgcaacagagtgtggggttgattttgatgaggatccagaggcaatggttattgaccatatgaactatgccgtcacagatgttgaaggtgatcacaccttgattgctggtgacgatcttatccattcggatgtgatactagggtctgaaaagattgaggctcctgtattgtttcgaggaattggacacatggctaatccatcaaacagtttggttctgaaggttctatcagcctctccatcagcatattcagctaatccaaagactaagttagcgtctcctccatcgctcactgggtcagctatatcattggtttcggttatgcaggcaagaaataatgctcgggtgctgttatctggatcactcgatctgtttagcaaccggttcctgaagtctggtgttcaaaaggctgatagcaaaacaagatatgagagagctggaaacgagcaatttgtggcagagataagcaaatgggttttccatgagaggggacatctaaaggctgttaatgttaggcatcacaaggttggggagaccaatgaaccaggcatgtaccgcattaatgatgacctggaatactctgttgagatctatgaatggtccggaacaagctggaagccgtatgttgctgatgatgtgcagcttcaatttttcatgatgagcccttacgttctgaaaactatgtcgactgacaacaagggtttgtattcaacaaccttcaaagttccagatgtttatggagttttccagttcaaagttgagtaccaaagactgggatatactggtctgtcttttacaaagcagattccagtacgtccttacagacataatgagtatgagagattcataacatcagcgtacccatactacaccgcctcattttcaacaatgggtgctttcttcgtattctcgtttgtgtacctgtaccacaaataaaggactcatgggagcgcacaagtctctggaggctgacgtgaccaagatctgtgggcactgaatgttgtgctataagccaagagttacccggcgccaattttatggaaccatgtttttgtactgccaacttagataacatttgacgaccgtgaccgcactcatgggaaatttactcgtgctaggatgttcgatctgcccccacttcttttttttctttcttggaccctttctgatcagcacttgtcagaacgtttacagtctatagcactgaaacgtgattttggaagtactacacccccagtaattttgcactcgtgcccagttctgatttctgatcctgggtgtggacttcaaagtctgcctattatacttccgcaattgttcgtgtttataacctggacgcacgtattttttttcacgggcttattgaacatgatgctcgaagagtgcactaaacatgccatgcacgtattttttttcacgggcttgttgaacatgaatgctcgaagagtgcactaaacatgccgcttcatgtacagaattcgaaatttgtaatgttatatgagcattttctcgggcagtggatgcattttaggtgccgtttggttcacatttgtcatgtacatttg

SEQ ID NO: 68190 - DNA, 1657 bp, Zea Mays
cgcacatcccaccaacaacaacaacagtcatcgccctcgcccaggcacaggcacacagccgccactgctcagctctccatgtcgtgccctccgaattcccaaatcctatggcggtggcgcctttgcccccaaccccgcgaggtcgtgagtccgtgactcatcttcctcctctttgccgggctgcacgtggagtggagatccaccagaccacacatgatcgcattgcccccaatccagtatgtaatctgtaaccctagctttgcttaccgggctgcggcacccactaccggacggacgggcgcacgcactgctgggctgcaacacccaatgcacggacgcacgcaccagcaccacgcactgcatccacatccacagattggccggtagaaactgtgatctgctctaatggctagtgaaggcgaagcttcacctccacgaaagcatatgttgttggagttgcctagtgaacatcaaagtcagaacttgacatcctcacctcatgcaaatacaagtcaacattttggtgtgtccgcatcatcgtcaacacctgctgcaacatctcatgaacaaggtgcaaatccagaagaaggaattaattaggatgaggatgattcttcaaagttgaagcaagcaaagaagtccacttcaaatgtttggcagtattttaagaagtatgaggttgtcgtagaggagaatggtaaatctgtgaagcaagtttgggccaaatgcaagtattctggttgcaaaaacaagactagcaaagctagggttaaaaatagtagaggaacaactgcattttggtctcatttgaaaaattatcatacgattgtgaaggggcaacaatagctcaaggcagaaaaggatcatggcacagatatatgcattgtccagccatataaatatgatgaataaaccagtttgagaaagttttatacagctattatcatgcatgagtatccatttaacattgttgagcatagacactttgtggaattcattaaatcattgaagcctacctttcctatgaagtcatgtgtcactattagaaaagaaataatggaactctacttgcatgaaaaggatgtgttgtgtaagtatttcaaaaccctcaattgtcgcatgagtgctactatggacatgtggacatcaaaccagaataaaggctacatgtgtgtcacggtacattgggtagatgatgattgggaaatacagaagagaattatcaatttcctccatgttccgagtcggcatagtggttccaaggctaagagtgttgctattcctaatatggtttgtgaaatggaggaacttgaggctcttgctagaaatctttcacttgaggatgaagacctagatgatgatcatgatgatggacctaaggcatcgttgtaagcttgttgacgaagacctagatgatgataatgcaacatgaatgctccgaatgtttttattgaacttgttgcgtaatgctttatgaccttgcgaacttgggacttatggacttgtggctttgtgaactttgtgatctatgtgatcaacttgttattgtgaacttgtgatcaacttgttattttttgaacttgtgatctgtgtgatgaacttgttatattgtgaacttgtgatctgtgtgatccacttattatattgtgaacttgtg

SEQ ID NO: 68191 - DNA, 1197 bp, Zea Mays
ccgaacttcaacccccattgcgacttctccaaatcccaaagttggaggttgtcatgacgactccgggagtgctcgaggttattgaagatctttgcaggagttatccttctttaacattcggggttggcacggtcttaaatgctgctgatgcaaggaaagctatttgcgctggtgcacaatttcttatgagtcctggcacagtcctggacatacttcatgatcttaaagaaagtaatgttctttatattccaggagtgctgacatcaactgaagttttatccgcttgcagtgctggtgcaaaagttgtcaaggtttcataactgcacattgttctcgtaggtgtacccagtttcagtcatgggtggggagatgtacatgtcagctctgaagaaaccatttcctcttgtaccaatggttgcttctcaaggaattaaaatcggttcaatcaagggatatatggaagcaggggcatctgcagtggtcttatctgatgctatttttgacagtcaattgatgagggatgggaaattcaatgaaatttcggaacttgcaaatctagcaactttagaggcattgcagttcacgaaatgagacaaatctacaatcataacagatttgcgtccagaatatgtggccttctgttctgtggaaggagtcaattcacctcctggtaactacatgctacttctgtgtaaagagtcagttcacctcctaaataaagctgtaggagctctggtgttctatgcacctgcaagaggctgagactgcaacaaatttgtgtgctccgaagtctgaacagggacctgatcattgaggatgccgtgatgctaagaagccaaccatacatttaggtgccgtgtaatggaatcaccacaactcgcaagagaacagaggtgaatggaagagagattgctggtttgcttgtgctttgactgacctagtagatgttaacgcaggttcataggagtgtactagtagtgcatctctgaagaccgttatacttctaggcaaggtcatggactttgtgtgtttaaaaaaaaggtcatggactttgtgtcgatcaaatgatcaatgtgcttgaacaggtgttgtctgtttttacccgggaattctgcatgaaatgagttggtgctatgtatcaatagacttgtagattttaatgcagttttcttttaaaaaaaacttttcgaaacctag

SEQ ID NO: 68192 - DNA, 1262 bp, Zea Mays
aaaggccgccatcgtagccatcgacaccgaccaccgaacttcaacccccattgcgacttctccaaatcccaaagtttgtgacattgaataatccttggagcggaggctgtgtgtttattaacactacattcaagttggaggttgtcatgacgactccgggagtgctcgaggttattgaagatctttgcaggagttatccttctttaacattcggggttggcacggtcttaaatgctgctgatgcaaggaaagctatttgcgctggtgcacaatttcttatgagtcctggcacagtcctggacatacttcatgatcttaaagaaagtaatgttctttatattccaggagtgctgacatcaactgaagttttatccgcttgcagtgctggtgcaaaagttgtcaaggtgtacccagtttcagtcatgggtggggagatgtacatgtcagctctgaagaaaccatttcctcttgtaccaatggttgcttctcaaggaattaaaatcggttcaatcaagggatatatggaagcaggggcatctgcagtggtcttatctgatgctatttttgacagtcaattgatgagggatgggaaattcaatgaaatttcggaacttgcaaatctagcaactttagaggcattgcagttcacgaaatgagacaaatctacaatcataacagatttgcgtccagaatatgtggccttctgttctgtggaaggagtcaattcacctcctggtaactacatgctacttctgtgtaaagagtcagttcacctcctaaataaagctgtaggagctctggtgttctatgcacctgcaagaggctgagactgcaacaaatttgtgtgctccgaagtctgaacagggacctgatcattgaggatgccgtgatgctaagaagccaaccatacatttaggtgccgtgtaatggaatcaccacaactcgcaagagaacagaggtgaatggaagagagattgctggtttgcttgtgctttgactgacctagtagatgttaacgcaggttcataggagtgtactagtagtgcatctctgaagaccgttatacttctaggcaaggtcatggactttgtgtgtttaaaaaaaaggtcatggactttgtgtcgatcaaatgatcaatgtgcttgaacaggtgttgtctgtttttacccgggaattctgcatgaaatgagttggtgctatgtatcaatagacttgtagattttaatgcagttttcttttaaaaaaaacttttcgaaacctag

SEQ ID NO: 68193 - DNA, 1206 bp, Zea Mays
agggaaaggccgccatcgtagccatcgacaccgaccaccgaacttcaacccccattgcgacttctccaaatcccaaagttggaggttgtcatgacgactccgggagtgctcgaggttattgaagatctttgcaggagttatccttctttaacattcggggttggcacggtcttaaatgctgctgatgcaaggaaagctatttgcgctggtgcacaatttcttatgagtcctggcacagtcctggacatacttcatgatcttaaagaaagtaatgttctttatattccaggagtgctgacatcaactgaagttttatccgcttgcagtgctggtgcaaaagttgtcaaggtgtacccagtttcagtcatgggtggggagatgtacatgtcagctctgaagaaaccatttcctcttgtaccaatggttgcttctcaaggaattaaaatcggttcaatcaagggatatatggaagcaggggcatctgcagtggtcttatctgatgctatttttgacagtcaattgatgagggatgggaaattcaatgaaatttcggaacttgcaaatctagcaactttagaggcattgcagttcacgaaatgagacaaatctacaatcataacagatttgcgtccagaatatgtggccttctgttctgtggaaggagtcaattcacctcctggtaactacatgctacttctgtgtaaagagtcagttcacctcctaaataaagctgtaggagctctggtgttctatgcacctgcaagaggctgagactgcaacaaatttgtgtgctccgaagtctgaacagggacctgatcattgaggatgccgtgatgctaagaagccaaccatacatttaggtgccgtgtaatggaatcaccacaactcgcaagagaacagaggtgaatggaagagagattgctggtttgcttgtgctttgactgacctagtagatgttaacgcaggttcataggagtgtactagtagtgcatctctgaagaccgttatacttctaggcaaggtcatggactttgtgtgtttaaaaaaaaggtcatggactttgtgtcgatcaaatgatcaatgtgcttgaacaggtgttgtctgtttttacccgggaattctgcatgaaatgagttggtgctatgtatcaatagacttgtagattttaatgcagttttcttttaaaaaaaacttttcgaaacctag

SEQ ID NO: 68194 - DNA, 1033 bp, Zea Mays
caccaattaaaattgctgcccagcaaaaacaaagcgaagggacacgaggaatcgaacccaggccaccagcaaatcgtgttgtggaggtcaatgaaatgtggcgtgccagggaaaaggaactggagttggagtcaaaaatgaaaggcagaagtagcagaagtaaagatcatggtgattttacaggtgagaagcgcaaaagtgaaagaaaccatagctccagctcaaggattgaacaagaagggaccacttatgatacttcgtactcagaccaggaggatggtctcagggatgatgaaattgaaagatttctttattcaagggcgaagcgaggacgtggggctgttggttccaggatggacgagcctggtccataccttgattctctgtcccatcatcaggacaatggacctagcccggacatacgtgtggaagaaaaatgggaacgcagagtacaaggcccagagaagcctccattttggggatgcaagtctctcgatggtcattggcgcttgggcacattggatggaaggccatcaagctctgaaccacagagcaaaaaagaaaagaaaagtaagctggataaaaaggataagatagagaaaaggaaggaaaagggcaagaagaaatccaaacatcgccaccaccgccatcgcagaagcagcaggagtgagtgagtgatgttgcctgttagcagaacagaaaaaaatggacacaacggttctgccatgaccatgagacaagctagctgactgttcctgtgtcttgaaacctgtattgtatggaaacgggatattgtgtaggcttatacaatacaatgttgcgatgtcacatcgtttgttgaagttttatcactttgattaacatctgcaacaggaggttttttcttctctttttcctatactatattgggcgtcgaatattggagtccgaggagcctgttcttcaagcagggcagcctgtcagttggggtttgtagctgaataaaactgtgtatggatgcgtaggccatcaatagctcttagtcatattagtg

SEQ ID NO: 68195 - DNA, 1461 bp, Zea Mays
gaatctctaggacctaagccgttggagatagcatcagtgacagtgatgtcacacggcaattttagccgcaacgctccagctgtaccgcgaaacaaaatttctctacttttcttcgaccgtcctaccctatccgctcccctcgccggcgccgcggcggcggcgagaaagagagaacgcgctcctcttccttctcgactcgatctgccccttccagcccgctcgcccctcatcgagcggcctccgtagccctaggtgatccgcgcctccttccgccgcagcggaacaggacgcctgaccgtcgaccgtcgaagcgattcctctctcgcgggcgtcctcgtctcgccctcctcgcctcctcggtgccagtgggtcggcgcggggaggcatccgtccgggctacggtcgatttgttctccacttgctgttgaactttaaatagacaatggatctggagacagaaaatcgtcttgcttctttactacttgaagaggcccgaagattacaattagaggctaacagggaaggtgttcaagcatatctgcgaaaacctaatgttaggcatcgtccaaactctcggttcctcacagccacagttcgtggagttcagcaaggtgagaagcgcaaaagtgaaagaaaccatagctccagctcaaggattgaacaagaagggaccacttatgatacttcgtactcagaccaggaggatggtctcagggatgatgaaattgaaagatttctttattcaagggcgaagcgaggacgtggggctgttggttccaggatggacgagcctggtccataccttgattctctgtcccatcatcaggacaatggacctagcccggacatacgtgtggaagaaaaatgggaacgcagagtacaaggcccagagaagcctccattttggggatgcaagtctctcgatggtcattggcgcttgggcacattggatggaaggccatcaagctctgaaccacagagcaaaaaagaaaagaaaagtaagctggataaaaaggataagatagagaaaaggaaggaaaagggcaagaagaaatccaaacatcgccaccaccgccatcgcagaagcagcaggagtgagtgagtgatgttgcctgttagcagaacagaaaaaaatggacacaacggttctgccatgaccatgagacaagctagctgactgttcctgtgtcttgaaacctgtattgtatggaaacgggatattgtgtaggcttatacaatacaatgttgcgatgtcacatcgtttgttgaagttttatcactttgattaacatctgcaacaggaggttttttcttctctttttcctatactatattgggcgtcgaatattggagtccgaggagcctgttcttcaagcagggcagcctgtcagttggggtttgtagctgaataaaactgtgtatggatgcgtaggccatcaatagctcttagtcatattagtg

SEQ ID NO: 68196 - DNA, 1600 bp, Zea Mays
ctcaattcactccattacctttgatcccaaacaagccctaatagaatctctaggacctaagccgttggagatagcatcagtgacagtgatgtcacacggcaattttagccgcaacgctccagctgtaccgcgaaacaaaatttctctacttttcttcgaccgtcctaccctatccgctcccctcgccggcgccgcggcggcggcgagaaagagagaacgcgctcctcttccttctcgactcgatctgccccttccagcccgctcgcccctcatcgagcggcctccgtagccctaggtgatccgcgcctccttccgccgcagcggaacaggacgcctgaccgtcgaccgtcgaagcgattcctctctcgcgggcgtcctcgtctcgccctcctcgcctcctcggtgccagtgggtcggcgcggggaggcatccgtccgggctacggtcgatttgttctccacttgacaatggatctggagacagaaaatcgtcttgcttctttactacttgaagaggcccgaagattacaattagaggctaacagggaaggtgttcaagcatatctgcgaaaacctaatgttaggcatcgtccaaactctcggttcctcacagccacagttcgtggagttcagcaagcaaatcgtgttgtggaggtcaatgaaatgtggcgtgccagggaaaaggaactggagttggagtcaaaaatgaaaggcagaagtagcagaagtaaagatcatggtgattttacaggtgagaagcgcaaaagtgaaagaaaccatagctccagctcaaggattgaacaagaagggaccacttatgatacttcgtactcagaccaggaggatggtctcagggatgatgaaattgaaagatttctttattcaagggcgaagcgaggacgtggggctgttggttccaggatggacgagcctggtccataccttgattctctgtcccatcatcaggacaatggacctagcccggacatacgtgtggaagaaaaatgggaacgcagagtacaaggcccagagaagcctccattttggggatgcaagtctctcgatggtcattggcgcttgggcacattggatggaaggccatcaagctctgaaccacagagcaaaaaagaaaagaaaagtaagctggataaaaaggataagatagagaaaaggaaggaaaagggcaagaagaaatccaaacatcgccaccaccgccatcgcagaagcagcaggagtgagtgagtgatgttgcctgttagcagaacagaaaaaaatggacacaacggttctgccatgaccatgagacaagctagctgactgttcctgtgtcttgaaacctgtattgtatggaaacgggatattgtgtaggcttatacaatacaatgttgcgatgtcacatcgtttgttgaagttttatcactttgattaacatctgcaacaggaggttttttcttctctttttcctatactatattgggcgtcgaatattggagtccgaggagcctgttcttcaagcagggcagcctgtcagttggggtttgtagctgaataaaactgtgtatggatgcgtaggccatcaatagctcttagtcatattagtg

SEQ ID NO: 68197 - DNA, 1659 bp, Zea Mays
ttatctgtaggcggatccctgtgcgtgacatttggtatcagatttaccgatccttggctcttcatctttagctccgcccacttcggtcgattcaacgctgactctcgccctgcaaaaccaaactcgggctcttctggccgagttggatattcgcctccagtcactcgacgggaagtggaaatcacggattagtgccctggagtctcaagcggcgaagacggctcgttccatcgctgatcgggcagccgttcttcgtgccgacatcgaggcccaccttacggcctcatatgtcacgaccgagtctcgactccgatagatcgagatcgacaccggaagccgcctctcggccttggaatccaacatgcagatcttggattattggcgccccaaggttgatgcatcactcgccacgatctactcgtccaccgagtggggtcgcatcgaggcttcccgacgggagagttcgacaccgatcggtggccgcatcggtagcttcagcagcttcggcgcaccgggcatcgtcgacacaccgcctcccttcgatgcgtctggtggatcggtactggggcgacctctgggtcctcgattcagagccgacggccctcgatttgggcactgctctgacaccttcctccgggacagtggaattgggcatcccacccaaattcactgaccggtcacgggaggaggctgactcgtccaagcggcgtaatggtcgtagctcggatgggccatggaatggtcgtacgcaacccaagcctgcactagccgctgcccccaggtgggataaatcgctgggggagagctggtggcttctagggtaatgtgtgcggcttcacagtcttcaactgacagcaaggtgtgacgtcttttcgtgcctatcggcgtgcgaggggattatgtcagtactgcgctgagaaatgggaaaaaggccacaaatgctctccaacagttcagctccacgcaatgcaggaactctgggacatggttgatcaggaacatactgaaccagatggggaatttgtggattctaccgaacaatttgtggtcctcctatctcaagaagcatcagctactaaatgttctgctacaacgttcaagctgcatggtactatccaaggtgtgtcgttgctcgtccttcttgattcaggtagttcacactcattcttgaatgttgctcatcattctcttctgagtgggtttactgtactgcaacaacctttgcacgttcttgtggccaacgacagtatcattcagtgtaccgaggagttgttggatgcagcttggtacttgcaaggttttcagtttcgctctacctttaaagtgattccgattccctgttatgacttgattttgggaatggactggctagaagaccacagtccaatgcatgttgattggaagcacaaatggatgtttatcaaataccacgaccaacccactgtaatttgctatgttcaacctgtgctaccatccggcacccttttggaaatcagacacattcctgattcagcctcaaccactaaccagctatgtgcttgttggaactcgctctcagcagcaagaaagccaacaagggcgaacggtggtgacaacagggttgcgtgcacgggggcaatagctctgttgatctagcctctcacgggcactgtgcggggg

SEQ ID NO: 68198 - DNA, 2545 bp, Zea Mays
cgggccgtgccgggctcggaccgggcccaaaaaacggacttcgtgccgggctcgcgggcctcgtgcttattagacactgctcctatctacctcctccttccttctgctcccctctgtcttcctctattatctgtaggcggatccctgtgcgtgacatttggtatcagatttaccgatccttggctcttcatctttagctccgcccacttcggtcgattcaacgctgactctcgccctgcaaaaccaaactcgggctcttctggccgagttggatattcgcctccagtcactcgacgggaagtggaaatcacggattagtgccctggagtctcaagcggcgaagacggctcgttccatcgctgatcgggcagccgttcttcgtgccgacatcgaggcccaccttacggcctcatatgtcacgaccgagtctcgactccgatagatcgagatcgacaccggaagccgcctctcggccttggaatccaacatgcagatcttggattattggcgccccaaggttgatgcatcactcgccacgatctactcgtccaccgagtggggtcgcatcgaggcttcccgacgggagagttcgacaccgatcggtggccgcatcggtagcttcagcagcttcggcgcaccgggcatcgtcgacacaccgcctcccttcgatgcgtctggtggatcggtactggggcgacctctgggtcctcgattcagagccgacggccctcgatttgggcactgctctgacaccttcctccgggacagtggaattgggcatcccacccaaattcactgaccggtcacgggtacgtgggatgctccttcttcaccttccttcgcgtttgttcctcctggcgagttagggtcccatggtttacttattcatcatctcgggggtttacctaagctcagttttccttcgtttgatgggacaagtccgaagttatggcagaagcgttgtgaggactactttgatatgtattccatagatgaggtagtttgggtgaaggttgtgacgatgcactttgttggggtcgttggacgatggcttcagtctatcgagcctcgtttgtcctctctgtctaggagacgcttttgtcaggctgtgcatgagcggtttgggcgagaacaacacgagctcgtcattcgcaaattgttccacatacctcacacatcctctgtccgaatataaagttattcataaggctcaggatctagaaagtaacggattcctactattacaacgactcaaccgattatgtgtttatactaattttagatgatttttgccccaacgaattttataaaagctgactgaaaagctgagcgtttgacagtctgcagcagcttttggtggccagaagttgccagaagccgaaacaaacagggccggccagaagttgccagaagccgaaacaaacagggccctagtcacatatgaacacacaaccgaccccctatattacactatgaaatttattgatggattgtgtgatgattaagtctgttatacttgttcaatgtccaagcaatctggatactgcctgcactttggccttattgcaggaggaggctgactcgtccaagcggcgtaatggtcgtagctcggatgggccatggaatggtcgtacgcaacccaagcctgcactagccgctgcccccaggtgggataaatcgctgggggagagctggtggcttctagggtaatgtgtgcggcttcacagtcttcaactgacagcaaggtgtgacgtcttttcgtgcctatcggcgtgcgaggggattatgtcagtactgcgctgagaaatgggaaaaaggccacaaatgctctccaacagttcagctccacgcaatgcaggaactctgggacatggttgatcaggaacatactgaaccagatggggaatttgtggattctaccgaacaatttgtggtcctcctatctcaagaagcatcagctactaaatgttctgctacaacgttcaagctgcatggtactatccaaggtgtgtcgttgctcgtccttcttgattcaggtagttcacactcattcttgaatgttgctcatcattctcttctgagtgggtttactgtactgcaacaacctttgcacgttcttgtggccaacgacagtatcattcagtgtaccgaggagttgttggatgcagcttggtacttgcaaggttttcagtttcgctctacctttaaagtgattccgattccctgttatgacttgattttgggaatggactggctagaagaccacagtccaatgcatgttgattggaagcacaaatggatgtttatcaaataccacgaccaacccactgtaatttgctatgttcaacctgtgctaccatccggcacccttttggaaatcagacacattcctgattcagcctcaaccactaaccagctatgtgcttgttggaactcgctctcagcagcaagaaagccaacaagggcgaacggtggtgacaacagggttgcgtgcacgggggcaatagctctgttgatctagcctctcacgggcactgtgcggggg

SEQ ID NO: 68199 - DNA, 1404 bp, Zea Mays
ggaaatcctaggatttgatggagaagaagcacagttcaatttgacgcccgccaggtgttcgatgaaatgttcgaatttggtttcgtcgttgatattgtggatttgagtcgcgttttgtattgaaaaacaagattcatgagtgcaatggcaaatggaaggtgaaggcccttttgattgacaacttaggtatatttactgtttcattacacacctcgcgcaggaagttttttagtgctattggatgtcatgtgagaaagaagttgtcagttagcagtgttgattggaggctagtggatggtgagaaaaagtatgaagtatggactgacctaaagtctaaggaactaggccgtcctcctagaagagatgaactctatatcaaaacacatacgcggaaaaatggagttccaacaagacatgctgaaccagttattaacaaacttaaggaaattgttgaggcccatccagagttgaaggaaagaacaattcaagaatgtgatgcttttgctgctatttgtggagagagagagccaagaggacgtgtccgagttttgggtctaggaccaactccacaagatattggtaccccaggcttgagaagttacacacccacaagactccaaatggaagtcttagcccgcaaaaaggctgaaagtgagaaagctgctctagaacaacgcatagcagaaatggaggagaaaatgcaggagcaaaggatgggcagagatgtggaaatcatttcacatgatggttctaatacacgacaccatccggacacaaggtctgggcaacatgtcaatgaaacacataacattgctcagtttcatgaagatgaagcttatgtggaggatgaaatctctaatgagggtgaaaatttgcttggcagtaatcatgttagtgttacccctacagtaaatccatctcaaggcaaccatattaatattggaaaggatgtgatcttatatgccatattaagagatcatgctatggctaagggaacaattatttcaactaatcctagctcagtgttaggaggagttgctctaggaaagcaatattgtgaggttgttgtgaatgttgtgctgaaaagggacgcccttctacctcacccatatggttatttggagaagatgggtgatgctgatcggatgtcgatcgcatggccatacaagagactaaaggtgagcaagacatcaaaatcatcctacagtgctacagatattgttgctctctggtttgatctttcgagtagcagcaagctagtatctctaagcttttacaagtcaaacttagggttattgcctgcatattttgatctttattgcgacaagagcaaacttgtgacctttatgtataaatgcagtacaattgttattgccatgaatgaaaacatgagctacgtttaac

SEQ ID NO: 68200 - DNA, 1572 bp, Zea Mays
ctgagtagcacctccctccatggatgcctcgttgtcgacttgtgcagttcatatttattgaaaaacaagattcatgagtgcaatggcaaatggaaggtgaaggcccttttgattgacaacttaggtatatttactgtttcattacacacctcgcgcagtagtgaggaaggggtattacaaaattggaggacatatttgcaagggggtctgaggtgccaaaaattaaaatagaactgaatgattttggtcaacctgttggaaacaattcaaggaagttttttagtgctattggatgtcatgtgagaaagaagttgtcagttagcagtgttgattggaggctagtggatggtgagaaaaagtatgaagtatggactgacctaaagtctaaggaactaggccgtcctcctagaagagatgaactctatatcaaaacacatacgcggaaaaatggagttccaacaagacatgctgaaccagttattaacaaacttaaggaaattgttgaggcccatccagagttgaaggaaagaacaattcaagaatgtgatgcttttgctgctatttgtggagagagagagccaagaggacgtgtccgagttttgggtctaggaccaactccacaagatattggtaccccaggcttgagaagttacacacccacaagactccaaatggaagtcttagcccgcaaaaaggctgaaagtgagaaagctgctctagaacaacgcatagcagaaatggaggagaaaatgcaggagcaaaggatgggcagagatgtggaaatcatttcacatgatggttctaatacacgacaccatccggacacaaggtctgggcaacatgtcaatgaaacacataacattgctcagtttcatgaagatgaagcttatgtggaggatgaaatctctaatgagggtgaaaatttgcttggcagtaatcatgttagtgttacccctacagtaaatccatctcaaggcaaccatattaatgtaacaacaccaacacaaccctctaggaagacgaccaatgctagcccaatagtgcaaccatctcaaggcaacactattagagctaccccaacaattctgccacttcacactgaacttattggaaaggatgtgatcttatatgccatattaagagatcatgctatggctaagggaacaattatttcaactaatcctagctcagtgttaggaggagttgctctaggaaagcaatattgtgaggttgttgtgaatgttgtgctgaaaagggacgcccttctacctcacccatatggttatttggagaagatgggtgatgctgatcggatgtcgatcgcatggccatacaagagactaaaggtgagcaagacatcaaaatcatcctacagtgctacagatattgttgctctctggtttgatctttcgagtagcagcaagctagtatctctaagcttttacaagtcaaacttagggttattgcctgcatattttgatctttattgcgacaagagcaaacttgtgacctttatgtataaatgcagtacaattgttattgccatgaatgaaaacatgagctacgtttaac

SEQ ID NO: 68201 - DNA, 2460 bp, Zea Mays
ccatgtgccagtagagttcgtcattccctgagtagcacctccctccatggatgcctcgttgtcgacttgtgcagttcatatttattgaaaaacaagattcatgagtgcaatggcaaatggaaggtgaaggcccttttgattgacaacttaggaaaagatggaatggaactcaaattttggtggtcggtcaagtgtgtagagttgaaatcatatatacttagttatgctcaactttagcgcaaactgttggtgaccatgttttttagttagtattttagtttggatttagagtacacttatgtatgagttatttagcaatgcttatttttgagatattgaatgatacttatctacattatattaactataatgttattaaatatatgtgtgtatgtatattataatgtggtatctcaaaaatgattataaattgaagaatgtattgccatgtaagtcatttcatttaaaccataataagacagttcccaaaacgtacaataccagtctctaaaaaagtcggttcctaaaatgtctaatatcagatgcctaaataagatggtttttctattgcaagcatctattattataggacattctagacaatttgataaatattttgtgacttataatgttcgtattctcgatggttctttagaataagtgtcttaaacaaaatctaattcaagacggtttaccggacaaaatgacttaaacaaatatcttttttagacagttataaattaaaaatgtcttatataatatcttttaagacggtttacatccatcttaaatgtgggacatcttttacgactccatcaaatttggacacttcataagtgtcttaataactgaaaattaaccgtcttatataacatgatttgtagtagtgaggaaggggtattacaaaattggaggacatatttgcaagggggtctgaggtgccaaaaattaaaatagaactgaatgattttggtcaacctgttggaaacaattcaaggaagttttttagtgctattggatgtcatgtgagaaagaagttgtcagttagcagtgttgattggaggctagtggatggtgagaaaaagtatgaagtatggactgacctaaagatgatgctgcctttaactggtttttaatcactgctggaaggaaatggaaggatttcaagtcaaccctaaaggcgcagtattttaatgagaatttaacagaagaggacctaaaggacaaacatagcggaagggttaatgatgaggattggaagtttctttctgaatattgggtgtctcctgaatgtgaagaaaagacaaaaaagccaaatttagtcgttcaaaggttggggtacttcatacttgggcagtaagagcttcgctcgctctagccatgaaatgtctaaggaactaggccgtcctcctagaagagatgaactctatatcaaaacacatacgcggaaaaatggagttccaacaagacatgctgaaccagttattaacaaacttaaggaaattgttgaggcccatccagagttgaaggaaagaacaattcaagaatgtgatgcttttgctgctatttgtggagagagagagccaagaggacgtgtccgagttttgggtctaggaccaactccacaagatattggtaccccaggcttgagaagttacacacccacaagactccaaatggaagtcttagcccgcaaaaaggctgaaagtgagaaagctgctctagaacaacgcatagcagaaatggaggagaaaatgcaggagcaaaggatgggcagagatgtggaaatcatttcacatgatggttctaatacacgacaccatccggacacaaggtctgggcaacatgtcaatgaaacacataacattgctcagtttcatgaagatgaagcttatgtggaggatgaaatctctaatgagggtgaaaatttgcttggcagtaatcatgttagtgttacccctacagtaaatccatctcaaggcaaccatattaatattggaaaggatgtgatcttatatgccatattaagagatcatgctatggctaagggaacaattatttcaactaatcctagctcagtgttaggaggagttgctctaggaaagcaatattgtgaggttgttgtgaatgttgtgctgaaaagggacgcccttctacctcacccatatggttatttggagaagatgggtgatgctgatcggatgtcgatcgcatggccatacaagagactaaaggtgagcaagacatcaaaatcatcctacagtgctacagatattgttgctctctggtttgatctttcgagtagcagcaagctagtatctctaagcttttacaagtcaaacttagggttattgcctgcatattttgatctttattgcgacaagagcaaacttgtgacctttatgtataaatgcagtacaattgttattgccatgaatgaaaacatgagctacgtttaac

SEQ ID NO: 68202 - DNA, 3496 bp, Zea Mays
ccatgtgccagtagagttcgtcattccctgagtagcacctccctccatggatgcctcgttgtcgacttgtgcagttcatatttattgaaaaacaagattcatgagtgcaatggcaaatggaaggtgaaggcccttttgattgacaacttaggaaaagatggaatggaactcaaattttggtggtcggtcaagtgtgtagagttgaaatcatatatacttagttatgctcaactttagcgcaaactgttggtgaccatgttttttagttagtattttagtttggatttagagtacacttatgtatgagttatttagcaatgcttatttttgagatattgaatgatacttatctacattatattaactataatgttattaaatatatgtgtgtatgtatattataatgtggtatctcaaaaatgattataaattgaagaatgtattgccatgtaagtcatttcatttaaaccataataagacagttcccaaaacgtacaataccagtctctaaaaaagtcggttcctaaaatgtctaatatcagatgcctaaataagatggtttttctattgcaagcatctattattataggacattctagacaatttgataaatattttgtgacttataatgttcgtattctcgatggttctttagaataagtgtcttaaacaaaatctaattcaagacggtttaccggacaaaatgacttaaacaaatatcttttttagacagttataaattaaaaatgtcttatataatatcttttaagacggtttacatccatcttaaatgtgggacatcttttacgactccatcaaatttggacacttcataagtgtcttaataactgaaaattaaccgtcttatataacatgatttgtagtagtgaggaaggggtattacaaaattggaggacatatttgcaagggggtctgaggtgccaaaaattaaaatagaactgaatgattttggtcaacctgttggaaacaattcaaggaagttttttagtgctattggatgtcatgtgagaaagaagttgtcagttagcagtgttgattggaggctagtggatggtgagaaaaagtatgaagtatggactgacctaaagatgatgctgcctttaactggtttttaatcactgctggaaggaaatggaaggatttcaagtcaaccctaaaggcgcagtattttaatgagaatttaacagaagaggacctaaaggacaaacatagcggaagggttaatgatgaggattggaagtttctttctgaatattgggtgtctcctgaatgtgaagaaaagacaaaaaagccaaatttagtcgttcaaaggttggggtacttcatacttgggcagtaagagcttcgctcgctctagccatgaaatggtatttgaagcaatttgacttttgaatttacattatgatttttcatcttcaatagtaaataataaaaaaattgcagtctaaggaactaggccgtcctcctagaagagatgaactctatatcaaaacacatacgcggaaaaatggagttccaacaagacatgctgaaccagttattaacaaacttaaggaaattgttgaggcccatccagagttgaaggaaagaacaattcaagaatgtgatgcttttgctgctatttgtggagagagagagccaagaggacgtgtccgagttttgggtctaggaccaactccacaagatattggtaccccaggcttgagaagttacacacccacaagactccaaatggaagtcttagcccgcaaaaaggctgaaagtgagaaagctgctctagaacaacgcatagcagaaatggaggagaaaatgcaggagcaaaggatgggcagagatgtggaaatcatttcacatgatggttctaatacacgacaccatccggacacaaggtctgggcaacatgtcaatgaaacacataacattgctcagtttcatgaagatgaagcttatgtggaggatgaaatctctaatgagggtgaaaatttgcttggcagtaatcatgttagtgttacccctacagtaaatccatctcaaggcaaccatattaatattggaaaggatgtgatcttatatgccatattaagagatcatgctatggctaagggaacaattatttcaactaatcctagctcagtgttaggaggagttgctctaggaaagcaatattgtgaggttgttgtgaatgttgtgctgaaaagggacgcccttctacctcacccatatggttatttggagaagatgggtgatgctgatcggatgtcgatcgcatggccatacaagagagtaataagctatttccttattgtttttcatatatggtgacttcatactttctaactaatggttttttgtgattatatagctaaaggtgagcaagacatcaaaatcatcctacagtgctacaggtacatatatgattgacattgtaccacaattctattttgtggcatctacacaattcaaagctttcagctggttatgtggctgattttagtagatattcctgattttagtaggtttgtggttgctactagttatggttgaatggtcatatatctatgagtctagctctactcgtcaatgaaaactgaagctagcaaatgatctccatggcatgttggttcgtttgcatttcatatatgatagatattgttgctctctggtttgatctttcgagtagcagcaaggttagcagcaagctgtccttaagtagctgctcactgataggacattgcagtagcaaggacacttgtttgaaacctggcatctcaagaagtagcagcaaggtgtccttccgagtgtggtctgttcacaagttactgcaatgtcatatgatctccaagatcagtagtctagctgagggagaggatgtcttgaagctgagccttcaaattcatagttttgttgactatagaaaacatttactcatttattatttacaagcgtcatcaccccttctccttttgtaaaagtagtgcatatatatatctataactacatgtgtcacaacaggattaagtcctaggcctagatgatatggtctaattgcgttcaactattatatattttcttaataatggagcaatggtgttagctattgtatagtttattttggaatggatttcttaacaatctattaatgatctgggttttaattttgtaagaagggaggtcctagaggttgttgtggtgcctatggatgctacaacaagaaagatcaaaagctcttttggatggatgcagctaactattttgttttgtattttctcgaaaagagaaatttgcaagtgaacttcaaattgtgaagcaaacatgtggctgtaatagctagtatctctaagcttttacaagtcaaacttagggttattgcctgcatattttgatctttattgcgacaagagcaaacttgtgacctttatgtataaatgcagtacaattgttattgccatgaatgaaaacatgagctacgtttaac

SEQ ID NO: 68203 - DNA, 2247 bp, Zea Mays
ggtaattcagcctcgatcaatatatgcagtggctcattcagatgttcatagccaggttttcctttaagcttctcctcctaaatcaacaaaaaacaaaatgtataccctagttaagaagaagagaatgatgggaagggcaaataatatgacttcttgattgtcctgtttggcacggcttatctctagcttttttaggaaggaaaagcaggcaaacttctcaaacgctgattattttcagcacttctgctgctaccacagggagagccaaaagttagaaatggggaagtccagctctgtatctaggattggtccagtttaacgtagctcatctccagcttctaagaaaaaaaagcaggcaaacttcccaaagacgattctttttcagtgctattgcatatggtgctacaacagggagagccaaaagtagaagtggggaaagtccagccttttccagccatgggagcaggagcgcttctccccaccacccatgacttcagcaccctgacacccttccatgtcctccacgctgtccacaacgttcctggaggtcgggagatttgcctccacctgcactaaactctgatccatcaccgtgtaaccacccccaagccaagatgcctgtgcacaatgctggtgctgatactcaagttgagcagcaccagatctagatgctcatgacctctcctggaggagcagcacattggatctgtccaggtcaccatggaggaagctgatggaaagggggaggccgagagggggggggggtgctgttagtccttatgtgctgccacctactgtcacgtgagactttgagaggcaagagagaggggagataaaagagagcagacaaaaggtttgtttacaaaaataaactcctacttttatctagagcttcttcaagaagtggaaacaagctgttttagtcttaacaaaaagtacaaagttaaacaatatattatgattgatatgtaaaaaaagaagtgaagggcaggtctggtacagtggtgagagttgtctcactgcatcaccaggtcgtgggttcaaagcagcttctctgcatttgccggggaaggcttgcctcaatttatccgtttcccagaccccactcatgtgggagcctctgacattagatctgcccttcttgataagtaagaaaagaagggacttctatttactttctagagcaacaacaaatattgcagtgcccagggaaccaacctgttagcaactatttccaataaatttatttaaaatgtaaataataaagttcaagttcctatagtgctacaattaagtattagcgataaaaatgccaaaagcatgaagcacaagatgtcaaacttttctttgtcaatccttcctctttggacaaccctattttcattctcaactcaaattgtaatattccatccaatgcaatcaatcaaaaggcaaataccgaaacaatggaaaaataaatcaaatgttttccattttcaataaagaatacttaattttacattaggacatggtaagcaacaaaaataaacgccattgcaattgaaattatgcacttctcgtttttgtttcagtccattgaagctctatgtcataaatatttatttggatttaatggaggcgaaaaaataataagcatataattgaagcacttcttggtttgaatttgtgccataaaaatggacaaactaatgatgcttcaagggaaggatagagaaataaatggagagtgcaaaaatggcagaattcctccaaaaactatttccctaagataagcgacctattgccattagtcattataacactgctctttctaaagggtcccatgcgcatgaggggatctgaatcttgagaaggccatctgtcactatgagccaacccccaaactaacaagatctaataaaatatatagcaagtgctgcctaagtaagcattcgtttatttatttttatccgaaagtaagtccaaaactgtgtccgtccttatacttttgtagttaacagttaaccatcgatgggggaaaggcttagctcgtattttcttatcatgattattaatgtctaatctattgcagaaatggaaaaggcaagactaattgaacaatgctagtacaagcagtcagccaagaaaaccaaagtggcatgcagttcctagagtttcttgacagacaatacattaatagagaagctctttacctatctagccataaaaccatgctaaacttaagatatcataagtagacaaacatat

SEQ ID NO: 68204 - DNA, 1481 bp, Zea Mays
ctaatacttcccctcccccctggcctcggctcccgtccgttcgtccccaatttccccttcgcctttgtcttcccgctcccgtcccgaaatccgcccgccgattaagcttgcttgccctagcagatcgaagcactagccctagccctagccgaggagcgcgcccatggccgccgcggtcgtgggctgaggggccgcggctctttgcatggggtgaggaagcggcgtcccgaggcgcgggaatggaccctagcctgaaggaggaggtgatgaaggcggtggaggaggcgaggtccgcgtcggtgccgcggtgccgggtggtgcgcatcatcgtgcacgacgaggacgccaccgactcgtcctccagcgaggacgaggacgaggacgaggcgggggagcgcgcctcgccgcatccgggctcgccgtcggcgtcggcgtcggcggggagcgtgaagcgcagccgcgtgctgctccagtccgccgggtgcggcgcggaggaggacgaggaggaggaggagggggagggggcgaggttcacgggcgtgcggcggcgcccgtggggccggtgggcggcggagattcgcgacccgatgctccgccgccgcgtctggctcggtaccttcgacaccgccgaggaggccgccgcggcctacgtcgccgcgcgcctccgcatccgcgggcccaaggcgtccgggagcaacctgctcccgtccggtgctcacgccgccggctcgctccctccgcccgcgcaccgcccgcccctgcccccccgccccccgccaccgcctcagcgggagaagcagcagtgcccgccaccgcctctgctcccgccgaagaagcagcagtacccgccaccgcctctgctcccgccgaagaagcagctgtacccgccaccgcttcccctcccgccgaagaagcagcagcaccatcacccgccaccgcctctgcccacacttccgccgaagaagcggctggcgtcaccgcctctgctgcccggaagcgagaagcagtgggtcatctcctccccgtcggagccgcggttcgtcccgctgccggtgtgggctctgatgtccggctccgggaagcgcaagaagcggtcaggctgcggcgggcgcgtccccgccctccacaccccagccgccgccgaggagacagggcgcgcctgagaggccgagacgatagacgacaccatccctgctactggtatccatcccctgctccttgatcatgccaatctgatgaccgctcggtcgatcgatgctaatgtgaagagcctgtaacctctctgtctctctctctctctctctctctctgattcatgcaactgatgatttgtgtacatatgctgctggtgctggagccgcagcaggtgatgaactgatctgtgaaacctgatgaactattcatgtgtaataaataagtatctgttgacatttttcgacccgaacaaaacaaggttgttgttggcttgttgctgtggagat

SEQ ID NO: 68205 - DNA, 909 bp, Zea Mays
gctttatccactggattcacccgtaaccattgggcacgagacctggatactgaaatcatagtggcaacagcaaggacccctgatgctacagcagtatctgctaatgttgtccttgatgagaggcagatgaatgctctttttcttgatctggtcagggtgagcgagtcttacgggctgaaatttcctcgggagtttgctcttctcatgaagcagctgctgtattttgatcgctacacaagactgctggctcccagcatgaacatgctgcgagacgagaggatcaacatctccaccaatcgacaaccaagaagaactgatagatttcagtgaagccacgtcgttagtcaccggccacgtactagaggagtcgtgatgggcgataatagcaagctcatgtgacccaatactgtatatagttttgccagaccagcatagaaatgaaccacacgctagaaattgtacactccgtcgtattctgggattgagcgttatatcgtactagtaggtaacatgtaaaggctgtatcccacgaccaaagtaaatttcagatgaactgcttttgtctcatcttttttctggtactagtagcgtgaatctggttaagatgcaactgcactacacttcagctgccatcagaaaaaagtgatcttgcagcagcttaacgaggtgctgaacaaaactggctagagagatggttgcattctctcgtggtcaccacgaacttgtagagttacgggattccactatatggcggcatttcagctttcattactcgttggagcttacacaacagggttcatagtggatattaacttggaaaatatcccgcagctcaggttcgtgtgcgtgcttgtgtgttgggttggggttgggccgttgggtgatagtgcttgaactatcaggctgcca

SEQ ID NO: 68206 - DNA, 2419 bp, Zea Mays
gtcatcttctcctccgttacgaacccgtgggatctcaagtccgtttcacacttggctccctcgctcgctcgctcgctcgcactgacaacctgggtggccggctggccgccaccgcacacctctgctgtggtctaccgcccctcttcgctcccgctcccgtcgtcggtgagccgcgcccgtccaccctctcaccgatggcttcggcggccgcgaggggcgccgcggtgcgctcccctctcctcgtccaccaccgcgtccccctggtacatcccagcgggggaggctcgctccgggtcggctggcccggaattgggcccggacgggaggggcggcggcggggcgccccggttggggctagggttttcgcgcgctactcccaggcccaggacttctccacacgcctccaagatagagctggtgagctgcctaagttagtcgaggaccttatccagacatcgattagcacagggcctcgaggtgctttcaggatggcccaagggatccaagctgtgcttggggttggtggggagtggctgaatgacctctcaaagacagccaacacatcagcaggaattccatctcagatgcagcttggtttgctttctccactttaccttcgaaggctttttgagcgcatgggtgccacttatatcaagttaggccagtttgtagcatctgcgccaactttgtttcctgcagaatatgttgaggaattccagaaatgctttgaccaagcaccagctgtcccatatgacgtgattgaatcaatattacgtgaggagctgcagcggccattagatagtgtgtatgaatacattgatccggtgccaatagcctctgcctcaatagcacaggttcatggggctaggttgaagagctctcagaaagatgtggtgattaaagttctaaagcctggtattgaagatactttggttgctgatctgaattttatctatgttgttgcacgtgttttagagttcttgaaccctgaactacaaaggacatcactggcattgtaaaggatataaaggaatcaatgcttgaggaagttgactttagaaaagaggctgcaaatattcaggcatttcagggatacattgatgcaatggggtttgacaggcaggcaaaagccccatttgtgtatcagcactgtagtacaaaacgtgtattgactatggaaagattgtatggagttccgcttactgatcttgattctataagatctcttgttcctgatcctgagttgactttagtcactgcccttaatgtctggtttggaagcttaatttcatgtgaatccttccatgctgatgtacatgctggaaacctatggttgctccgtgatgggcgaattggttttattgattttgggattgttggtcgaatatctccaagaacttgggcagctatggaggtctttttggcttcttttgcaactgaggattatgatgctatggcctctgccctctctgaaatgggtgctacagggaatgatataaatactaatgaatttgcaaaggacctgcgaaagatattctcatcgatacaggacctggatactgaaatcatagtggcaacagcaaggacccctgatgctacagcagtatctgctaatgttgtccttgatgagaggcagatgaatgctctttttcttgatctggtcagggtgagcgagtcttacgggctgaaatttcctcgggagtttgctcttctcatgaagcagctgctgtattttgatcgctacacaagactgctggctcccagcatgaacatgctgcgagacgagaggatcaacatctccaccaatcgacaaccaagaagaactgatagatttcagtgaagccacgtcgttagtcaccggccacgtactagaggagtcgtgatgggcgataatagcaagctcatgtgacccaatactgtatatagttttgccagaccagcatagaaatgaaccacacgctagaaattgtacactccgtcgtattctgggattgagcgttatatcgtactagtaggtaacatgtaaaggctgtatcccacgaccaaagtaaatttcagatgaactgcttttgtctcatcttttttctggtactagtagcgtgaatctggttaagatgcaactgcactacacttcagctgccatcagaaaaaagtgatcttgcagcagcttaacgaggtgctgaacaaaactggctagagagatggttgcattctctcgtggtcaccacgaacttgtagagttacgggattccactatatggcggcatttcagctttcattactcgttggagcttacacaacagggttcatagtggatattaacttggaaaatatcccgcagctcaggttcgtgtgcgtgcttgtgtgttgggttggggttgggccgttgggtgatagtgcttgaactatcaggctgcca

SEQ ID NO: 68207 - DNA, 2701 bp, Zea Mays
gtcatcttctcctccgttacgaacccgtgggatctcaagtccgtttcacacttggctccctcgctcgctcgctcgctcgcactgacaacctgggtggccggctggccgccaccgcacacctctgctgtggtctaccgcccctcttcgctcccgctcccgtcgtcggtgagccgcgcccgtccaccctctcaccgatggcttcggcggccgcgaggggcgccgcggtgcgctcccctctcctcgtccaccaccgcgtccccctggtacatcccagcgggggaggctcgctccgggtcggctggcccggaattgggcccggacgggaggggcggcggcggggcgccccggttggggctagggttttcgcgcgctactcccaggcccaggacttctccacacgcctccaagatagagctggtgagctgcctaagttagtcgaggaccttatccagacatcgattagcacagggcctcgaggtgctttcaggatggcccaagggatccaagctgtgcttggggttggtggggagtggctgaatgacctctcaaagacagccaacacatcagcaggaattccatctcagatgcagcttggtttgctttctccactttaccttcgaaggctttttgagcgcatgggtgccacttatatcaagttaggccaggtgagacatgttcagactttgtactatgattgatgccaaatctatgatacactagtagcccataaaaatcttttccttatcaatgggatttaagttgaattattgacatttttttgttgtagtagtcatgtttacatggaaagaaagatcccctaattaattctgaaaaatcatgatgcaaattagcatgctcgtatgctcactacctgtgttgagtttcaaagggtagcacatttcagacaagcaacatgttaccttttcttggttggtcttttgagtttgtagcatctgcgccaactttgtttcctgcagaatatgttgaggaattccagaaatgctttgaccaagcaccagctgtcccatatgacgtgattgaatcaatattacgtgaggagctgcagcggccattagatagtgtgtatgaatacattgatccggtgccaatagcctctgcctcaatagcacaggttcatggggctaggttgaagagctctcagaaagatgtggtgattaaagttctaaagcctggtattgaagatactttggttgctgatctgaattttatctatgttgttgcacgtgttttagagttcttgaaccctgaactacaaaggacatcactggtaggcattgtaaaggatataaaggaatcaatgcttgaggaagttgactttagaaaagaggctgcaaatattcaggcatttcagggatacattgatgcaatggggtttgacaggcaggcaaaagccccatttgtgtatcagcactgtagtacaaaacgtgtattgactatggaaagattgtatggagttccgcttactgatcttgattctataagatctcttgttcctgatcctgagttgactttagtcactgcccttaatgtctggtttggaagcttaatttcatgtgaatccttccatgctgatgtacatgctggaaacctatggttgctccgtgatgggcgaattggttttattgattttgggattgttggtcgaatatctccaagaacttgggcagctatggaggtctttttggcttcttttgcaactgaggattatgatgctatggcctctgccctctctgaaatgggtgctacagggaatgatataaatactaatgaatttgcaaaggacctgcgaaagatattctcatcgatacaggacctggatactgaaatcatagtggcaacagcaaggacccctgatgctacagcagtatctgctaatgttgtccttgatgagaggcagatgaatgctctttttcttgatctggtcagggtgagcgagtcttacgggctgaaatttcctcgggagtttgctcttctcatgaagcagctgctgtattttgatcgctacacaagactgctggctcccagcatgaacatgctgcgagacgagaggatcaacatctccaccaatcgacaaccaagaagaactgatagatttcagtgaagccacgtcgttagtcaccggccacgtactagaggagtcgtgatgggcgataatagcaagctcatgtgacccaatactgtatatagttttgccagaccagcatagaaatgaaccacacgctagaaattgtacactccgtcgtattctgggattgagcgttatatcgtactagtaggtaacatgtaaaggctgtatcccacgaccaaagtaaatttcagatgaactgcttttgtctcatcttttttctggtactagtagcgtgaatctggttaagatgcaactgcactacacttcagctgccatcagaaaaaagtgatcttgcagcagcttaacgaggtgctgaacaaaactggctagagagatggttgcattctctcgtggtcaccacgaacttgtagagttacgggattccactatatggcggcatttcagctttcattactcgttggagcttacacaacagggttcatagtggatattaacttggaaaatatcccgcagctcaggttcgtgtgcgtgcttgtgtgttgggttggggttgggccgttgggtgatagtgcttgaactatcaggctgcca

SEQ ID NO: 68208 - DNA, 2389 bp, Zea Mays
gtcatcttctcctccgttacgaacccgtgggatctcaagtccgtttcacacttggctccctcgctcgctcgctcgctcgcactgacaacctgggtggccggctggccgccaccgcacacctctgctgtggtctaccgcccctcttcgctcccgctcccgtcgtcggtgagccgcgcccgtccaccctctcaccgatggcttcggcggccgcgaggggcgccgcggtgcgctcccctctcctcgtccaccaccgcgtccccctggtacatcccagcgggggaggctcgctccgggtcggctggcccggaattgggcccggacgggaggggcggcggcggggcgccccggttggggctagggttttcgcgcgctactcccaggcccaggacttctccacacgcctccaagatagagctggtgagctgcctaagttagtcgaggaccttatccagacatcgattagcacagggcctcgaggtgctttcaggatggcccaagggatccaagctgtgcttggggttggtggggagtggctgaatgacctctcaaagacagccaacacatcagcaggaattccatctcagatgcagcttggtttgctttctccactttaccttcgaaggctttttgagcgcatgggtgccacttatatcaagttaggccagaatatgttgaggaattccagaaatgctttgaccaagcaccagctgtcccatatgacgtgattgaatcaatattacgtgaggagctgcagcggccattagatagtgtgtatgaatacattgatccggtgccaatagcctctgcctcaatagcacaggttcatggggctaggttgaagagctctcagaaagatgtggtgattaaagttctaaagcctggtattgaagatactttggttgctgatctgaattttatctatgttgttgcacgtgttttagagttcttgaaccctgaactacaaaggacatcactggtaggcattgtaaaggatataaaggaatcaatgcttgaggaagttgactttagaaaagaggctgcaaatattcaggcatttcagggatacattgatgcaatggggtttgacaggcaggcaaaagccccatttgtgtatcagcactgtagtacaaaacgtgtattgactatggaaagattgtatggagttccgcttactgatcttgattctataagatctcttgttcctgatcctgagttgactttagtcactgcccttaatgtctggtttggaagcttaatttcatgtgaatccttccatgctgatgtacatgctggaaacctatggttgctccgtgatgggcgaattggttttattgattttgggattgttggtcgaatatctccaagaacttgggcagctatggaggtctttttggcttcttttgcaactgaggattatgatgctatggcctctgccctctctgaaatgggtgctacagggaatgatataaatactaatgaatttgcaaaggacctgcgaaagatattctcatcgatacaggacctggatactgaaatcatagtggcaacagcaaggacccctgatgctacagcagtatctgctaatgttgtccttgatgagaggcagatgaatgctctttttcttgatctggtcagggtgagcgagtcttacgggctgaaatttcctcgggagtttgctcttctcatgaagcagctgctgtattttgatcgctacacaagactgctggctcccagcatgaacatgctgcgagacgagaggatcaacatctccaccaatcgacaaccaagaagaactgatagatttcagtgaagccacgtcgttagtcaccggccacgtactagaggagtcgtgatgggcgataatagcaagctcatgtgacccaatactgtatatagttttgccagaccagcatagaaatgaaccacacgctagaaattgtacactccgtcgtattctgggattgagcgttatatcgtactagtaggtaacatgtaaaggctgtatcccacgaccaaagtaaatttcagatgaactgcttttgtctcatcttttttctggtactagtagcgtgaatctggttaagatgcaactgcactacacttcagctgccatcagaaaaaagtgatcttgcagcagcttaacgaggtgctgaacaaaactggctagagagatggttgcattctctcgtggtcaccacgaacttgtagagttacgggattccactatatggcggcatttcagctttcattactcgttggagcttacacaacagggttcatagtggatattaacttggaaaatatcccgcagctcaggttcgtgtgcgtgcttgtgtgttgggttggggttgggccgttgggtgatagtgcttgaactatcaggctgcca

SEQ ID NO: 68209 - DNA, 2398 bp, Zea Mays
gtcatcttctcctccgttacgaacccgtgggatctcaagtccgtttcacacttggctccctcgctcgctcgctcgctcgcactgacaacctgggtggccggctggccgccaccgcacacctctgctgtggtctaccgcccctcttcgctcccgctcccgtcgtcggtgagccgcgcccgtccaccctctcaccgatggcttcggcggccgcgaggggcgccgcggtgcgctcccctctcctcgtccaccaccgcgtccccctggtacatcccagcgggggaggctcgctccgggtcggctggcccggaattgggcccggacgggaggggcggcggcggggcgccccggttggggctagggttttcgcgcgctactcccaggcccaggacttctccacacgcctccaagatagagctggtgagctgcctaagttagtcgaggaccttatccagacatcgattagcacagggcctcgaggtgctttcaggatggcccaagggatccaagctgtgcttggggttggtggggagtggctgaatgacctctcaaagacagccaacacatcagcaggaattccatctcagatgcagcttggtttgctttctccactttaccttcgaaggctttttgagcgcatgggtgccacttatatcaagttaggccagtttgtagcatctgcgccaactttgtttcctgcagaatatgttgaggaattccagaaatgctttgaccaagcaccagctgtcccatatgacgtgattgaatcaatattacgtgaggagctgcagcggccattagatagtgtgtatgaatacattgatccggtgccaatagcctctgcctcaatagcacaggttcatggggctaggttgaagagctctcagaaagatgtggtgattaaagttctaaagcctggtattgaagatactttggttgctgatctgaattttatctatgttgttgcacgtgttttagagttcttgaaccctgaactacaaaggacatcactggtaggcattgtaaaggatataaaggaatcaatgcttgaggaagttgactttagaaaagaggctgcaaatattcaggcatttcagggatacattgatgcaatggggtttgacaggcaggcaaaagccccatttgtgtatcagcactgtagtacaaaacgtgtattgactatggaaagattgtatggagttccgcttactgatcttgattctataagatctcttgttcctgatcctgagttgactttagtcactgcccttaatgtctggtttggaagcttaatttcatgtgaatccttccatgctgatgtacatgctggaaacctatggttgctccgtgatgggcgaattggttttattgattttgaacttgggcagctatggaggtctttttggcttcttttgcaactgaggattatgatgctatggcctctgccctctctgaaatgggtgctacagggaatgatataaatactaatgaatttgcaaaggacctgcgaaagatattctcatcgatacaggacctggatactgaaatcatagtggcaacagcaaggacccctgatgctacagcagtatctgctaatgttgtccttgatgagaggcagatgaatgctctttttcttgatctggtcagggtgagcgagtcttacgggctgaaatttcctcgggagtttgctcttctcatgaagcagctgctgtattttgatcgctacacaagactgctggctcccagcatgaacatgctgcgagacgagaggatcaacatctccaccaatcgacaaccaagaagaactgatagatttcagtgaagccacgtcgttagtcaccggccacgtactagaggagtcgtgatgggcgataatagcaagctcatgtgacccaatactgtatatagttttgccagaccagcatagaaatgaaccacacgctagaaattgtacactccgtcgtattctgggattgagcgttatatcgtactagtaggtaacatgtaaaggctgtatcccacgaccaaagtaaatttcagatgaactgcttttgtctcatcttttttctggtactagtagcgtgaatctggttaagatgcaactgcactacacttcagctgccatcagaaaaaagtgatcttgcagcagcttaacgaggtgctgaacaaaactggctagagagatggttgcattctctcgtggtcaccacgaacttgtagagttacgggattccactatatggcggcatttcagctttcattactcgttggagcttacacaacagggttcatagtggatattaacttggaaaatatcccgcagctcaggttcgtgtgcgtgcttgtgtgttgggttggggttgggccgttgggtgatagtgcttgaactatcaggctgcca

SEQ ID NO: 68210 - DNA, 2112 bp, Zea Mays
cgcgggccgaacctgcaatttcacgcagagacgtgtcatcttctcctccgttacgaacccgtgggatctcaagtccgtttcacacttggctccctcgctcgctcgctcgctcgcactgacaacctgggtggccggctggccgccaccgcacacctctgctgtggtctaccgcccctcttcgctcccgctcccgtcgtcggtgagccgcgcccgtccaccctctcaccgatggcttcggcggccgcgaggggcgccgcggtgcgctcccctctcctcgtccaccaccgcgtccccctggtacatcccagcgggggaggctcgctccgggtcggctggcccggaattgggcccggacgggaggggcggcggcggggcgccccggttggggctagggttttcgcgcgctactcccaggcccaggacttctccacacgcctccaagatagagctggtgagctgcctaagttagtcgaggaccttatccagacatcgattagcacagggcctcgaggtgctttcaggatggcccaagggatccaagctgtgcttggggttggtggggagtggctgaatgacctctcaaagacagccaacacatcagcaggaattccatctcagatgcagcttggtttgctttctccactttaccttcgaaggctttttgagcgcatgggtgccacttatatcaagttaggccaggtaggcattgtaaaggatataaaggaatcaatgcttgaggaagttgactttagaaaagaggctgcaaatattcaggcatttcagggatacattgatgcaatggggtttgacaggcaggcaaaagccccatttgtgtatcagcactgtagtacaaaacgtgtattgactatggaaagattgtatggagttccgcttactgatcttgattctataagatctcttgttcctgatcctgagttgactttagtcactgcccttaatgtctggtttggaagcttaatttcatgtgaatccttccatgctgatgtacatgctggaaacctatggttgctccgtgatgggcgaattggttttattgattttgggattgttggtcgaatatctccaagaacttgggcagctatggaggtctttttggcttcttttgcaactgaggattatgatgctatggcctctgccctctctgaaatgggtgctacagggaatgatataaatactaatgaatttgcaaaggacctgcgaaagatattctcatcgatacaggacctggatactgaaatcatagtggcaacagcaaggacccctgatgctacagcagtatctgctaatgttgtccttgatgagaggcagatgaatgctctttttcttgatctggtcagggtgagcgagtcttacgggctgaaatttcctcgggagtttgctcttctcatgaagcagctgctgtattttgatcgctacacaagactgctggctcccagcatgaacatgctgcgagacgagaggatcaacatctccaccaatcgacaaccaagaagaactgatagatttcagtgaagccacgtcgttagtcaccggccacgtactagaggagtcgtgatgggcgataatagcaagctcatgtgacccaatactgtatatagttttgccagaccagcatagaaatgaaccacacgctagaaattgtacactccgtcgtattctgggattgagcgttatatcgtactagtaggtaacatgtaaaggctgtatcccacgaccaaagtaaatttcagatgaactgcttttgtctcatcttttttctggtactagtagcgtgaatctggttaagatgcaactgcactacacttcagctgccatcagaaaaaagtgatcttgcagcagcttaacgaggtgctgaacaaaactggctagagagatggttgcattctctcgtggtcaccacgaacttgtagagttacgggattccactatatggcggcatttcagctttcattactcgttggagcttacacaacagggttcatagtggatattaacttggaaaatatcccgcagctcaggttcgtgtgcgtgcttgtgtgttgggttggggttgggccgttgggtgatagtgcttgaactatcaggctgcca

SEQ ID NO: 68211 - DNA, 2507 bp, Zea Mays
gatttttctaatgctgtcgcatgattcctcaagcaagaggaacaacatcacgcgggccgaacctgcaatttcacgcagagacgtgtcatcttctcctccgttacgaacccgtgggatctcaagtccgtttcacacttggctccctcgctcgctcgctcgctcgcactgacaacctgggtggccggctggccgccaccgcacacctctgctgtggtctaccgcccctcttcgctcccgctcccgtcgtcggtgagccgcgcccgtccaccctctcaccgatggcttcggcggccgcgaggggcgccgcggtgcgctcccctctcctcgtccaccaccgcgtccccctggtacatcccagcgggggaggctcgctccgggtcggctggcccggaattgggcccggacgggaggggcggcggcggggcgccccggttggggctagggttttcgcgcgctactcccaggcccaggacttctccacacgcctccaagatagagctggtgagctgcctaagttagtcgaggaccttatccagacatcgattagcacagggcctcgaggtgctttcaggatggcccaagggatccaagctgtgcttggggttggtggggagtggctgaatgacctctcaaagacagccaacacatcagcaggaattccatctcagatgcagcttggtttgctttctccactttaccttcgaaggctttttgagcgcatgggtgccacttatatcaagttaggccagtttgtagcatctgcgccaactttgtttcctgcagaatatgttgaggaattccagaaatgctttgaccaagcaccagctgtcccatatgacgtgattgaatcaatattacgtgaggagctgcagcggccattagatagtgtgtatgaatacattgatccggtgccaatagcctctgcctcaatagcacaggttcatggggctaggttgaagagctctcagaaagatgtggtgattaaagttctaaagcctggtattgaagatactttggttgctgatctgaattttatctatgttgttgcacgtgttttagagttcttgaaccctgaactacaaaggacatcactggtaggcattgtaaaggatataaaggaatcaatgcttgaggaagttgactttagaaaagaggctgcaaatattcaggcatttcagggatacattgatgcaatggggtttgacaggcaggcaaaagccccatttgtgtatcagcactgtagtacaaaacgtgtattgactatggaaagattgtatggagttccgcttactgatcttgattctataagatctcttgttcctgatcctgagttgactttagtcactgcccttaatgtctggtttggaagcttaatttcatgtgaatccttccatgctgatgtacatgctggaaacctatggttgctccgtgatgggcgaattggttttattgattttgggattgttggtcgaatatctccaagaacttgggcagctatggaggtctttttggcttcttttgcaactgaggattatgatgctatggcctctgccctctctgaaatgggtgctacagggaatgatataaatactaatgaatttgcaaaggacctgcgaaagatattctcatcgatacaggacctggatactgaaatcatagtggcaacagcaaggacccctgatgctacagcagtatctgctaatgttgtccttgatgagaggcagatgaatgctctttttcttgatctggtcagggtgagcgagtcttacgggctgaaatttcctcgggagtttgctcttctcatgaagcagctgctgtattttgatcgctacacaagactgctggctcccagcatgaacatgctgcgagacgagaggatcaacatctccaccaatcgacaaccaagaagaactgatagatttcagtgaagccacgtcgttagtcaccggccacgtactagaggagtcgtgatgggcgataatagcaagctcatgtgacccaatactgtatatagttttgccagaccagcatagaaatgaaccacacgctagaaattgtacactccgtcgtattctgggattgagcgttatatcgtactagtaggtaacatgtaaaggctgtatcccacgaccaaagtaaatttcagatgaactgcttttgtctcatcttttttctggtactagtagcgtgaatctggttaagatgcaactgcactacacttcagctgccatcagaaaaaagtgatcttgcagcagcttaacgaggtgctgaacaaaactggctagagagatggttgcattctctcgtggtcaccacgaacttgtagagttacgggattccactatatggcggcatttcagctttcattactcgttggagcttacacaacagggttcatagtggatattaacttggaaaatatcccgcagctcaggttcgtgtgcgtgcttgtgtgttgggttggggttgggccgttgggtgatagtgcttgaactatcaggctgcca

SEQ ID NO: 68212 - DNA, 1709 bp, Zea Mays
gccgagtggaatgaagaaagagtgagaagcagcacaaggcgggaagccgggaacggataagataacaatcaacaaacaacaagcccgcgcgagactgttctttctccatttcccaatggccgccgccgccgccgtcttctttccctccaccccgaatcctcggcaccgcctcgccgccgccgcccgccgccctccacccagcttcaccggcgccaccgacgccgtgccgctaccggaggacgaggactccagcgacgacgatgccgacgacgacggcgcgccacgcaggagcgggcgcagggaccggcgccgcgcggtgcgcgtcgcgtgggagaagctagtccggtggtcccgctcctggcgccgccgcaaccgcagcgacgtcctcgagaccacgcgcaaggtggtggttctcgggggcgggtcgttcgggacggccatggccgctcacgtggcggccaagaaggccgatctcgaggtggccatgctgctcagggacgaccacatctgccggtccatcaacaacgcacatgtcaattgcaagtacttatcagaacacagattgccagaaaatatcgtcgcaacaactagtgctgctgatgctttagcaggagctgatttctgcttccatgctgttccggttcagttcatcctttcttgaaagtatttcaacacatgttgatccaaagttgccattcatatcacttagcaaagggctggaactcaatacccttcggacaatgtctacaatcatcccacgagcattgggaaatcgccgccaaccgtttgttgttctgtcaggaccatcatttgctgtagagttaatgaacaaattgcctacagcaatggtggtggcatccaaagacaacaagttggcaagttctgttcaacaactgttagcatccccaaatttgaggataagcacatcaaggagtagaaatcgcaggtgccctgaagaacgttcttgcaatagctgcaggtatagtggaaggcatgagtctcgggaacaactgtatggctgcccttgttgcccaaggctgttcagagatacggtggttggcgacgaagatgggagcaaagccaaccactctttctggcttgtctgggtccggtgacatcatgctcacatgcttcgtcaacctttcgcggaatagaacagtgggactacgcctcggttctggtgaaaagcttgacagaatcatgggttctatgaatcaggttgctgaaggcgtatcaactgctggggctgtcattgcgttggcgcagaagtacaaggtcaaaatgccggtattgacagcggtggcacggataattgataatgagttaactccaactaaggcggttttggagttaatgaatcttccccaggttgaggaagtctgacgaggctagcaacggagttctgcatttttccacttggctccgagtgtagcttgggcccatggccgaccgtatgaaaaatctgccaaagaccgttacttttttttgggtagcattacattattaatgaaaaaatgatatccagtaacggtggtatttagcatttcctaaatttcgaaacacattttcctgtccttgtacaccggcaaaaacttcacgatgacgtttcttttgaaagaggaaactgttctcaagctctggcatttaaattggaaacgtttctagcactcactggttactttataaatgatgtttggtttacgtatttg

SEQ ID NO: 68213 - DNA, 2386 bp, Zea Mays
gccgagtggaatgaagaaagagtgagaagcagcacaaggcgggaagccgggaacggataagataacaatcaacaaacaacaagcccgcgcgagactgttctttctccatttcccaatggccgccgccgccgccgtcttctttccctccaccccgaatcctcggcaccgcctcgccgccgccgcccgccgccctccacccagcttcaccggcgccaccgacgccgtgccgctaccggaggacgaggactccagcgacgacgatgccgacgacgacggcgcgccacgcaggagcgggcgcagggaccggcgccgcgcggtgcgcgtcgcgtgggagaagctagtccggtggtcccgctcctggcgccgccgcaaccgcagcgacgtcctcgagaccacgcgcaaggtggtggttctcgggggcgggtcgttcgggacggccatggccgctcacgtggcggccaagaaggccgatctcgaggtggccatgctgctcagggacgaccacatctgccggtccatcaacaacgcacatgtcaattgcaagtacttatcagaacacagattgccagaaaatatcgtcgcaacaactagtgctgctgatgctttagcaggagctgatttctgcttccatgctgttccggttcagttcatcctttcttgaaagtatttcaacacatgttgatccaaagttgccattcatatcacttagcaaagggctggaactcaatacccttcggacaatgtctacaatcatcccacgagcattgggaaatcgccgccaaccgtttgttgttctgtcaggaccatcatttgctgtagagttaatgaacaaattgcctacagcaatggtggtggcatccaaagacaacaagttggcaagttctgttcaacaactgttagcatccccaaatttgaggataagcacatcaaggtaaaattgcctagctccatgagttcatcacagaagatacaacaagctacaactgcacgaatgcaaaaatgcatgccatgtaggctcgtatttactaaaactgagaaagaagatgaggtggaagatgcgtgaacgaaatgaaacacagatttttttgctcttcttactatttggttttttatgtatgagaaagagagaaaatttcttacagtttatattcaggggcatgacaatagtttctgaactattaagacaagggaaaagtgactgtgttactacctgaatattccagaacattcaataatttgcaactagtacgttcaacagctaagcataagaaataggtttccttgtttcaaattagttactaccacgcagttcaatactagtcttaggagcaatatcttgggaatttctgttgcttgagaaacttttgtccagctaaaactagcccaactaataggctatacataatatatcataccaacataaagaagtgtgatgaacgtttcttccactgttaactatttatgattttgtacacattaggatttaggaggtaggttagtagagattattttgatcatgacagttttgtacttcagcgacctgtgatactgagaaaacaataggcgaatattttgaatgtgacctatgatacttcagtgatgttacaggagtagaaatcgcaggtgccctgaagaacgttcttgcaatagctgcaggtatagtggaaggcatgagtctcgggaacaactgtatggctgcccttgttgcccaaggctgttcagagatacggtggttggcgacgaagatgggagcaaagccaaccactctttctggcttgtctgggtccggtgacatcatgctcacatgcttcgtcaacctttcgcggaatagaacagtgggactacgcctcggttctggtgaaaagcttgacagaatcatgggttctatgaatcaggttgctgaaggcgtatcaactgctggggctgtcattgcgttggcgcagaagtacaaggtcaaaatgccggtattgacagcggtggcacggataattgataatgagttaactccaactaaggcggttttggagttaatgaatcttccccaggttgaggaagtctgacgaggctagcaacggagttctgcatttttccacttggctccgagtgtagcttgggcccatggccgaccgtatgaaaaatctgccaaagaccgttacttttttttgggtagcattacattattaatgaaaaaatgatatccagtaacggtggtatttagcatttcctaaatttcgaaacacattttcctgtccttgtacaccggcaaaaacttcacgatgacgtttcttttgaaagaggaaactgttctcaagctctggcatttaaattggaaacgtttctagcactcactggttactttataaatgatgtttggtttacgtatttg

SEQ ID NO: 68214 - DNA, 1667 bp, Zea Mays
gccgagtggaatgaagaaagagtgagaagcagcacaaggcgggaagccgggaacggataagataacaatcaacaaacaacaagcccgcgcgagactgttctttctccatttcccaatggccgccgccgccgccgtcttctttccctccaccccgaatcctcggcaccgcctcgccgccgccgcccgccgccctccacccagcttcaccggcgccaccgacgccgtgccgctaccggaggacgaggactccagcgacgacgatgccgacgacgacggcgcgccacgcaggagcgggcgcagggaccggcgccgcgcggtgcgcgtcgcgtgggagaagctagtccggtggtcccgctcctggcgccgccgcaaccgcagcgacgtcctcgagaccacgcgcaaggtggtggttctcgggggcgggtcgttcgggacggccatggccgctcacgtggcggccaagaaggccgatctcgaggtggccatgctgctcagggacgaccacatctgccggtccatcaacaacgcacatgtcaattgcaagtacttatcagaacacagattgccagaaaatatcgtcgcaacaactagtgctgctgatgctttagcaggagctgatttctgcttccatgctgttccggttcagttcatcctttcttgaaagtatttcaacacatgttgatccaaagttgccattcatatcacttagcaaagggctggaactcaatacccttcggacaatgtctacaatcatcccacgagcattgggaaatcgccgccaaccgtttgttgttctgtcaggaccatcatttgctgtagagttaatgaacaaattgcctacagcaatggtggtggcatccaaagacaacaagttggcaagttctgttcaacaactgttagcatccccaaatttgaggataagcacatcaagctgcaggtatagtggaaggcatgagtctcgggaacaactgtatggctgcccttgttgcccaaggctgttcagagatacggtggttggcgacgaagatgggagcaaagccaaccactctttctggcttgtctgggtccggtgacatcatgctcacatgcttcgtcaacctttcgcggaatagaacagtgggactacgcctcggttctggtgaaaagcttgacagaatcatgggttctatgaatcaggttgctgaaggcgtatcaactgctggggctgtcattgcgttggcgcagaagtacaaggtcaaaatgccggtattgacagcggtggcacggataattgataatgagttaactccaactaaggcggttttggagttaatgaatcttccccaggttgaggaagtctgacgaggctagcaacggagttctgcatttttccacttggctccgagtgtagcttgggcccatggccgaccgtatgaaaaatctgccaaagaccgttacttttttttgggtagcattacattattaatgaaaaaatgatatccagtaacggtggtatttagcatttcctaaatttcgaaacacattttcctgtccttgtacaccggcaaaaacttcacgatgacgtttcttttgaaagaggaaactgttctcaagctctggcatttaaattggaaacgtttctagcactcactggttactttataaatgatgtttggtttacgtatttg

SEQ ID NO: 68215 - DNA, 1744 bp, Zea Mays
gactccaaatcgctcgagcgtcgagccgagtggaatgaagaaagagtgagaagcagcacaaggcgggaagccgggaacggataagataacaatcaacaaacaacaagcccgcgcgagactgttctttctccatttcccaatggccgccgccgccgccgtcttctttccctccaccccgaatcctcggcaccgcctcgccgccgccgcccgccgccctccacccagcttcaccggcgccaccgacgccgtgccgctaccggaggacgaggactccagcgacgacgatgccgacgacgacggcgcgccacgcaggagcgggcgcagggaccggcgccgcgcggtgcgcgtcgcgtgggagaagctagtccggtggtcccgctcctggcgccgccgcaaccgcagcgacgtcctcgagaccacgcgcaaggtggtggttctcgggggcgggtcgttcgggacggccatggccgctcacgtggcggccaagaaggccgatctcgaggtggccatgctgctcagggacgaccacatctgccggtccatcaacaacgcacatgtcaattgcaagtacttatcagaacacagattgccagaaaatatcgtcgcaacaactagtgctgctgatgctttagcaggagctgatttctgcttccatgctgttccggttcagttcatcctttcttgaaagtatttcaacacatgttgatccaaagttgccattcatatcacttagcaaagggctggaactcaatacccttcggacaatgtctacaatcatcccacgagcattgggaaatcgccgccaaccgtttgttgttctgtcaggaccatcatttgctgtagagttaatgaacaaattgcctacagcaatggtggtggcatccaaagacaacaagttggcaagttctgttcaacaactgttagcatccccaaatttgaggataagcacatcaagtgatgttacaggagtagaaatcgcaggtgccctgaagaacgttcttgcaatagctgcaggtatagtggaaggcatgagtctcgggaacaactgtatggctgcccttgttgcccaaggctgttcagagatacggtggttggcgacgaagatgggagcaaagccaaccactctttctggcttgtctgggtccggtgacatcatgctcacatgcttcgtcaacctttcgcggaatagaacagtgggactacgcctcggttctggtgaaaagcttgacagaatcatgggttctatgaatcaggttgctgaaggcgtatcaactgctggggctgtcattgcgttggcgcagaagtacaaggtcaaaatgccggtattgacagcggtggcacggataattgataatgagttaactccaactaaggcggttttggagttaatgaatcttccccaggttgaggaagtctgacgaggctagcaacggagttctgcatttttccacttggctccgagtgtagcttgggcccatggccgaccgtatgaaaaatctgccaaagaccgttacttttttttgggtagcattacattattaatgaaaaaatgatatccagtaacggtggtatttagcatttcctaaatttcgaaacacattttcctgtccttgtacaccggcaaaaacttcacgatgacgtttcttttgaaagaggaaactgttctcaagctctggcatttaaattggaaacgtttctagcactcactggttactttataaatgatgtttggtttacgtatttg

SEQ ID NO: 68216 - DNA, 1334 bp, Zea Mays
cttctcccgtctgcattcccaacggtcaaatcatccccgtctctctcttgaaaaaaaatctcccggaaccaatcacaatcacaaacgcaggcgcagggaggcgagtgcgggcatggccaggaggggagcggcggcgaagggaacctggaggccgaggaggaaaccctcgcgcgcgcaagcggatgtcgacggcgacgcggtacaccgcggcgccgaaggcgggcgccctccgccaaagggacacacaactgccaccggcagcggcgggtttttctgctgctacctgctccggtccctctgcccgcgcagcaagggccgcacctacatcggcttcacggtgaacccgcgccgccggatccggcaacacaacggcgagatcgtcagcggcgcgtggcggacccggcgcggccggccctgggagatggtgctctgcatctacggcttcccctccaacgtcgccgccctccagttcgagtgggcgtggcagcacccgacggagtccctcgccgtgcgcaaggccgccgccgagttcaagtcgctcggcggcatcggcaacaaggtcaagcttgcgtacaccatgctcaacctcccctcatgggaaagtctgaacctgacggtgaacttcttctcctcgaagaacaccaagttcaccaccggctgcccgtcgctgccgagccagatgaaggctgtcgtgtgcggtatggaggatctgcagtgccagcccgacggcccgtcatccgaggaggatgacaatgacatccgcgacgagtcccaagataatggggaagaaccgcctgactcgcctatccgagatggattttcatattctgactactgtttccagcaaccgtcctctgatcaagcgcagccgatggacgagcaaaccataagtgcaggttctggtgtcgaggatgactttgttgacgagttcgcttcttcgatggaaaggagcgaaatccttggcacaagaagaggactgaacggaccaagaacatcgcctctatgttccttgggcgcgtgcagcaacgatgacggattggaagaagaggcaggactgatgtctccattattgatgcccaatgctagctcagatgctggtgacggccgccatatcctcaacggaaaccacgtggtggacttggttaccccgactccactaggccggctccggagaagagactgtatttccagcatctgtccaaagatcattgatctgacgtcctcgcctattgtcattcagttgtagtgtcttgtattagactgacttcatcagttcattttgtttctggtgaaacctacacagatacatctggtgaaagaaggctaccatgagt

SEQ ID NO: 68217 - DNA, 1681 bp, Zea Mays
gcattcccaacggtcaaatcatccccgtctctctcttgaaaaaaaatctcccggaaccaatcacaatcacaaacgcaggcgcagggaggcgagtgcgggcatggccaggaggggagcggcggcgaagggaacctggaggccgaggaggaaaccctcgcgcgcgcaagcggatgtcgacggcgacgcggtacaccgcggcgccgaaggcgggcgccctccgccaaagggacacacaactgccaccggcagcggcgggtttttctgctgctacctgctccggtccctctgcccgcgcagcaagggccgcacctacatcggcttcacggtgaacccgcgccgccggatccggcaacacaacggcgagatcgtcagcggcgcgtggcggacccggcgcggccggccctgggagatggtgctctgcatctacggcttcccctccaacgtcgccgccctccagttcgagtgggcgtggcagcacccgacggagtccctcgccgtgcgcaaggccgccgccgagttcaagtcgctcggcggcatcggcaacaaggtcaagcttgcgtacaccatgctcaacctcccctcatgggaaagaacaccaagttcaccaccggctgcccgtcgctgccgagccagatgaaggctgtcgtgtgcggtatggaggatctgcagtgccagcccgacggcccgtcatccgaggaggatgacaatgacatccgcgacgagtcccaagataatggggaagaaccgcctgactcgcctatccgagatggattttcatattctgactactgtttccagcaaccgtcctctgatcaagcgcagccgatggacgagcaaaccataagtgcaggttctggtgtcgaggatgactttgttgacgagttcgcttcttcgatggaaaggagcgaaatccttggcacaagaagaggactgaacggaccaagaacatcgcctctatgttccttgggcgcgtgcagcaacgatgacggattggaagaagaggcaggactgatgtctccattattgatgcccaatgctagctcagatgctggtgacggccgccatatcctcaacggaaaccacgtggtggacttggttaccccgactccactaggccggctccggagaagagactgtatttccagcatctgtccaaagatcattgatctgacgtcctcgcctattgtcattcagttgtagtgtcttgtattagactgacttcatcaggtcctctaaacgatcatgtactctaaattatagaggacaccatcatcctctacttcatccagcagtattctttaaactgtcctctaaatttagaggacactgctagatcatcgatatatatagtttctctattctctcctgtatccatttgaatactttaaacaactagtttagcaaaattaaaatatgtacaatacatttgagagtatgacaaatacgtatgtacaaaaaataaaaaatgtctctaatataattatttgtgtatagataatgtgatttagaggattttgttggaaaggaatgagatatagataatgaaatcttttggaggagactgaaaataacagatatagatgatatatatagaggacgttgctggagacagtcttagcgacacttttcagtgtcataccatgtataagttaaagagtataagacagataaacataggaac

SEQ ID NO: 68218 - DNA, 1702 bp, Zea Mays
ctcaagaacgggcgtgaagaagtagatgtcgccgagccggtcgttcgtcggcgagttgccgccatacaccagcagccctcgctggccgtccttctcccccgccgtgaacgcacaccacccgcgaggccccgggtggtgctcggcctccgccctgtcgtccagccgcgtccacgcgccggtctccgtgtccagcgcgaacgcctcggccgagaacttgccggcgccgaggtggccgaggtcactggggtccacctcgccgccgaacagcaccacgtgcctcccgaacccggcggcgcagaacacgctccgggggctgggcctgtcgcccgtggtctggaccgcggcccactcccgggtggccgggtcgtagcagtgcacgtcgtccagctcctcgcccgagaacccgtacaccacccacaccttcccgccggcgacgaccagcccgggcccgccgcgcggctggcacgcctcccccggcggcggcagctgctcccattgccccgccgccacgtcgtacgcccacaggtcgttgaggcggccggcgtcgccgcacccgccgaacacgtacacccgccccgcgcccgcgtccgccgccatggagtggtagctgcggtgcggcgggccgtcggcgccggacgacagcagcgtccacgcccgcgtcgccgcgtcgaaggcgtagagctcgttcagctccttgtgctccaggtcgcgcccgccgaacgtgaacaccgtgccgcccgcggccgccatggtcacgcccacgcgcggcggcggcacgtcgcccgtcgcgtccagcgccgaccacgtctgggtgttgaggtcgaaggcgtacatggtgctgtcaaccgggacgcgcggggtgagctcgccgccgaacgagtaggccgtgcccccgagcagcgtgatggcgtgggagctccgtgctcccggaccggcgcccttctgctccatctgggtgaaaagcattgaaattgcaagcataataagcgagacatccacaattaatctctccaccccgttgaaaccaaattctgaggctcaaatttcgcagaaatgaaatcagaattctaagaattgtgacatccttgtgatttggttcagatcaagtgactaataagcaacagtggccatacgactgcggactgcaaggttttgaggctcaaaagttcagcagaagttgcaacaactaaggattggcaactgtggagtcgggggcatacagctgcaaaagaagctcgttgactcgagcagaacttgggcatcaccgacttccctgtcagcatgcctttgacactaggaagacgaagatccattgaagacggaatggaaacttcctcgtcaacgccacccaccaatcccgcaatcaatccccctttgtagatcacatagggctccagagtccagttccccgaccatccgagtgggtgggttactatcgccaactgatcccaactcacttttgaacctaatatcaaagatggcttgcaaaactccactcaagaaacaaacaaatccttccgcgaaccaaaaaccaagcttaaatccgattcaaacatcaggaacgtctccaaaaaagctacacctgccggtgcgaattcgacggatgaataagttaaagagagaatcggaggaggaagacgaaggctaggcaagcaaaccttcacccaagttcctgccattgacgctcccacaaagctctgct

SEQ ID NO: 68219 - DNA, 985 bp, Zea Mays
gtaatactgtgcattccttcttggcgtgttgcgtgtagcatagcataggagcgttgtgtatcagcaagaagacgacccttggtacttggtaatagatggcagcacctccgtccatgccggcgccgccgccgccggagccaagcggaggcatcgtatcccccgtggcggtggtggcctcgcatttctgcgcgccctacgtggtgcagctggcggtgaaggagaagaaggtgagcctccgggaaggcgacttcaccatcaccgacaccaacggcgccgtcgtggtcacggtcaagggtgccttgatcagcatccacaaccgccgccgcctcctcgacgccgccggcaaccccctcctctgcctgcgcgagaagcatgcacaacacgtgggaagcgtacagaggggacagcacgagatcgagcgacctgctcttcaccgccaagaaatcctccatcatccagccgttcaagaccgagatgctcatctacctggcctccaacacctcgcacgaggcctgcgacttcatcatgaagggcagcttcaaggagaggtcctgctctttctacctcggcggcaacaactccaacgccttgatcgctaaaatgcaccgcgagcacagcgccacgagcatgttgctgggaaaggactacttcagcctcaccgtgttcccgaacgtcgactacgtgttcatctcggcgcttgtggtcatcctgcaggaaattcacacggacaaaaatgactgaatgcacaccacaggtgtcatacatatggtcatccttctgttctccctagtgtaaccttatataataatcttatgtatattgaggattgcatatatagagacttcaaagcttcttcacttcaaagctccctagtgtaaccttaataatcttacgccccgtttggatcactggaattgaattccattctaataatagtaatttaggcatatatcaattaagctaattcacttgtatacaaaatata

SEQ ID NO: 68220 - DNA, 2805 bp, Zea Mays
caaacctcaccggcggcggtcattgaccgcaactggttgccgtgtttacttcccccacgcgccacgtttccgcgcatcccgagactccgagagagtggctggcggaacggaacacaaatccaatctcgctacgtgaagttcgcctcgcggcctcgcctaccaccacccgtgcccgtgtcccgccgccggcggcgctggggatggcggggcccaaggcggctgaggacggctcggcggctccgctgctgcctgcgcaggcgggggaacggagctcaggaggcgtgggcggaggggccacgtccgcgcagacgctggggaacgtggttgtctccatcgtgggcaccggtgtgctcggcctcccctacgccttccgcgcggccggctgggtcgcgggctccatcggcgtcgccgccgccggctccgccacgctctactgcatgttgctactctgcaaatacccccgtttatattatttgaagacaccataagatggacaatcaaaggcggagattgcttgattgcacgattgcaccaatacatataattgcacaagatatgtcttcatactggactactggtattattgagttgtggtttcccatgtccaaattttcaagaaacgaactgcaaaggacaaagtgtttctgcttgcattactctctcattcatcttccaataaaaaaactgtgagtccgtctttctgccatttgaagcacgactctcctaaatgtgctaagattctgccaaaagattagtcaatgaatcaaacttgattttgcaattgaccagcttcttgactccattttaaattcaaaatgcactggtttctttccgacttaaagaaaaaatcgtttaaagatagccaaatacaatagttcttagagcaactccaagtgattagataaaaagactagccaaatttactgatttagctactctctaaaatagattttaaagaaaaagtgtaggctaatccaacagactcgataaacctacggactgaatagagagtgaaaagcatgctatccaaaattggagagcgaagatggagaaatagagagtcactaaatttgaagagtcgtttatagagtctattggatacaatttttttttaatattagctaaatttacctttacaaaaccatatagctagtctcttggagttgctcttatattgtctgtttagattgtgcaagattttgattggatttagtgtaaggagtttgttgatgctgcttaacatttgacagcaatattatgattgtaacttatataaatcaactaaggtttggaactgctatgccaggtctttgtcaattatgaatagaataacattaattgctttctttttgggcaaacattttttctataaaaattaatccctctctgtttagtttactcggtgccattttgattttgaaggtggactgcagggataaactcaaagaggaagaaactgaagagtgctgtcatggtcactatacatatggggatttgggtgacaggtgcttcgggactataggccgatgcttgacagagaccctcgtccttgtttcgcagatagcgctctccttcatccgctcactgtcgtccctttctccgttcagtatatttgcagacgtgtgcaatgtccttgccatggcaatcgttatcaaagaggatcttcagctctttgaccaccccttttcaaacagaagcgcttttaatggactgtgggcagtaccattcaccttcggtgttgcagtcttctgtttcgaaggattcagcatgacccttgcactagaagcgtcgatggcagaccggagaaagttccgctcggtgctttcccaagcagttgccgccattatagccgtgtatgtctgttttggagtttgtgggtacttggcctatggcgaggccaccaaagacatcataacacttaatcttccgaacaattggtcgtctgctgcagttaaggttggcctatgcatcgcactggcattcaccttcccagtcatgatgcacccgatccatgagatcgtcgagacaaggttcagatccaacagatgctttcggaagctcagccacaacgatggcggcgcggagtggataggcttgcacgcaagccgcgtcctcgtggtggcggtcctcactgtggtggcgtccttcatccccttctttgggtccttcatctcgttcgtcgggagcaccatgtgcgcgcttctctcctttgtgctgccggctctcttccatctcagcattgtaggctcgtcaatacccttgtggaggcgggtgctggactacggcatccttctctttggtctggctttcgctggatatggtcttgtcactgctctctcctcgcattgaacaatggcccaaacagtcaaaaaagtgcagagatcaggatatcttgtgatgacaggagtcaaatggatgctaggagcaccatatatcagatagcacggctcggattagtgcgtgattgaactgatccgcttcaacccatatagccgcagtcatccatggaagatataccttagcggattggaatggtgatttcgagaaaccaagttgacattgttctatgcatgttacaaaaatctacagatgtcatgaactttaagagccatatcttaatcgcgtatgcatgttacacatctacatgtgtcacgtttcaaaaaaaaagtttatgttgactattcgatccgatccatcatgtatgtcacatttgaataacaaaaatccattaatgtgtatgtttgcagtgctcgcttaaagggtaactggaacgtgcctgtgtaatgccacggaacataaattgcg

SEQ ID NO: 68221 - DNA, 2396 bp, Zea Mays
caaacctcaccggcggcggtcattgaccgcaactggttgccgtgtttacttcccccacgcgccacgtttccgcgcatcccgagactccgagagagtggctggcggaacggaacacaaatccaatctcgctacgtgaagttcgcctcgcggcctcgcctaccaccacccgtgcccgtgtcccgccgccggcggcgctggggatggcggggcccaaggcggctgaggacggctcggcggctccgctgctgcctgcgcaggcgggggaacggagctcaggaggcgtgggcggaggggccacgtccgcgcagacgctggggaacgtggttgtctccatcgtgggcaccggtgtgctcggcctcccctacgccttccgcgcggccggctgggtcgcgggctccatcggcgtcgccgccgccggctccgccacgctctactgcatgttgctactctgcaaatacccccgtttatattatttgaagacaccataagatggacaatcaaaggcggagattgcttgattgcacgattgcaccaatacatataattgcacaagatatgtcttcatactggactactggtgtattccctccgaccccccaaaatatctttctagttaatcaatcttaacttttgtcaaatatataaaaaaatgtgttaatttattatgcataaggagcatcattagatgaataatgaaacacatttcagtaataaatttatttggagcttactccaaacctaggatgatactttttccttggtggagagggagtaagaaatttcccacctgttcttgtatcgtacagattattgagttgtggtttcccatgtccaaattttcaagaaacgaactgcaaaggacaaagtgtttctgcttgcattactctctcattcatcttccaataaaaaaactggataaactcaaagaggaagaaactgaagagtgctgtcatggtcactatacatatggggatttgggtgacaggtgcttcgggactataggccgatgcttgacagagaccctcgtccttgtttcgcaggctggtggttctgtagcatacctgatattcattggccaaaatctccattccacattcagccagctgatgtcaccagctggcttcatctttgccatcctcctgcctctgcagatagcgctctccttcatccgctcactgtcgtccctttctccgttcagtatatttgcagacgtgtgcaatgtccttgccatggcaatcgttatcaaagaggatcttcagctctttgaccaccccttttcaaacagaagcgcttttaatggactgtgggcagtaccattcaccttcggtgttgcagtcttctgtttcgaaggattcagcatgacccttgcactagaagcgtcgatggcagaccggagaaagttccgctcggtgctttcccaagcagttgccgccattatagccgtgtatgtctgttttggagtttgtgggtacttggcctatggcgaggccaccaaagacatcataacacttaatcttccgaacaattggtcgtctgctgcagttaaggttggcctatgcatcgcactggcattcaccttcccagtcatgatgcacccgatccatgagatcgtcgagacaaggttcagatccaacagatgctttcggaagctcagccacaacgatggcggcgcggagtggataggcttgcacgcaagccgcgtcctcgtggtggcggtcctcactgtggtggcgtccttcatccccttctttgggtccttcatctcgttcgtcgggagcaccatgtgcgcgcttctctcctttgtgctgccggctctcttccatctcagcattgtaggctcgtcaatacccttgtggaggcgggtgctggactacggcatccttctctttggtctggctttcgctggatatggtcttgtcactgctctctcctcgcattgaacaatggcccaaacagtcaaaaaagtgcagagatcaggatatcttgtgatgacaggagtcaaatggatgctaggagcaccatatatcagatagcacggctcggattagtgcgtgattgaactgatccgcttcaacccatatagccgcagtcatccatggaagatataccttagcggattggaatggtgatttcgagaaaccaagttgacattgttctatgcatgttacaaaaatctacagatgtcatgaactttaagagccatatcttaatcgcgtatgcatgttacacatctacatgtgtcacgtttcaaaaaaaaagtttatgttgactattcgatccgatccatcatgtatgtcacatttgaataacaaaaatccattaatgtgtatgtttgcagtgctcgcttaaagggtaactggaacgtgcctgtgtaatgccacggaacataaattgcg

SEQ ID NO: 68222 - DNA, 2296 bp, Zea Mays
caaacctcaccggcggcggtcattgaccgcaactggttgccgtgtttacttcccccacgcgccacgtttccgcgcatcccgagactccgagagagtggctggcggaacggaacacaaatccaatctcgctacgtgaagttcgcctcgcggcctcgcctaccaccacccgtgcccgtgtcccgccgccggcggcgctggggatggcggggcccaaggcggctgaggacggctcggcggctccgctgctgcctgcgcaggcgggggaacggagctcaggaggcgtgggcggaggggccacgtccgcgcagacgctggggaacgtggttgtctccatcgtgggcaccggtgtgctcggcctcccctacgccttccgcgcggccggctgggtcgcgggctccatcggcgtcgccgccgccggctccgccacgctctactgcatgttgctactctgcaaatacccccgtttatattatttgaagacaccataagatggacaatcaaaggcggagattgcttgattgcacgattgcaccaatacatataattgcacaagatatgtcttcatactggactactggtgtattccctccgaccccccaaaatatctttctagttaatcaatcttaacttttgtcaaatatataaaaaaatgtgttaatttattatgcataaggagcatcattagatgaataatgaaacacatttcagtaataaatttatttggagcttactccaaacctaggatgatactttttccttggtggagagggagtaagaaatttcccacctgttcttgtatcgtacagattattgagttgtggtttcccatgtccaaattttcaagaaacgaactgcaaaggacaaagtgtttctgcttgcattactctctcattcatcttccaataaaaaaactgtggactgcagggataaactcaaagaggaagaaactgaagagtgctgtcatggtcactatacatatggggatttgggtgacaggtgcttcgggactataggccgatgcttgacagagaccctcgtccttgtttcgcagatagcgctctccttcatccgctcactgtcgtccctttctccgttcagtatatttgcagacgtgtgcaatgtccttgccatggcaatcgttatcaaagaggatcttcagctctttgaccaccccttttcaaacagaagcgcttttaatggactgtgggcagtaccattcaccttcggtgttgcagtcttctgtttcgaaggattcagcatgacccttgcactagaagcgtcgatggcagaccggagaaagttccgctcggtgctttcccaagcagttgccgccattatagccgtgtatgtctgttttggagtttgtgggtacttggcctatggcgaggccaccaaagacatcataacacttaatcttccgaacaattggtcgtctgctgcagttaaggttggcctatgcatcgcactggcattcaccttcccagtcatgatgcacccgatccatgagatcgtcgagacaaggttcagatccaacagatgctttcggaagctcagccacaacgatggcggcgcggagtggataggcttgcacgcaagccgcgtcctcgtggtggcggtcctcactgtggtggcgtccttcatccccttctttgggtccttcatctcgttcgtcgggagcaccatgtgcgcgcttctctcctttgtgctgccggctctcttccatctcagcattgtaggctcgtcaatacccttgtggaggcgggtgctggactacggcatccttctctttggtctggctttcgctggatatggtcttgtcactgctctctcctcgcattgaacaatggcccaaacagtcaaaaaagtgcagagatcaggatatcttgtgatgacaggagtcaaatggatgctaggagcaccatatatcagatagcacggctcggattagtgcgtgattgaactgatccgcttcaacccatatagccgcagtcatccatggaagatataccttagcggattggaatggtgatttcgagaaaccaagttgacattgttctatgcatgttacaaaaatctacagatgtcatgaactttaagagccatatcttaatcgcgtatgcatgttacacatctacatgtgtcacgtttcaaaaaaaaagtttatgttgactattcgatccgatccatcatgtatgtcacatttgaataacaaaaatccattaatgtgtatgtttgcagtgctcgcttaaagggtaactggaacgtgcctgtgtaatgccacggaacataaattgcg

SEQ ID NO: 68223 - DNA, 3119 bp, Zea Mays
caaacctcaccggcggcggtcattgaccgcaactggttgccgtgtttacttcccccacgcgccacgtttccgcgcatcccgagactccgagagagtggctggcggaacggaacacaaatccaatctcgctacgtgaagttcgcctcgcggcctcgcctaccaccacccgtgcccgtgtcccgccgccggcggcgctggggatggcggggcccaaggcggctgaggacggctcggcggctccgctgctgcctgcgcaggcgggggaacggagctcaggaggcgtgggcggaggggccacgtccgcgcagacgctggggaacgtggttgtctccatcgtgggcaccggtgtgctcggcctcccctacgccttccgcgcggccggctgggtcgcgggctccatcggcgtcgccgccgccggctccgccacgctctactgcatgttgctactcgagtaggcgagtacagtagacgccggtcgcgttctctctcttccccaccattcgttctgctgtttgaccgggcctggcgtgctcttcgccaactttgtgctgcagcctgcagtgttcgctgtgctgttcccttccagatccgatcatccgaatggctcataaaattaaaaatcttctagatttgaagggccgagacagcagtacttgtggggatatatcctgttgtacgatcgtgcaatcaatcaatgtatatcattgattgtaaatcatgtagtgctaatgttttacatataacctcttgttttgtgtctcagtgcaaatacccccgtttatattatttgaagacaccataagatggacaatcaaaggcggagattgcttgattgcacgattgcaccaatacatataattgcacaagatatgtcttcatactggactactggtattattgagttgtggtttcccatgtccaaattttcaagaaacgaactgcaaaggacaaagtgtttctgcttgcattactctctcattcatcttccaataaaaaaactgtgagtccgtctttctgccatttgaagcacgactctcctaaatgtgctaagattctgccaaaagattagtcaatgaatcaaacttgattttgcaattgaccagcttcttgactccattttaaattcaaaatgcactggtttctttccgacttaaagaaaaaatcgtttaaagatagccaaatacaatagttcttagagcaactccaagtgattagataaaaagactagccaaatttactgatttagctactctctaaaatagattttaaagaaaaagtgtaggctaatccaacagactcgataaacctacggactgaatagagagtgaaaagcatgctatccaaaattggagagcgaagatggagaaatagagagtcactaaatttgaagagtcgtttatagagtctattggatacaatttttttttaatattagctaaatttacctttacaaaaccatatagctagtctcttggagttgctcttatattgtctgtttagattgtgcaagattttgattggatttagtgtaaggagtttgttgatgctgcttaacatttgacagcaatattatgattgtaacttatataaatcaactaaggtttggaactgctatgccaggtctttgtcaattatgaatagaataacattaattgctttctttttgggcaaacattttttctataaaaattaatccctctctgtttagtttactcggtgccattttgattttgaaggtggactgcagggataaactcaaagaggaagaaactgaagagtgctgtcatggtcactatacatatggggatttgggtgacaggtgcttcgggactataggccgatgcttgacagagaccctcgtccttgtttcgcagatagcgctctccttcatccgctcactgtcgtccctttctccgttcagtatatttgcagacgtgtgcaatgtccttgccatggcaatcgttatcaaagaggatcttcagctctttgaccaccccttttcaaacagaagcgcttttaatggactgtgggcagtaccattcaccttcggtgttgcagtcttctgtttcgaaggattcagcatgacccttgcactagaagcgtcgatggcagaccggagaaagttccgctcggtgctttcccaagcagttgccgccattatagccgtgtatgtctgttttggagtttgtgggtacttggcctatggcgaggccaccaaagacatcataacacttaatcttccgaacaattggtcgtctgctgcagttaaggttggcctatgcatcgcactggcattcaccttcccagtcatgatgcacccgatccatgagatcgtcgagacaaggttcagatccaacagatgctttcggaagctcagccacaacgatggcggcgcggagtggataggcttgcacgcaagccgcgtcctcgtggtggcggtcctcactgtggtggcgtccttcatccccttctttgggtccttcatctcgttcgtcgggagcaccatgtgcgcgcttctctcctttgtgctgccggctctcttccatctcagcattgtaggctcgtcaatacccttgtggaggcgggtgctggactacggcatccttctctttggtctggctttcgctggatatggtcttgtcactgctctctcctcgcattgaacaatggcccaaacagtcaaaaaagtgcagagatcaggatatcttgtgatgacaggagtcaaatggatgctaggagcaccatatatcagatagcacggctcggattagtgcgtgattgaactgatccgcttcaacccatatagccgcagtcatccatggaagatataccttagcggattggaatggtgatttcgagaaaccaagttgacattgttctatgcatgttacaaaaatctacagatgtcatgaactttaagagccatatcttaatcgcgtatgcatgttacacatctacatgtgtcacgtttcaaaaaaaaagtttatgttgactattcgatccgatccatcatgtatgtcacatttgaataacaaaaatccattaatgtgtatgtttgcagtgctcgcttaaagggtaactggaacgtgcctgtgtaatgccacggaacataaattgcg

SEQ ID NO: 68224 - DNA, 2444 bp, Zea Mays
caaacctcaccggcggcggtcattgaccgcaactggttgccgtgtttacttcccccacgcgccacgtttccgcgcatcccgagactccgagagagtggctggcggaacggaacacaaatccaatctcgctacgtgaagttcgcctcgcggcctcgcctaccaccacccgtgcccgtgtcccgccgccggcggcgctggggatggcggggcccaaggcggctgaggacggctcggcggctccgctgctgcctgcgcaggcgggggaacggagctcaggaggcgtgggcggaggggccacgtccgcgcagacgctggggaacgtggttgtctccatcgtgggcaccggtgtgctcggcctcccctacgccttccgcgcggccggctgggtcgcgggctccatcggcgtcgccgccgccggctccgccacgctctactgcatgttgctactcgtcagtacgctcgcccgcccgcccatccctccttactgatcctcacactgcctgctgctcccgagcaggagtaggcgagtacagtagacgccggtcgcgttctctctcttccccaccattcgttctgctgtttgaccgggcctggcgtgctcttcgccaactttgtgctgcagcctgcagtgttcgctgtgctgttcccttccagatccgatcatccgaatggctcataaaattaaaaatcttctagatttgaagggccgagacagcagtacttgtggggatatatcctgttgtacgatcgtgcaatcaatcaatgtatatcattgattgtaaatcatgtagtgctaatgttttacatataacctcttgttttgtgtctcagtgcaaatacccccgtttatattatttgaagacaccataagatggacaatcaaaggcggagattgcttgattgcacgattgcaccaatacatataattgcacaagatatgtcttcatactggactactggtggataaactcaaagaggaagaaactgaagagtgctgtcatggtcactatacatatggggatttgggtgacaggtgcttcgggactataggccgatgcttgacagagaccctcgtccttgtttcgcaggctggtggttctgtagcatacctgatattcattggccaaaatctccattccacattcagccagctgatgtcaccagctggcttcatctttgccatcctcctgcctctgcagatagcgctctccttcatccgctcactgtcgtccctttctccgttcagtatatttgcagacgtgtgcaatgtccttgccatggcaatcgttatcaaagaggatcttcagctctttgaccaccccttttcaaacagaagcgcttttaatggactgtgggcagtaccattcaccttcggtgttgcagtcttctgtttcgaaggattcagcatgacccttgcactagaagcgtcgatggcagaccggagaaagttccgctcggtgctttcccaagcagttgccgccattatagccgtgtatgtctgttttggagtttgtgggtacttggcctatggcgaggccaccaaagacatcataacacttaatcttccgaacaattggtcgtctgctgcagttaaggttggcctatgcatcgcactggcattcaccttcccagtcatgatgcacccgatccatgagatcgtcgagacaaggttcagatccaacagatgctttcggaagctcagccacaacgatggcggcgcggagtggataggcttgcacgcaagccgcgtcctcgtggtggcggtcctcactgtggtggcgtccttcatccccttctttgggtccttcatctcgttcgtcgggagcaccatgtgcgcgcttctctcctttgtgctgccggctctcttccatctcagcattgtaggctcgtcaatacccttgtggaggcgggtgctggactacggcatccttctctttggtctggctttcgctggatatggtcttgtcactgctctctcctcgcattgaacaatggcccaaacagtcaaaaaagtgcagagatcaggatatcttgtgatgacaggagtcaaatggatgctaggagcaccatatatcagatagcacggctcggattagtgcgtgattgaactgatccgcttcaacccatatagccgcagtcatccatggaagatataccttagcggattggaatggtgatttcgagaaaccaagttgacattgttctatgcatgttacaaaaatctacagatgtcatgaactttaagagccatatcttaatcgcgtatgcatgttacacatctacatgtgtcacgtttcaaaaaaaaagtttatgttgactattcgatccgatccatcatgtatgtcacatttgaataacaaaaatccattaatgtgtatgtttgcagtgctcgcttaaagggtaactggaacgtgcctgtgtaatgccacggaacataaattgcg

SEQ ID NO: 68225 - DNA, 3034 bp, Zea Mays
ctcaaacctcaccggcggcggtcattgaccgcaactggttgccgtgtttacttcccccacgcgccacgtttccgcgcatcccgagactccgagagagtggctggcggaacggaacacaaatccaatctcgctacgtgaagttcgcctcgcggcctcgcctaccaccacccgtgcccgtgtcccgccgccggcggcgctggggatggcggggcccaaggcggctgaggacggctcggcggctccgctgctgcctgcgcaggcgggggaacggagctcaggaggcgtgggcggaggggccacgtccgcgcagacgctggggaacgtggttgtctccatcgtgggcaccggtgtgctcggcctcccctacgccttccgcgcggccggctgggtcgcgggctccatcggcgtcgccgccgccggctccgccacgctctactgcatgttgctactctgcaaatacccccgtttatattatttgaagacaccataagatggacaatcaaaggcggagattgcttgattgcacgattgcaccaatacatataattgcacaagatatgtcttcatactggactactggtgtattccctccgaccccccaaaatatctttctagttaatcaatcttaacttttgtcaaatatataaaaaaatgtgttaatttattatgcataaggagcatcattagatgaataatgaaacacatttcagtaataaatttatttggagcttactccaaacctaggatgatactttttccttggtggagagggagtaagaaatttcccacctgttcttgtatcgtacagattattgagttgtggtttcccatgtccaaattttcaagaaacgaactgcaaaggacaaagtgtttctgcttgcattactctctcattcatcttccaataaaaaaactgtgagtccgtctttctgccatttgaagcacgactctcctaaatgtgctaagattctgccaaaagattagtcaatgaatcaaacttgattttgcaattgaccagcttcttgactccattttaaattcaaaatgcactggtttctttccgacttaaagaaaaaatcgtttaaagatagccaaatacaatagttcttagagcaactccaagtgattagataaaaagactagccaaatttactgatttagctactctctaaaatagattttaaagaaaaagtgtaggctaatccaacagactcgataaacctacggactgaatagagagtgaaaagcatgctatccaaaattggagagcgaagatggagaaatagagagtcactaaatttgaagagtcgtttatagagtctattggatacaatttttttttaatattagctaaatttacctttacaaaaccatatagctagtctcttggagttgctcttatattgtctgtttagattgtgcaagattttgattggatttagtgtaaggagtttgttgatgctgcttaacatttgacagcaatattatgattgtaacttatataaatcaactaaggtttggaactgctatgccaggtctttgtcaattatgaatagaataacattaattgctttctttttgggcaaacattttttctataaaaattaatccctctctgtttagtttactcggtgccattttgattttgaaggtggactgcagggataaactcaaagaggaagaaactgaagagtgctgtcatggtcactatacatatggggatttgggtgacaggtgcttcgggactataggccgatgcttgacagagaccctcgtccttgtttcgcagatagcgctctccttcatccgctcactgtcgtccctttctccgttcagtatatttgcagacgtgtgcaatgtccttgccatggcaatcgttatcaaagaggatcttcagctctttgaccaccccttttcaaacagaagcgcttttaatggactgtgggcagtaccattcaccttcggtgttgcagtcttctgtttcgaaggattcagcatgacccttgcactagaagcgtcgatggcagaccggagaaagttccgctcggtgctttcccaagcagttgccgccattatagccgtgtatgtctgttttggagtttgtgggtacttggcctatggcgaggccaccaaagacatcataacacttaatcttccgaacaattggtcgtctgctgcagttaaggttggcctatgcatcgcactggcattcaccttcccagtcatgatgcacccgatccatgagatcgtcgagacaaggttcagatccaacagatgctttcggaagctcagccacaacgatggcggcgcggagtggataggcttgcacgcaagccgcgtcctcgtggtggcggtcctcactgtggtggcgtccttcatccccttctttgggtccttcatctcgttcgtcgggagcaccatgtgcgcgcttctctcctttgtgctgccggctctcttccatctcagcattgtaggctcgtcaatacccttgtggaggcgggtgctggactacggcatccttctctttggtctggctttcgctggatatggtcttgtcactgctctctcctcgcattgaacaatggcccaaacagtcaaaaaagtgcagagatcaggatatcttgtgatgacaggagtcaaatggatgctaggagcaccatatatcagatagcacggctcggattagtgcgtgattgaactgatccgcttcaacccatatagccgcagtcatccatggaagatataccttagcggattggaatggtgatttcgagaaaccaagttgacattgttctatgcatgttacaaaaatctacagatgtcatgaactttaagagccatatcttaatcgcgtatgcatgttacacatctacatgtgtcacgtttcaaaaaaaaagtttatgttgactattcgatccgatccatcatgtatgtcacatttgaataacaaaaatccattaatgtgtatgtttgcagtgctcgcttaaagggtaactggaacgtgcctgtgtaatgccacggaacataaattgcg

SEQ ID NO: 68226 - DNA, 3537 bp, Zea Mays
atataactaggatattttgactaaaaatgagaaaaacgaaaatggtcgaaaaacatctataatgttttgtctatttttacatttgtcaaaaaagaaaaaaagaaatatctatgaatgcaaattcgaataatcgaattgaaacgggacgatatatatccgaccgttttcaccctacttccactaaccagtctcaaacctcaccggcggcggtcattgaccgcaactggttgccgtgtttacttcccccacgcgccacgtttccgcgcatcccgagactccgagagagtggctggcggaacggaacacaaatccaatctcgctacgtgaagttcgcctcgcggcctcgcctaccaccacccgtgcccgtgtcccgccgccggcggcgctggggatggcggggcccaaggcggctgaggacggctcggcggctccgctgctgcctgcgcaggcgggggaacggagctcaggaggcgtgggcggaggggccacgtccgcgcagacgctggggaacgtggttgtctccatcgtgggcaccggtgtgctcggcctcccctacgccttccgcgcggccggctgggtcgcgggctccatcggcgtcgccgccgccggctccgccacgctctactgcatgttgctactcgagtaggcgagtacagtagacgccggtcgcgttctctctcttccccaccattcgttctgctgtttgaccgggcctggcgtgctcttcgccaactttgtgctgcagcctgcagtgttcgctgtgctgttcccttccagatccgatcatccgaatggctcataaaattaaaaatcttctagatttgaagggccgagacagcagtacttgtggggatatatcctgttgtacgatcgtgcaatcaatcaatgtatatcattgattgtaaatcatgtagtgctaatgttttacatataacctcttgttttgtgtctcagtgcaaatacccccgtttatattatttgaagacaccataagatggacaatcaaaggcggagattgcttgattgcacgattgcaccaatacatataattgcacaagatatgtcttcatactggactactggtgtattccctccgaccccccaaaatatctttctagttaatcaatcttaacttttgtcaaatatataaaaaaatgtgttaatttattatgcataaggagcatcattagatgaataatgaaacacatttcagtaataaatttatttggagcttactccaaacctaggatgatactttttccttggtggagagggagtaagaaatttcccacctgttcttgtatcgtacagattattgagttgtggtttcccatgtccaaattttcaagaaacgaactgcaaaggacaaagtgtttctgcttgcattactctctcattcatcttccaataaaaaaactgtgagtccgtctttctgccatttgaagcacgactctcctaaatgtgctaagattctgccaaaagattagtcaatgaatcaaacttgattttgcaattgaccagcttcttgactccattttaaattcaaaatgcactggtttctttccgacttaaagaaaaaatcgtttaaagatagccaaatacaatagttcttagagcaactccaagtgattagataaaaagactagccaaatttactgatttagctactctctaaaatagattttaaagaaaaagtgtaggctaatccaacagactcgataaacctacggactgaatagagagtgaaaagcatgctatccaaaattggagagcgaagatggagaaatagagagtcactaaatttgaagagtcgtttatagagtctattggatacaatttttttttaatattagctaaatttacctttacaaaaccatatagctagtctcttggagttgctcttatattgtctgtttagattgtgcaagattttgattggatttagtgtaaggagtttgttgatgctgcttaacatttgacagcaatattatgattgtaacttatataaatcaactaaggtttggaactgctatgccaggtctttgtcaattatgaatagaataacattaattgctttctttttgggcaaacattttttctataaaaattaatccctctctgtttagtttactcggtgccattttgattttgaaggtggactgcagggataaactcaaagaggaagaaactgaagagtgctgtcatggtcactatacatatggggatttgggtgacaggtgcttcgggactataggccgatgcttgacagagaccctcgtccttgtttcgcagatagcgctctccttcatccgctcactgtcgtccctttctccgttcagtatatttgcagacgtgtgcaatgtccttgccatggcaatcgttatcaaagaggatcttcagctctttgaccaccccttttcaaacagaagcgcttttaatggactgtgggcagtaccattcaccttcggtgttgcagtcttctgtttcgaaggattcagcatgacccttgcactagaagcgtcgatggcagaccggagaaagttccgctcggtgctttcccaagcagttgccgccattatagccgtgtatgtctgttttggagtttgtgggtacttggcctatggcgaggccaccaaagacatcataacacttaatcttccgaacaattggtcgtctgctgcagttaaggttggcctatgcatcgcactggcattcaccttcccagtcatgatgcacccgatccatgagatcgtcgagacaaggttcagatccaacagatgctttcggaagctcagccacaacgatggcggcgcggagtggataggcttgcacgcaagccgcgtcctcgtggtggcggtcctcactgtggtggcgtccttcatccccttctttgggtccttcatctcgttcgtcgggagcaccatgtgcgcgcttctctcctttgtgctgccggctctcttccatctcagcattgtaggctcgtcaatacccttgtggaggcgggtgctggactacggcatccttctctttggtctggctttcgctggatatggtcttgtcactgctctctcctcgcattgaacaatggcccaaacagtcaaaaaagtgcagagatcaggatatcttgtgatgacaggagtcaaatggatgctaggagcaccatatatcagatagcacggctcggattagtgcgtgattgaactgatccgcttcaacccatatagccgcagtcatccatggaagatataccttagcggattggaatggtgatttcgagaaaccaagttgacattgttctatgcatgttacaaaaatctacagatgtcatgaactttaagagccatatcttaatcgcgtatgcatgttacacatctacatgtgtcacgtttcaaaaaaaaagtttatgttgactattcgatccgatccatcatgtatgtcacatttgaataacaaaaatccattaatgtgtatgtttgcagtgctcgcttaaagggtaactggaacgtgcctgtgtaatgccacggaacataaattgcg

SEQ ID NO: 68227 - DNA, 1466 bp, Zea Mays
cgcctatatgagcccacccacgtagctgcgtctgcgtgcgagctcctcctctgtacccctacctccaccccctcctcgtgccgtccacgcagcaccggcgcgccgcgctcgccctcgccctggcagccggcgtcccgctggtcctcctcgcgcccggccaaagacggaatgcgaaaaaatacgccttgatgaggaagaaacacgtccctgtcagggcgcagccttcttctccatcctcgtgtgcggggcgctgggctgctgcctgcccgtgctggggcggcgcgtgccggcgctgcgccctgacagggacgtgttcttcctcatcaaggcgttcgcggcgggggtcatcctgggctggccacggggttcatccacatcctccccgacgcgttcgagaagctcacgtccgactgcctctccggcgggccgtggcaggacttccccttcgcggggctcggcgccatggtgggcgccatcggcacgctcgtcgtcgacaccgtcgccacgggctacttcacgcgcgtccacttcaaggacagcgccgccgccgccgtgggcgccgccgccgtcggcgacgaggagcaacagcagcagcaggcggcgtcggcgccgcacgtcgacgacggagcagacggcgacggccacggccacggcgggcacgcgcacatgcacacgcacgcgacgcacgggcactcgcacggcgcctcggtcttggcggctgcatcgttcaggtaatcatcaagaaccccatggtgcagagccggggcaagctgcagctcgccatcaacgccttcatgctcttctgcgcgggccgcatggccacgctggccaagtggacctagtaactagccataatgatgaggatgattctagtgatgagaaagatataaattgggccttaatagagatcaaattgctatggtggatgaattgataaaggttgtcaataaaaaaggagaacatatatgccgtcgtatgtgtgtctgtatattatgaactgtatgtttgaactgtattttaaccagcaactattcatcatcacccgtagtgcacagatgccgccggcgccgaaatgcctcttgctgagctgccgaattcatcaccacagacagtaccactccacttccatctatcaaagggtgtttgggactgctctagaatagatttatttttttaaaaaaattaattgaaacaatggacaaaatgatttatctaaatgtcttgtatgttcacatcacaaccctggagcatttagcattagcctccaattcctcaaccacgttgcacaaatcgacctccttccagacacttgtattgaagatcagcttccagcagagcgcacaccagaccaacttttcccctgaaaaatgaaaaatgtaattcgtttcgcgttttccacgagaccggaagaattgctgcacaaatcacattctgtaattcatatttcttataggactcagggcaga

SEQ ID NO: 68228 - DNA, 1973 bp, Zea Mays
cccaaggaaacctcgtacttggcgctgtgccctctccttcctgtcgtcatcgtgtcacggtcggtcgtttgttacaaaaatctcccccaatccaagtaacgcgattaaatccctaatgaatctacgagctgaaatcacgaggccctgccgcctccgccgcctatatgagaccacctacgtagctggctgcgtctgcgcgcgagctcctcccctgtacccctacctctccaccccctcctcgtgccgtccacgcaccaccggcgcgccgcgctgccatggccatgaggccacgcgccgcgctcgccctctccctggcagccggcgtcccgctggtcctcctcctcctcctcctcgcgcccggcgcgcgcgccgacgacggcagcggcgggtgcggggcggcgggcggcggcgaggcggcgccgggcgaccgcgcgcgggccagggcgctgaagatcgcggccttcttctccatcctcgtgtgcggggcgctgggctgctgcctgcccgtgctggggcggcgcgtgccggcgctgcgccccgacagggacgtgttcttcctcatcaaggcgttcgcggcgggggtcatcctggccacggggttcatccacatcctccccgacgcgttcgagaagctcacgtccgattgcctctccggcgggccgtggcaggacttccccttcgcggggctcggcgccatggtcggcgccatcggcacgctcgtcgtcgacaccgtcgccacgggctacttcacgcgcgtccacttcaaggacagcgccgccgccgccgtgggcgccgccgccgtcggcgacgaggagaagcagcagcagcaggcggcgtcggcgccgcacgtcgacgacggagcagacggcgacggccacggccacggcgggcacgtgcacatgcacacgcacgcgacgcacgggcactcgcacggcgcctcggcgctcgtggccgccgtcggcggcgccgagggcgacaaggagcacgcgctgcgccaccgtgtcatcgctcaggttcttgagcttgggattgtggtgcactcggtgatcatcggcatctccctcggcgcgtctcaagaccccagcaccatcaagcctcttgtggtcgccctcagcttccaccaaatgttcgagggcatgggtctaggcggctgcatcgttcaggtaatcatcatacagtccattgtcctaagatatacagtccattaatcggtctgctctactacgtaccttgatttgtctaagatgaccgcactaataagctcctgttccaaacaaattaaattagttaggaggtttaaaaacgaacagctaatgaactagctagtaatagtaattggaggtctaaaactagcagtctaaagcgaagtatgatttgatttggtatccttaacctgacgaccgtcagtcaggctgcttttgtgccgctacttttttttctgttagattagaagaaagtaccaaagcactgcacttcgggtggttcggagacatgcgctgcacaaaagccaagttcaagctgcggtcgatcgtgacgatggtgctcttcttctgcctgactacgccggtgggcatcgtggtgggcgtcgggatctcgtcggtgtacgacgaggacagccccacggcgctggtcgtggagggcgtgctcaactcggtggcggcggggatcctggtgtacatggcgctggtggacctgctcgccgaggacttcatgaaccccagggtacagagccggggcaagctgcagctcggcatcaacgcctccatgctcgtcggcgccggcctcatgtccatgctggccaagtgggcctagtttactagccacttttttgctctgtgccctctcgattccagtttttttagttgagttgctgtaaaaatactactgttatggagaaacgaacgaatacaacaactcttttttctgaaacccatcgcgacatggatggttgcttgcggatgcggagatttttt

SEQ ID NO: 68229 - DNA, 5563 bp, Zea Mays
aataaacctagatatattaattttcctctgctcccttcacctgaccccgttgacgacgaagatgttgtcgtgcagatatgctgcacctgagcagaggagcaatgcctcccatgtgctcaacccaaaaccctagaaacctcaggctgagctacttgtgccactcacaagcggtgcacccagctcgacaacggcatcaacccgacccggagcagaaatacgaagaaactagagtgggcgagatgggagggagacaagggctttttcgcacctcgtgcgtacctagagctcgatgagcagagccccacgacggcggccatggatggtggcgaggcggagtccaatgcagacgcagggtcgagcaccagtaacggcgcgaggttcacagttggaaggcggggcctggagcgtgtagaagccggcgaaggaagagaagcagacggtggacctaacctcgtccttgctcaccttgggcccttacgagccccaccgatccagatctgtgcgacgtattcatggtcggcggggtagggctagttggggcgggagcgtgcaagatcatcgcgccgggggggaagcgggcgtggcgggcacggtgtagatggtagtgcgcgtcgcgaggtggagggcatgtaggagaagaggcgcgtcacgatgggaagaggggaagaggcgcggaaccaaaccagcgtgcggcggcgcccggaggcggcgggtgcacccgaggggaaggagagggagaggctcgaccttgaggagggcagcggggagatgacggaggaggtggcgaaattgaggcgggtagggcgtcggggaaggggctcgcggcggagggtggaggcagacggcgagtgtagaaatttgagtggggaggtggatggtggaggggacagaggcgagtgtgggggatgccggcgcgaggatggagagcgcgagcgagaaggagaagcggggaggggagatcgcggtggggaggggaggggagatcgtggcggggaggaggggggcgggacggcggggtggatctcgtgggcgggcgagatatccgctgcgggacgacgcggcggcgcgatgtgcgggagcgggggcgctgtggaggagagggtggggatccgctgcgcgaacggcagaaccgtgcgccaaattcagtgtggacgcctacggtaaggtcttaagagtagtaaagaaataaattattacataaactaacctatagtctaggcataaaattaaagtgtacagactgtggatgaacataatttatttgaatagagaatatccctatgaacaatttgcaatttgaatcactcaattttgagttcatatgaaaaagatatgaaataaacaagtttcgaagtttgaaatacaaaattaggtccaaatatgtgattatttaaaaggtcagggatttgtttataagatgttaggggcctgctcgcgaatttacaggactgtgggttgattctcgggaaaccaagggtttctttaacaaaaaacacacacgaaggggtatggggtattctcagccattcgatcgcacacggacggttgagatcagatctgagcgcgagcgcgtgcggacgcgcggacgagcactgataggcgggccaaggttgtcagcggcctaggggcgatgcggcctcaccggtcgtgcccagctgcagggcgcgggtgagggagcggacccgagcggtcggatctaaaacagacgggtaggattaggtctgctctaattgaatcttggcctcttgatctcaaacggatgcctgagatcccgcggcaagcctaagtagggtctccttggctgcgagcggctgtgccgcccgactctatggtggagctccgccggaggcaagggcacgggcatgccggggggtcttggggcgctggaaagggctcaggcatattcggggtggcacggcggactcgatcgtgggcacgacaccggcgcagaggcatcggagggtatcggtttgcagtagagaggcccggtggtggctctagcctacttcgatgagcgattgcgtgagcaacaaggctgcgaaagggaaattaggggcgtggggaggtgggttaccttgagagacagctttggagcgcttgagcgatggtgagaacacagcgagggcccggatcaacggcgggggcgacacggctgcacggagagaatccggtgagcgtgagcagaggggaatagagggggtaggggcaaaccaagggatgtcttgagttgctggcgaggaggcggagcttaccggagcaatgagcatgacggaagctcgacgacggccgtggaatgggcccgaggttacggtgaacggcgatggtgctccacgggcgcgcgctgtgcgaggcagaggtgcgaggggtctgcagaagggcgctactgggcgaggggagtgagtgagtggggtgcgggctcataaaggaggtcgggtgcatgcggaggtggccgagaaacgcgcgacgtgggcgcgtccacggtggggtgtgagggcgggtggggtccgtgggccagcgagagagaacttgcgaacgagcggttagcgctaacagaaggggtccaccgggcaatgagagagaacgggcgcgtgcgcgaggggatcggcgccgataggctggccccatcgggcagcgggagagagagtgagtgagagggcgctgataggcggggtccgcctgctagggagggctaacgcgcgtgcgcgggcgtgcgcaagggctaggccgactgggatgttttgggccgaaatgagtttttctatttcgagggaatttctaatgccttttctattttattttctctagggttttcaattcaaattcaaaccaagtttcaaattcaaaccaaatcaaacatgtgcatcaattcaaagaatattttggacttagcatgatgcaacaatccatgacttatattattttgacaaaataaatacttaatctctctcctaattaacttgattctactaaaaagaaagagagagagagacaaaaaggtaacacctgaatttggtagatatttaggaagaaattttatacccccaaattcagggtgttacagagccttacccttaacaaaattagagagtctattcttaggggcattaagtttgatgttgctttggctcccttgttggaagccaatgccatctttaatgccagggcctctcccattatagagcatgctacgagcaaatttaaaaagtttattctcaagctcatgatcgacaattttagcatttaatttagctatgtgatcattttgttctttaatcatagtaaggtgatcattcatagcatcaatattaacatctctacatctagtgcaaatggtgacatgttcaacagtagctgtagaaacattgcaagcattcaattcttctatcttagcatttaaactagcattttcagttctaagacaggaaattgaatcattgcaaatatcaagctctttagataaattttcacaattttctacctctagagcataagcaattttcaacttaacattttttttattttccttaacgagcaagtcctcttggcattccaagagatcatccttctcgttaatggattctatcaattcatttatctttttctttcggtccttggtgaggtttgcaaaaagaaaagttaaatcatcttcattatcactagagctaccctgataatcggaagtagtatatttgggggtatctctagaatgtaccttcttccttttgccgtccttagccatgaggcatttgtggccgatgttggggaagagaaggcccatgttgatggcgatgttggtggcgtcctcatcggaggaggagtcggtggagctctcgtcggagtcccattctcgcacacatgcgcctcgccacccttattcttgtagtatctcttcttctccatcttcttcttccctttcttgtcgtcgtccttgtcactgtcacttgtatatggacatttagcaataaagtggtcggacttaccacacctatagcaaaccctcttggatcggggtttgtagtccttccccttcctttgcttgaggatttgctagaagcttgtggcagaacctccaagttattgggcccacatgcacctgttcttgtcccaaagacctcagacggctatgcatgtgcaccagataacttaacaggatctgtctgattgccccaaggacatcggataaaccacttacaaccagaaccgcgggattaagtaacacatatcacacacaccaatattgttgcagcggaaatcttactaccaaattttacaggttacaaaaaatttacattagtttatcggagtgattacaaaagtttaagtttgaaatatatgctagctcaagtgaccatcctcaataagaagtatagaagggttacttagacttataagaaggccgagcccaccggcacttaacaccatcaacaacagcacaaaactaaacctgaaaaacaacagggaataaaaccctgagtatggaattactcagcaagacttacccgactaaagaaaagactctcaaggatatgctggatttgggaatcaaggagaggctttagcaagaatcaacttagatacttttgcagaaatagcttactaaagtgagtccttactttcaatattttaacgccagattaaatattaatagactctatttgcatctggtctaatttcaccatctcatcaatacaacatcatttttattcatgaggttcacatcttgacttaggttgcaggtcagtgaccaagtcttcataaccgcgaaggtacggcgatccgaatcgattatactcagctgaggatctccaatcacatgacatatgtagcacttaacccttgcatatgtcaactcgccaccggggttcttaagaccagatcaggttcacgcgaaccgagagcacagatacaccaccgtccagcctcttgccacggagggtacacgctactctcgccaccgctccacgcccatttccgtgttatcttattctggccttagtctacccgaggcaaagcttacccatgacgaggcatgtgaccagttaaagggtcctcggtcagcaggccaacatacgcatccaatccttaatcaacctggggtagaacatcacctgttcctagcccaagtcccgatttaagtacttccatcctttaggatagtttgtgatccttaggatgaaaaagagcatcacagggaactttgcagtaagatcccaccatgctcccaatgaaaatattcttgcaggtaaaagccatctttcctcaggataacccctgagcaaggccttaacgcaaaagacaacctctatccacaagatctgagcagggctaagcatttttgtaaatcatattttgatacttcaccagaagtatctaataaggtatggatatcaaggaaggcaatgcatcaaagggtttcaagcaactcctataaacctaatgcacatttcactagacttaaagtgtgcgaaaattatttaaaaacacaaggaaggggttgcatgcaccggggcttgcctgggtaacactaggttagtgttgttagacgatgtccacttgacgatcc

SEQ ID NO: 68230 - DNA, 1737 bp, Zea Mays
cagtcagttatgtacagagtattgagtgaagttattgtgacataaatggtcgacacaaatagcaaaagaagagttaaaccataaccaaactgaaataccaaaagagagaatgaaagcaatgaaaatttatggtgatttcaagtagccccttctatgtagaaagctcaaagactaaacccttaataatactctttttttgcaaagagcactaagatgctagctgcacaagccatagaaatttggcaaactaacttgaactgggacctgtagtcaagaattgtacagaaactggatggccacactgatattgtcactatagtttcatgccaccccaagcaaaacatgatcacattatgcgcttgacaacaataagacaatgaaagtttgggtgcaaatggaagaaaatggatgagttgtctggttacactcttaactaccaaaagaagatgcaagtacaaaatatgttgcaagcactccaacacaaagatgagagaataaatatgttacaaacacggttaatcgactatacaatgttgctctgcaattaagttaatgtcatccattttgagcacttacaaatcatttaataatcaactaaattccatcaaccttattctttgttcatatttatagaaagatacaacacatgaagcctgccaagaattaggatattaagttaagacttaagaacacacagaggtacgtatttactatttgcaggctacaattgtagaataggtttgatagattcatcaatccacagctccacattccaattcattttatcaattctagaaagaactcttctcaaggattcatatatttttgtaatactacaaagcaaacctaatttctctattcgttaccaatccatatttacagcaagaaacaactcatacattcagcctatccgagtcttttagataaactctaggtcagctaaaacaattagtatatttgtgtatgcacatttaaatatgacgtctgacatgtggcaacaaataaaaaggatggtttcatagaatgtaaaagaaccactccaaagatattcttttagataaaaccacctcttgtaaaggaaaacaagctttagcttaaaatagccatttaactcatcgatccatggaattaatatcatacctttgcatgatgtaaatgaatggtttgaatatattttaaggttcagcgtcattttttaaaattaatacctctgcatgatgttagtcatcaaacaataagaaatgtacatttgatacttggtaaaatctaaaatgggagctacacataccagagccaaaaaaagtatgcttcttccctttctccttaggtgcataagtaccatattcttttgcaatacagttacctggcatgtatgttgactttcagttcagtttgttgtctttcaattcagtttgatgaggctaataactgaaaaaatagatgtctttcagttcagtttgtatattatgatgtccactcaaaaccttcaaacatttccctatgtgacagtcaattaatttcacaagtcttgttccatctggactgaaagcaatagcaatagttgacttaggaggtggcaaaagagagaaaaacatggcaagccagcgatgcaaggactatgattctgccctgtacacagaatattggagatgtgccttcaacactctacactcgatcgtctccagatcaccaactcactgtagaaacaagatccacctcttgacatctgaaagaaag

SEQ ID NO: 68231 - DNA, 573 bp, Zea Mays
aggacacttaccttcaccaggttgttgctcaggaagatcttcgacaacacactcaggaaccacgggctgctcgttgtctaaataaagcgatcatacattcaatacatttggaaaaagacaaatgaacatcacaccaaacatgcaatcaagtgaatacaagcttgacaggacattagtacatttagggattagtgatcctctgaacgttatggattacataacttagttctactaattttagtgagacacaaaattataccagggatcaattcacacatggcatattattaatctcacaaaactatacatctaagtaccattagggtttccttttttatttatcttattaaacaaatagtatagtacccatgcattgcgacggcaaattattatcgactctagtctttattcgacagaatgttagtgtataacgattacatgaaagtgacgacatatatatcatcgactccaatctgtcacaatttctttgttgacaaccattgcatttcgaggccccttgcctgctgagttacccagaggaaatgcaatgatcaatccgttggcatagttaat

SEQ ID NO: 68232 - DNA, 2780 bp, Zea Mays
ttttgaggacctacggaagaggaaggcccccaacaagcggaaaggtacttttattacatcaagatgtccaagacatccacaaagcctataacatagtcatttaacataatcaaagtatggaatatgaaacgtagaagataaggccttcacaggtagctgactgggggtttgccactaagataactagaacttgtcgtagtcctaaaactcctcaaagtcctccatgttgccagcatctcctcttgagcactaaatacagtggggacaacctggggccgggtggtttttaaagcaagggtgagtacacatcaacgtacttagcaaatgtcccatttggctaaagtggactagctatatgtggagtttaagtttaagtagtagcttttagttgatcaagtatttattactattaatagagccaagttttagtaataaacccaattattacccaaatgtactccctccaagaggaaataccagagatcataattataaccatcatcattaaacatcatcataaaagtatccaaagttcttctaatcaaagaggatcccaaggcctctcttaaccatgagctcgactgatataccagtttctaacactccgcagaggttgcacactttacccacgagtcgtgatccctttttgcctcgggtcaatcaaaccctcaaacactaccaaggtgagtcggcaaggtttcactacgtagcctttacaaagactcccctggtgcatagctgctcgttaggtttcgctagtcgtacaaactcagtacacctccccaaggtgggtgactaacaaaaccaaatcgaatgaacctcttgtaacaccctgggatccacaaacaccccgaaatgctactaaactacacaactcacattcatatataaaatttcgacaacatctcctttgaaaatttgcataaacgtggaatcaacatagtataaacatatatcatgataagaaaacatactagacattaataatctgctagcaatgggaagataaccataacgacataaactgaattaactagtgtgcacgactagttaaaaacaaacatccttgacaagaagtttctaattaaatcatggttgtgtctgggtagcgttattatgagagtcaaggtggacgtgctgctacttccctcattaccaacatgaatcaagtacctgcattgagtaatgcaagagtgagatgaaaacatctcaacaagtaaattgttttgacgagatatttaaaccaaaaaattgaattaatcaacattttaaagggatcacaattgagatcagaaacacttgtagatatagaactaaatagtaccaaaataaccaatgccatctcatttcctcgaacaaccacaataggttgtataacacttccctatgtcaacaatacctgcaaatatcacttcaatgtatgcataggaatgcaatgtgtaagtccactgccttcatacctcttagagtaaaaccacaccatctgcaaatatcacttcaatgaatgcatatgaattctatgcatatgtcctctgccttcatacctctaagggtatgaagccgcattgtacccctcctcgggcaacgtacgatgctaagttgtaccgatacggtcggaccaaaggtcacgacaaaacttcagatgcaagtgaagcatgcaatgtatatggcatgctgcatttatcaatatacttcacttccttcatatacaatagaaacctcaaacaatacttcgtttaccttcagatacaatacaaacatcaaataatacttcgttcaccttcaggggtgtgaattaatctcttgggtcatactcgaatcatcatcatcaatatatgattaagaatcaatataatacaatcaagtaaagcatcaccatagagttcaattataaaataattcgatgattctgaatattagagtgtaggcgataaaaaacaacaagtcaaaacagtagcaaccaccgctacattcacttgccttcatcgaagaagaaaatatactaggcatgatccggagtgtagccacctgctagcaagcattaaacttagtacaaatatttcacaaacatttgccaacaatcaacaaattgctcctacacttgaaaccaagacccagtggaaagaatcccaccctgaaccacatgccaaacagcagtagcgctgtttgttaattttgcatctctaaaattataacagtggtgatatcaaacaaatactctaggagtttctacacaaaatactctacaacttcggtattcaatggataattaaattttgacatctataagttctaaaacatctgacaagataactgactgaatctgtttcagacagcagcatagttaatttcaaaatttgatatctcccaaactactcaaccaaaaattatgaaattctgctgtcagtaagaacttttatctctctacaaaaatttccatagttgaaagagccaattcggccatttactagatgaaacttaccagtgaacagacccgatcatttttgtcaggcaaacaggaacagccacagtaaaacaaacataacttgagtttcataattcatatgaaagcgatctttaacaatatgaaaagcttatgaaattgtctaaaacttcttttacaatcctaaagtttaattctgttgataaaattgcctaaatcttaagataacagattatgcaaagaattatgagactgaaaaactgctataaacaaatagcaataactttctgatctgatgtccgattgaggtgttcttcacggtcatgaaaagatctat

SEQ ID NO: 68233 - DNA, 5713 bp, Zea Mays
atcatcctgtggattggcccatgcttggggtcgacttgggtggttctccgcatcacgcgattaattaacgtaccgtttcaatagttgactcgaatccgcgagatcggtagtgattttccgatccaggcaattggtcgagcgcttggggaatattgcgctgctagcttcgtcttcatccgattcttggcattcttgatgacgcgcggaacggcgacgatcttcgattgaagtcttcaaccgagtacttgataagcaatacacaggggcctcacttatttttgtctaatatccgggattcggtgttcgacgaaagcgagcagagaagaacgaggttcgacgagcttgacgacgatacgggagggtgctgtatatagagttacaggtctggcgagctgacgcggtcaagataactgtggctaacgagcttgcgatagaagcgatgatagtgcgggagctcgacacgctgtggagagcagataaaattcgtgcgctcggcaaacaaggaaagaacgaggtgagcgtgcgcagagagctcgacaacccgcagcaggggctagcaaggcgtgagctgcgcgcaggcacgcgacgaccacggcaagggagcagagaaaattgtgcggatgactggaacagagacgacgaacacacgcgcacaaaaagcggagcgcgcataggatagggaactgcggcgatgaagcgccatagctggagcaagagcgggacgcgaactaggcgacggcagcgcgcaaggacgatcttggctaggggaaaaactccgcgggcagggatccgagctgaaaggagccgggggagatgggcgcgcagaacgccgagcagagactggagcagggaccgagctcgacacagggagtttcacggcacggtggccatgtctgggaccaggggcgcgacgatgggaactgggggaaaaaatggagctctagccggacgtcaggaagacgagcgagcagcgcaccgaggaggaagtccagggcgtggcgattttggctgccgcgtcaactgttgccctctgttcccaccggaagaaacgccgaatggtggcgagcaggcacggctgggttggaaggtgcacagcgcgcaggtaaaaaggaaccgtgggcggcgagattttatcccctggcgactggagatcttttctccatgagcggcggccggatgaagatgatgacgcgcaggaaatatcccagggagataaacgatgcagcaaggaggttgaagataagagatgtacgcatgaaaaaatcaacgtcagggagcttcaacggggcttggacaaaaatctagtgaacagtacacttcggatagaataagtgacgtgggaagagataaggctaggagatattttccattttgttcttttcctcttgctttttaaagaataccggaattaggattagagtttggatgagatataaacagaccaggccaaaacactatcaggatacagtacttgagacattattaatttagttgaacccagataaatttatctattttccgaacccatttgatttctctacctagaatagcacactaaagaataatccctaattattaatcttgcgcacggtcttttggtaacgcaagcaatccggagtattctttcggacccagtattatcggctatacatcaaacgctaatctctttgtttcggataatatcaggttcagataagatgcaaacagaatgaacccaatcgagatcgagactgatattttactatatttgacacgacttaaaattagatatcttcatctatcactcgaacacctgatcgctctgtcacagatatagtggagaatcaaatctcaattatacaccctcggacgtgacgtattctcggttggcgagcagtgactaaattattttacccctaaaattttagtcatcgacttctcataaattttgtactaacacttttgtcgccgagttcaatttaatttgtccgggataaaaatcaaccaagtgggttgggctttcgaattcgtactcgcgcgagcgatgaattttaaataatcaccagatgcaccgattttcggaatgacaatgttcccaacaacacgaaaatttaggaagagcccggataaataaagatgatgtcgaactctcgacagacgaagtagatgcgatattaaaatcgcgatagacgaagatgattaaaatttagcatctgttttatccactgattacatgcttaaatctgtactcattgtcgagcggaatataaacacctggggtgttacagccctcccccttaaaagaatctcgtcccgagattcagaacgaaagacttctaagagtagagaagcatgtaacccatatccatatcagcaataatcgtgagacactccaaataaaggcgagtatctcaggatgttgtttctctagtggacatatcatgtatcgctttaggctaatttagaaatgtccaccaatagaaacgatgtttgccagaggaacacataaggttccatgtgtgcagcttgttttctttgatgacactgtactatctaagtctgttgagcgagcggtgaatacgcgattttgcaaacagaaccagatgcaacctcttgggtaaaacacacagaaagaggtttatcaacaagtggttatggtaagttcataacacacgagacgggtgtgaatgtcgaataacatcacaattaactcgtgttagccagagaatccaagtccatgaaaggtgatatagattcgagaaaatcaccagcggagggatctgtagatgccgactttgcaaccaatttattttatccggtactaatcatggcttcacttgatcacacatgttggaaaagcacacgtgaggcaatcgaggcatgtctagagtgatgactaggtggttacaggccgacttaatttcaattcttgtaagtactttctttacggtgaggtgaaccaaagtgagtttagccaactcgacaaaacgatctctaaactcaaactttgttcatagggcagttacaagttagtaaaaccaacttgttgaactacttttgacactaggaaattttggtcttgttacccattggcaatccaatggtcgagagttcacctttgctaataagagattatgcacttgggtagaaatccatttggtcagattgttcatccgtttcttccatgcaagatgaacagacttggtttggaaatatatgggttaaataagagagcggatgaacacactcttgcatctcagtggcaggaaaagccaatctccattttgagagctaatcagttgttgtccaacactaaaaagctccaaggcttcacctttacacagaggatgtaaaggaagcttgtatgagtagtcattaccaaaatcaaaagaaataagaccacacatgaaagtggtatgcccttttaatccaacagagatgatagatgttgcttgatcacttcgacaagcaacatagaaattattttaagggaggagtccacggaagatcatacgtaagtgtagtttcacaatggatcatgaccagcgacctcgataccagcaggcgccaagcagcataaccttgcgtgtacattcacaaggggctctcagtttcgctgcggcaccataagtcattacccatgacaccaccaccgaactagcaccaataatgaatctcacgtggtaaaactagattgtgccaagataacacattgatatagtctcataatggatacaactactaaccgtgataccagcgcgtgccgagcagcacgaccatgtgtgtacattcacaggaggccctcggtttcgtcacggcaccatcggttttagtcataacaccattactagacgtaaccaataagaaatctcatgccacactaataggttgagcaagggtgacaatatacaaagagactctacctgtcaaaacggttacaagtagagagccaaatagatcatggcccaatgaaatgaacagggcatgaccataaccaaaacttgattgatgaatgagtacgatgggagactgttaattcagtcccaagcatacttctatgcccatcgcagagatcacaaggtcaaggattagtatctgatcaaatacggaggggaaacaatcataagatcaagttggtatgcctttgatagatatgaggaaaccaaaggaatcaaattaaagaagatgatcaggcaggactttcctaggttgggttgataaagcgacaagataatccacaaggagaggccgaatacaatagagacctcaacctgcatcaactgagcaagggcaggatctaggatggaaacacgaccactaagggagatacaagttaattaccaagaacacggactcaagatccttatttgaagtccaagtatatcttaggtccaataaagtgattatctaagcatatatttgcatgggcttggtcatggagtgataacgaaaatttcaaactttgggtcatggttcactaaataagaacatggcctagttttgggtttaggcaatcaagttaccaaccttctatcggtacatcaagcacaagagcaaacacatataacacctaaatagattacctaaagaacggaggacagctattacatcgaagtttataattcaacattacaccagattatctacaatcactggtttctggaataaggatgagagaagcattttggatgtataggtgacaaacatgatgcaacaatcatgatgcatgctcgtcctacacgtcctcactgattttgccaacataacgtggcaatagcgttctatatcggtggcatacgttctctctcggtattttgctagtcgtcagctacacatacgttttcgagttagtgtacctgcagaaaattttcattacagcccaattcccaatgatgcaagtcacacatgacagtttatcacagtttatactccatatattgttatatggaggccagctcatcattaagcgtcgagccacgcataggcgtcgttgccacactttaaccatagggcaactcattatggtaactcaccttcttacgtgagcgtaggtgcgtcgttgcaagtacattacacttctcagtattcccatgtctatatacccatacacatccatggtgtactgaattcccagaaaagtaattactccacatcacagctttcatatatacatatgtagaatacgtatatagtcaagcgccacaattaagcacttccctagaccgatggttgttcggtcatgctctcacatctcaccttacctgaacgtcgatccattcagaactgaatggcctcaaaaataacaatacacatgtatgcaatacccccggtttgtgggttagtggttttcaaataagccacctgatagtccttaatttagggcttaatagaggatgtcgctagcattatagtttttcaaatctgtttttgaaagccaaacaatgtgtttagttgaaaataggtttttcaaaaccaaaacttttggtttgaaaatacgtatgtgaccgtatatacttaatcctgctccgataccagctgtggcagaacctccaagttattgggcccacatgcacctgtccttgtcccaaagacctcagacggctatgcatgtgcaccagataacttaacaggatctgtccgattgccccaaggacatcggataaaccacttacaaccagaaccgcgggattaagtaacacatatcacacacaccaatattgttgcagcggaaatc

SEQ ID NO: 68234 - DNA, 7203 bp, Zea Mays
taaatattaatagactctatttgcatctggtctaatttcaccatctcatcaatacaacatcatttttattcatgaggttcacatcttgacttaggttgcaggtcagtgaccaagtcttcataaccgcgaaggtacggcgatccgaatcgattatactcagctgaggatctccaatcacacgacatatgtagcacttaacccttgcatatgtcaactcgccaccggggttcttaagaccagatcaggttcacgcgaaccgagagcacagatacaccaccgtccagcctcttgccacggagggtacacgctactctcgccactgctccacgcccattccgtgttatcttattctggccttagtctacccgaggcaaagcttacccatgacgaggcatgtgaccagttaaagggtcctcggtcagcaggccaacatacgcatccaatccttaatcaacctgggtagaacatcacctgttcctagcccaagtcccgatttaagtacttccatccttaggattgtttgtgatccttaggatgaaaagagcatcacagggaactttgcagtaagatcccaccatgctcccaatgaaaatattcttgcaggtagaagccatctttcctcaggataacccctgagcaaggccttaacgcaaaagacaacctctatccacaagatctgagcagggctaagcatttttgtaaatcatattttgatacttcaccagaagtatctaataaggtatggatatcaaggaaggcaatgcatcaaagggtttcaagcaactcctataaacctaatgcacatttcactagacttaaagtgtgcgaaaattatttaaaaacacaaggaaggggttgcatgcaccggggcttacctgggtaacactaggttagtgttgttagacgatgtccacttgacgatcctcttcaggtttgtccattagcatcatcctgtggattggcccatgcttggggtcgacttgggtggttctccgcatcacgcgattaattaacgtacctgaatgaaatgcattatgcacatgaatgcatataaacgagaatattacaaacctaaatagtgctacgcgatagcgaatttaacaactagcggtgaggcgttgtacaattttgtacgaaaacactagttattaatatacgactacgcgcaataattacgcttctctaaattaaacgaacctaacccaaacatcacaaacaacaaattatacacattaatcacgattagcctaaacacacttatcagttaattaattaaattctgaactaatctcttgctttataaattacactacatcattataagtgattaaaatattttatcaacacacatgcctactaaaattctactcggtacactaatttagctaattgaccggaatagcgaaataactcgccataactgaatctagcttgataattgcaaagatcatgaagtcacgagagttccgtgactcacacaaataatcgagcacctaatgggcatcgcactagcacattaatttatttaacgatcgaactattctgaataatacattaatttaccgtttcaatagttgactcgaatccgcgagatcggtagtgattttccgatccaggcaattggtcgagcgcttggggaatattgcgctgctagcttcgtcttcatccgattcttggcattcttgatgacgcgcggaacggcgacgatcttcgattgaagtcttcaaccgagtacttgataagcaatacacaggggcctcacttatttttgtctaatatccgggattcggtgttcgacgaaagcgagcagagaagaacgaggttcgacgagcttgacgacgatacgggagggtgctgtatatagagttacaggtctggcgagctgacgcggtcaagataactgtggctaacgagcttgcgatagaagcgatgatagtgcgggagctcgacacgctgtggagagcagataaaattcgtgcgctcggcaaacaaggaaagaacgaggtgagcgtgcgcagagagctcgacaacccgcagcaggggctagcaaggcgtgagctgcgcgcaggcacgcgacgaccacggcaagggagcagagaaaattgtgcggatgactggaacagagacgacgaacacacgcgcacaaaaagcggagcgcgcataggatagggaactgcggcgatgaagcgccatagctggagcaagagcgggacgcgaactaggcgacggcagcgcgcaaggacgatcttggctaggggaaaaactccgcgggcagggatccgagctgaaaggagccgggggagatgggcgcgcagaacgccgagcagagactggagcagggaccgagctcgacacagggagtttcacggcacggtggccatgtctgggaccaggggcgcgacgatgggaactgggggaaaaaatggagctctagccggacgtcaggaagacgagcgagcagcgcaccgaggaggaagtccagggcgtggcgattttggctgccgcgtcaactgttgccctctgttcccaccggaagaaacgccgaatggtggcgagcaggcacggctgggttggaaggtgcacagcgcgcaggtaaaaaggaaccgtgggcggcgagattttatcccctggcgactggagatcttttctccatgagcggcggccggatgaagatgatgacgcgcaggaaatatcccagggagataaacgatgcagcaaggaggttgaagataagagatgtacgcatgaaaaaatcaacgtcagggagcttcaacggggcttggacaaaaatctagtgaacagtacacttcggatagaataagtgacgtgggaagagataaggctaggagatattttccattttgttcttttcctcttgctttttaaagaataccggaattaggattagagtttggatgagatataaacagaccaggccaaaacactatcaggatacagtacttgagacattattaatttagttgaacccagataaatttatctattttccgaacccatttgatttctctacctagaatagcacactaaagaataatccctaattattaatcttgcgcacggtcttttggtaacgcaagcaatccggagtattctttcggacccagtattatcggctatacatcaaacgctaatctctttgtttcggataatatcaggttcagataagatgcaaacagaatgaacccaatcgagatcgagactgatattttactatatttgacacgacttaaaattagatatcttcatctatcactcgaacacctgatcgctctgtcacagatatagtggagaatcaaatctcaattatacaccctcggacgtgacgtattctcggttggcgagcagtgactaaattattttacccctaaaattttagtcatcgacttctcataaattttgtactaacacttttgtcgccgagttcaatttaatttgtccgggataaaaatcaaccaagtgggttgggctttcgaattcgtactcgcgcgagcgatgaattttaaataatcaccagatgcaccgattttcggaatgacaatgttcccaacaacacgaaaatttaggaagagcccggataaataaagatgatgtcgaactctcgacagacgaagtagatgcgatattaaaatcgcgatagacgaagatgattaaaatttagcatctgttttatccactgattacatgcttaaatctgtactcattgtcgagcggaatataaacacctggggtgttacagccctcccccttaaaagaatctcgtcccgagattcagaacgaaagacttctaagagtagagaagcatgtaacccatatccatatcagcaataatcgtgagacactccaaataaaggcgagtatctcaggatgttgtttctctagtggacatatcatgtatcgctttaggctaatttagaaatgtccaccaatagaaacgatgtttgccagaggaacacataaggttccatgtgtgcagcttgttttctttgatgacactgtactatctaagtctgttgagcgagcggtgaatacgcgattttgcaaacagaaccagatgcaacctcttgggtaaaacacacagaaagaggtttatcaacaagtggttatggtaagttcataacacacgagacgggtgtgaatgtcgaataacatcacaattaactcgtgttagccagagaatccaagtccatgaaaggtgatatagattcgagaaaatcaccagcggagggatctgtagatgccgactttgcaaccaatttattttatccggtactaatcatggcttcacttgatcacacatgttggaaaagcacacgtgaggcaatcgaggcatgtctagagtgatgactaggtggttacaggccgacttaatttcaattcttgtaagtactttctttacggtgaggtgaaccaaagtgagtttagccaactcgacaaaacgatctctaaactcaaactttgttcatagggcagttacaagttagtaaaaccaacttgttgaactacttttgacactaggaaattttggtcttgttacccattggcaatccaatggtcgagagttcacctttgctaataagagattatgcacttgggtagaaatccatttggtcagattgttcatccgtttcttccatgcaagatgaacagacttggtttggaaatatatgggttaaataagagagcggatgaacacactcttgcatctcagtggcaggaaaagccaatctccattttgagagctaatcagttgttgtccaacactaaaaagctccaaggcttcacctttacacagaggatgtaaaggaagcttgtatgagtagtcattaccaaaatcaaaagaaataagaccacacatgaaagtggtatgcccttttaatccaacagagatgatagatgttgcttgatcacttcgacaagcaacatagaaattattttaagggaggagtccacggaagatcatacgtaagtgtagtttcacaatggatcatgaccagcgacctcgataccagcaggcgccaagcagcataaccttgcgtgtacattcacaaggggctctcagtttcgctgcggcaccataagtcattacccatgacaccaccaccgaactagcaccaataatgaatctcacgtggtaaaactagattgtgccaagataacacattgatatagtctcataatggatacaactactaaccgtgataccagcgcgtgccgagcagcacgaccatgtgtgtacattcacaggaggccctcggtttcgtcacggcaccatcggttttagtcataacaccattactagacgtaaccaataagaaatctcatgccacactaataggttgagcaagggtgacaatatacaaagagactctacctgtcaaaacggttacaagtagagagccaaatagatcatggcccaatgaaatgaacagggcatgaccataaccaaaacttgattgatgaatgagtacgatgggagactgttaattcagtcccaagcatacttctatgcccatcgcagagatcacaaggtcaaggattagtatctgatcaaatacggaggggaaacaatcataagatcaagttggtatgcctttgatagatatgaggaaaccaaaggaatcaaattaaagaagatgatcaggcaggactttcctaggttgggttgataaagcgacaagataatccacaaggagaggccgaatacaatagagacctcaacctgcatcaactgagcaagggcaggatctaggatggaaacacgaccactaagggagatacaagttaattaccaagaacacggactcaagatccttatttgaagtccaagtatatcttaggtccaataaagtgattatctaagcatatatttgcatgggcttggtcatggagtgataacgaaaatttcaaactttgggtcatggttcactaaataagaacatggcctagttttgggtttaggcaatcaagttaccaaccttctatcggtacatcaagcacaagagcaaacacatataacacctaaatagattacctaaagaacggaggacagctattacatcgaagtttataattcaacattacaccagattatctacaatcactggtttctggaataaggatgagagaagcattttggatgtataggtgacaaacatgatgcaacaatcatgatgcatgctcgtcctacacgtcctcactgattttgccaacataacgtggcaatagcgttctatatcggtggcatacgttctctctcggtattttgctagtcgtcagctacacatacgttttcgagttagtgtacctgcagaaaattttcattacagcccaattcccaatgatgcaagtcacacatgacagtttatcacagtttatactccatatattgttatatggaggccagctcatcattaagcgtcgagccacgcataggcgtcgttgccacactttaaccatagggcaactcattatggtaactcaccttcttacgtgagcgtaggtgcgtcgttgcaagtacattacacttctcagtattcccatgtctatatacccatacacatccatggtgtactgaattcccagaaaagtaattactccacatcacagctttcatatatacatatgtagaatacgtatatagtcaagcgccacaattaagcacttccctagaccgatggttgttcggtcatgctctcacatctcaccttacctgaacgtcgatccattcagaactgaatggcctcaaaaataacaatacacatgtatgcaatacccccggtttgtgggttagtggttttcaaataagccacctgatagtccttaatttagggcttaatagaggatgtcgctagcattatagtttttcaaatctgtttttgaaagccaaacaatgtgtttagttgaaaataggtttttcaaaaccaaaacttttggtttgaaaatacgtatgtgaccgtatatacttaatcctgctccgataccagctgtggcagaacctccaagttattgggcccacatgcacctgtccttgtcccaaagacctcagacggctatgcatgtgcaccagataacttaacaggatctgtccgattgccccaaggacatcggataaaccacttacaaccagaaccgcgggattaagtaacacatatcacacacaccaatattgttgcagcggaaatc

SEQ ID NO: 68235 - DNA, 1218 bp, Zea Mays
tccaccctcccccaccaccttccttctctacttctctcctctctcccaccgcatccgatctcgtacctcacttcatcgccccgccgccgcttcgacggcgcgccgaccggctaggacgcgcctccgacccggatagtgttccgctcggtcgaatccgacggccgctcgctgctgcagcgggcgcttgctgtgcgtcgcgtgggctcggctggaggcaggcggaacctttcctgggtctcggagatggcggcgcctccggcgagggcccgggccgactacgacttcctcatcaagctgctcctcatcggagatagcggtgttgggaaaagttgtctccttttacggttctcagatggctccttcactactagcttcatcaccaccattgggattgacttcaaaataagaacagttgagcttgatggtaagcgcataaagttacagatatgggatactgctggtcaagaacgttttcgaactattacaaccgcctactacaggggtgcaatgggaattttgcttgtctatgatgttactgatgagtcatctttcaataatataagaaactggataaggaacattgagcaacatgcttccgacaatgtgaataaaattttggtaggcaacaaagctgacatggatgaaagcaaacgcgctgtaccgacttcaaaagggcaggctcttgctgacgagtatggcatcaagttttttgaaacggctaaaactatacgtgtagctcatgattgttgttcctgcagagtgcgaagaccaacctgaatgtggagcaggtttttttctccatagcaagagatatcaagcaaaggctttctgaatctgattcaaagccagaggatcgcacgatcagtattaacagacctgatggcggtgaggcttcggcttcacaaaaatcagcttgctgcggatcgtgagggggttacattgtcacaaggaagataaatagtgtgataccatgcttgtaatttacccttctacctttttatctggcttaatcgtccacttctaacttttaattgcaattccttgaattcagacttctgtgttgtaatgtgaacaattttagttgtacccccctgttagcaatgcaagtgctcgtaaaaaaaaaacaatgtaaaaactgtgttctaatttattcagggtctgtttagatctattagcactaaaaattagcatataatacacaatttggatgtagatatt

SEQ ID NO: 68236 - DNA, 1351 bp, Zea Mays
ggtaggaagcgtattctttttcagctcgagcgagtgaaaccatatggaatgacaattgttgagtgttcaactgttaaagctcgtgtgcagatcagtcggatggtggaacgcggtcaccacccaggcccccacgtgtgcgtgacacggtccgctcaaagtccacggtggaccacttccaccctcccccaccaccttccttctctacttctctcctctctcccaccgcatccgatctcgtacctcacttcatcgccccgccgccgcttcgacggcgcgccgaccggctaggacgcgcctccgacccggatagtgttccgctcggtcgaatccgacggccgctcgctgctgcagcgggcgcttgctgtgcgtcgcgtgggctcggctggaggcaggcggaacctttcctgggtctcggagatggcggcgcctccggcgagggcccgggccgactacgacttcctcatcaagctgctcctcatcggagatagcggtgttgggaaaagttgtctccttttacggttctcagatggctccttcactactagcttcatcaccaccattgggattgacttcaaaataagaacagttgagcttgatggtaagcgcataaagttacagatatgggatactgctggtcaagaacgttttcgaactattacaaccgcctactacaggggtgcaatgggaattttgcttgtctatgatgttactgatgagtcatctttcaataatataagaaactggataaggaacattgagcaacatgcttccgacaatgtgaataaaattttggtaggcaacaaagctgacatggatgaaagcaaacgcgctgtaccgacttcaaaagggcaggctcttgctgacgagtatggcatcaagttttttgaaacgagtgcgaagaccaacctgaatgtggagcaggtttttttctccatagcaagagatatcaagcaaaggctttctgaatctgattcaaagccagaggatcgcacgatcagtattaacagacctgatggcggtgaggcttcggcttcacaaaaatcagcttgctgcggatcgtgagggggttacattgtcacaaggaagataaatagtgtgataccatgcttgtaatttacccttctacctttttatctggcttaatcgtccacttctaacttttaattgcaattccttgaattcagacttctgtgttgtaatgtgaacaattttagttgtacccccctgttagcaatgcaagtgctcgtaaaaaaaaaacaatgtaaaaactgtgttctaatttattcagggtctgtttagatctattagcactaaaaattagcatataatacacaatttggatgtagatatt

SEQ ID NO: 68237 - DNA, 886 bp, Zea Mays
gtagaagcttgtaaagcttggctttgtgttgggaaaagttgtctccttttacggttctcagatggctccttcactactagcttcatcaccaccattgggattgacttcaaaataagaacagttgagcttgatggtaagcgcataaagttacagatatgggatactgctggtcaagaacgttttcgaactattacaaccgcctactacaggggtgcaatgggaattttgcttgtctatgatgttactgatgagtcatctttcaataatataagaaactggataaggaacattgagcaacatgcttccgacaatgtgaataaaattttggtaggcaacaaagctgacatggatgaaagcaaacgcgctgtaccgacttcaaaagggcaggctcttgctgacgagtatggcatcaagttttttgaaacgagtgcgaagaccaacctgaatgtggagcaggtttttttctccatagcaagagatatcaagcaaaggctttctgaatctgattcaaagccagaggatcgcacgatcagtattaacagacctgatggcggtgaggcttcggcttcacaaaaatcagcttgctgcggatcgtgagggggttacattgtcacaaggaagataaatagtgtgataccatgcttgtaatttacccttctacctttttatctggcttaatcgtccacttctaacttttaattgcaattccttgaattcagacttctgtgttgtaatgtgaacaattttagttgtacccccctgttagcaatgcaagtgctcgtaaaaaaaaaacaatgtaaaaactgtgttctaatttattcagggtctgtttagatctattagcactaaaaattagcatataatacacaatttggatgtagatatt

SEQ ID NO: 68238 - DNA, 471 bp, Zea Mays
ccggttgttggcagtttccttctgatttccatttatccatggtttttttctccatagcaagagatatcaagcaaaggctttctgaatctgattcaaagccagaggatcgcacgatcagtattaacagacctgatggcggtgaggcttcggcttcacaaaaatcagcttgctgcggatcgtgagggggttacattgtcacaaggaagataaatagtgtgataccatgcttgtaatttacccttctacctttttatctggcttaatcgtccacttctaacttttaattgcaattccttgaattcagacttctgtgttgtaatgtgaacaattttagttgtacccccctgttagcaatgcaagtgctcgtaaaaaaaaaacaatgtaaaaactgtgttctaatttattcagggtctgtttagatctattagcactaaaaattagcatataatacacaatttggatgtagatatt

SEQ ID NO: 68239 - DNA, 1080 bp, Zea Mays
atatgatgttcatactcaaggttttgttgcgatggggttattcaggggcagcttcactctcttggtgggaatgggatgtggtgtctatatagctcagaactacaatgtgccgaacgtcaagaagctattcaacacatatgtttttctggcaaagcacattgaggaaacctaccgtaagccgaagaaagacgatgattgatccttttacatttgttttccatgttatgccctgggaaagcaagtacagctgacgtaatacagaaaggtgcttttttgaaatggtgaaggcatttttgtttatggtctagtttgaactccagtggtaaatgttagttgtggaattcagttgctgtgatagtttttggtcgcatgggcttctagatcatccccttttggcctttgctcgtgttcctgtgcctgagaaatgcactgaactttgtagttgaactgttgaagtgcggccatggataatctagcacatattagtgtgtttgtcaagttaacttaggatgggatgatgtgtttagttgaatctagatttatctttgtttctttaaattgtttgttcttcgatttaccacgatggatgatgacatttgtatttgcaaccagatagtggggatgtgcctttcaccacccataagccttgtcgatgagggtgggcttgtctcggttatctttgtcgccgtgctcctggtacttgtcgcgtaccctgtcgccgtcgaaatcgtgggtggagacctgcaaggttgcgaacgccaacctcgacgaggcagactcctctcatggcaacggcaacagagacaaatgaggaggaggtgcgtcctatcagcgatcggccatggcttggggaggacacgctcgtgcagcgaagacaatgctacacgcttggctgatgctcaaatgtcagagaaaaaatatagacattccaaattttcaatacgtgcgtaaacataaagatagatggatagcttacaaaatgtaattattataattagtttctaattcatttttcgcagcacaatagacattccaaatttccaatacgtacgtaaacatgaagataaatagatagcttac

SEQ ID NO: 68240 - DNA, 1082 bp, Zea Mays
ttctgatttccatttatccatggttttgttgcgatggggttattcaggggcagcttcactctcttggtgggaatgggatgtggtgtctatatagctcagaactacaatgtgccgaacgtcaagaagctattcaacacatatgtttttctggcaaagcacattgaggaaacctaccgtaagccgaagaaagacgatgattgatccttttacatttgttttccatgttatgccctgggaaagcaagtacagctgacgtaatacagaaaggtgcttttttgaaatggtgaaggcatttttgtttatggtctagtttgaactccagtggtaaatgttagttgtggaattcagttgctgtgatagtttttggtcgcatgggcttctagatcatccccttttggcctttgctcgtgttcctgtgcctgagaaatgcactgaactttgtagttgaactgttgaagtgcggccatggataatctagcacatattagtgtgtttgtcaagttaacttaggatgggatgatgtgtttagttgaatctagatttatctttgtttctttaaattgtttgttcttcgatttaccacgatggatgatgacatttgtatttgcaaccagatagtggggatgtgcctttcaccacccataagccttgtcgatgagggtgggcttgtctcggttatctttgtcgccgtgctcctggtacttgtcgcgtaccctgtcgccgtcgaaatcgtgggtggagacctgcaaggttgcgaacgccaacctcgacgaggcagactcctctcatggcaacggcaacagagacaaatgaggaggaggtgcgtcctatcagcgatcggccatggcttggggaggacacgctcgtgcagcgaagacaatgctacacgcttggctgatgctcaaatgtcagagaaaaaatatagacattccaaattttcaatacgtgcgtaaacataaagatagatggatagcttacaaaatgtaattattataattagtttctaattcatttttcgcagcacaatagacattccaaatttccaatacgtacgtaaacatgaagataaatagatagcttac

SEQ ID NO: 68241 - DNA, 878 bp, Zea Mays
gctgtccgctcctgatgcccgcacccttctattcgcttcctgcggcgcggtaccgcaaaccctaatccgaggtatctgtatttgggtgtgaaccaataacaatgctacctggtgtacatgcgtacacccatgtctaatataccggggtcggatcttctcggattggttttgttgcgatggggttattcaggggcagcttcactctcttggtgggaatgggatgtggtgtctatatagctcagaactacaatgtgccgaacgtcaagaagctattcaacacatatgtttttctggcaaagcacattgaggaaacctaccgtaagccgaagaaagacgatgattgatccttttacatttgttttccatgttatgccctgggaaagcaagtacagctgacgtaatacagaaagatagtggggatgtgcctttcaccacccataagccttgtcgatgagggtgggcttgtctcggttatctttgtcgccgtgctcctggtacttgtcgcgtaccctgtcgccgtcgaaatcgtgggtggagacctgcaaggttgcgaacgccaacctcgacgaggcagactcctctcatggcaacggcaacagagacaaatgaggaggaggtgcgtcctatcagcgatcggccatggcttggggaggacacgctcgtgcagcgaagacaatgctacacgcttggctgatgctcaaatgtcagagaaaaaatatagacattccaaattttcaatacgtgcgtaaacataaagatagatggatagcttacaaaatgtaattattataattagtttctaattcatttttcgcagcacaatagacattccaaatttccaatacgtacgtaaacatgaagataaatagatagcttac

SEQ ID NO: 68242 - DNA, 1703 bp, Zea Mays
tcagctactcctgcaaccacccatcgccgaaccagccgcgtggacttctcccccgcatgcgctccgttttgttgggattccctctgaggtccacttgtgctgcccgatggggatgccagcctcgctccactgggatataaaaccacgccccatgcccgctcccttgaccatcatcgaaggaaccacgagccaatcggagagagaactaccagcggggagcgccagggtgcagagagcgccgccgcgagccatctccgactcgctggcgacttggcctctgtgtgtgcctggggatcatcgttggggaaccagtgaagcatacgcgtggatctcctaggacctgggtcgtctctctcccaccgaattgctcaccggagcaaaacttggccggggacccgccctccgcgtgaaccagcttctccgcgtcaccaacgccgacgtatatcggatggctgacttcgcggacacgggcacacggcaacagaaggtcttcgccggactctacgcccactgaacacgcccttgagggctgaggccttgacccactgaacacgcccttggcgaccgccgccgctctactcccagttgccctgttcttcgccggacccttcgccggcgacaagcactaaccaacgaccaacacgttttgttgcgatggggttattcaggggcagcttcactctcttggtgggaatgggatgtggtgtctatatagctcagaactacaatgtgccgaacgtcaagaagctattcaacacatatgtttttctggcaaagcacattgaggaaacctaccgtaagccgaagaaagacgatgattgatccttttacatttgttttccatgttatgccctgggaaagcaagtacagctgacgtaatacagaaaggtgcttttttgaaatggtgaaggcatttttgtttatggtctagtttgaactccagtggtaaatgttagttgtggaattcagttgctgtgatagtttttggtcgcatgggcttctagatcatccccttttggcctttgctcgtgttcctgtgcctgagaaatgcactgaactttgtagttgaactgttgaagtgcggccatggataatctagcacatattagtgtgtttgtcaagttaacttaggatgggatgatgtgtttagttgaatctagatttatctttgtttctttaaattgtttgttcttcgatttaccacgatggatgatgacatttgtatttgcaaccagatagtggggatgtgcctttcaccacccataagccttgtcgatgagggtgggcttgtctcggttatctttgtcgccgtgctcctggtacttgtcgcgtaccctgtcgccgtcgaaatcgtgggtggagacctgcaaggttgcgaacgccaacctcgacgaggcagactcctctcatggcaacggcaacagagacaaatgaggaggaggtgcgtcctatcagcgatcggccatggcttggggaggacacgctcgtgcagcgaagacaatgctacacgcttggctgatgctcaaatgtcagagaaaaaatatagacattccaaattttcaatacgtgcgtaaacataaagatagatggatagcttacaaaatgtaattattataattagtttctaattcatttttcgcagcacaatagacattccaaatttccaatacgtacgtaaacatgaagataaatagatagcttac

SEQ ID NO: 68243 - DNA, 1683 bp, Zea Mays
aacaaatccaaacaagacaaatgcgttgcctatgcagtttgcagagagttttggtgcgactccctttctgtttactttgcaaggtaacgacaggtcgacagcacacaaggcacaagcaacctcctcttcacatgcctcgtgtctcgtcaggctgcatgccaatgtagcagtgtcttcagccgacacccccatctttttcaatcctcaggcaggcgcagcgcaggcagcatccacagcctgaatccaccacaccagcaccacccagcaccgatggccggcgacgacggacgtgctccctccggcctccgcgtcgtgatgttccccttcccgttctggagccacattaaccagatgctccagctcgggaagctcctccgtgcgcggggcctgggcgtcaccatgctccacaccgacttcaacgcgcccgaccccgcactccacccggacatcaccttcgtgtccatccgcgagtccctccccgccgaggtcgtcgccaaccccgacatggtagagcagatgatgcagctcaacgccgtctgcgaggcgccgttccaggcggccctcgccggggagctgctggcgcgcggtacaacaaccggtggcccgcgcgaggtcgcctgcgtggtggtcgacgggcagtggtacaagatgctgggcgcggccacgcgtgtcgctgtccccgcgctcgtgctgcgcgccgacggcgccgccaccttactcagcatgctcgccaccccgtgccgccggtcccggaggagctccgcgagacggtgaggcacaggggcaagatcgtggcgtgggcaccgcagagggaggtcctggcgcacccggcggtgggtgggttctggacgcactgcgggtggaaatccatggtggaggccatatccgaaggggtgcccatgctcgtgcagccgtgcttcgccgagcagatagtgaacgcgaggtatgtgacgcaccagtggggcatcgggtacgaggtcgggaagccgcttgagaggacagccatggcgaaggcggctagaaagctgatggccggcgagctggggccacaggggccaagggagagggctcggcttcttaaggcgcaggcgaagcagtgcgttgcagaaagaggaggaattagtttggctctcgacggtctggtggactacatttgctcgctgtgatgtttgatcagctttcaggtttcagcatgacgatggcgctctgaataatgaactgcatgttatatgtccgatgcaataaggaatagaatgtggacagcattttggtttacttaattctctggcaaatatatcgttggagtttatgagctaaggtctatttattagtatcacattgataattgataatggaagagaaacaacttaaatagcttctttattgtcactcttcgctacttctttttgtgtgagttctactcgcctataaattagtggaacatcctcctcttaaacacaagaaaaaaatcaatctactatattttagtgagagagctatcttagggaggctccagcatgccatgtcagcgtctagtttcagcaaacccggtttttgatgattttgcacgagtcggatagttcggtactcatttttttccgtttttctgagttcaatgacccaaatgacacagtgtaccaagttcgaggaccgctaatgtattttactcagataagttttaac

SEQ ID NO: 68244 - DNA, 327 bp, Zea Mays
gcagttcttcgcgcaaaagctcatcgcgtccgcttcgatctgcagtcgtcgtgcttaccgttccgcgatccgccgccggcatccgtcagcgccaccgtgcccctgttcttatttcatcttcgttggcttctgggctctcgtttttcttggatcttagattgacccgatcccctgattgcttgcgctctgtcgctttcttgaagtgagctgcagcaatggccgctggtgctgcgccgaccaatatgcagaaggagcagatgtttggattggcggagaaagagatggagcatagggttgaccttttcaatcgcgtgaggtcacgagtca

SEQ ID NO: 68245 - DNA, 331 bp, Zea Mays
gcagttcttcgcgcaaaagctcatcgcgtccgcttcgatctgcagtcgtcgtgcttaccgttccgcgatccgccgccggcatccgtcagcgccaccgtgcccctgttcttatttcatcttcgttggcttctgggctctcgtttttcttggatcttagattgacccgatcccctgattgcttgcgctctgtcgctttcttgaagtgagctgcagcaatggccgctggtgctgcgccgaccaatatgcagaaggagcagatgtttggattggcggagaaagagatggagcatagggttgaccttttcaatcgcgtgaggtcacgagtcacctg

SEQ ID NO: 68246 - DNA, 1958 bp, Zea Mays
gtgcccccacgcgcctacccactgttcccggctccccacccgctccactccgtcccgtcccgtcccgttacaaaaccccgagctgcaaccccacagccagagagagagactctcccggctcccctgcctgcgcgccgtctcctccaggctccagcgcctcgcggccaccccgtacgtaccacggcacggctgcacggccgatggcgtaccccgccgcgccgcacacgagcgcggccttcctcgctagcttcgcgacgccgctccccgcgcgccgcgcctcgcccccgacccggcgccgcgcggtgtcggtcgccgccatcgccaccaccaccacctgcgtcttcgccgacgccccccgtgggatcaaggaggagcaggcggactcgggcgcccaggcggcggcggctgcggctgcgcggagggacgtcagcccggacaccgtggcctccatcatcctcggcggtggcgccggcacgcgcctcttcccgctcacgcgtacaagggccaagcccgcggtgcccgtcgggggatgctacaggctcatcgacatcccgatgagcaactgcataaacagcaagatcaacaagatctacgtcctcacccagttcaattcccagtctctcaatcgccacatcgcaaggacatacaactttggtgagggagttggattcagtggcgggtctgtggaggtgctggcagctacccaaacagctggggaatcaggaaagaaatggttccagggaacagcagatgctgtcaggcagttcctctggctttttgaggatgcaagactcaaatgtatagaaaacatactgattctgtctggtgatcatctgtatcggatggattacatggattttgtgcagaagcatgttgactctggtgctgatatttcagttgcgtgtgttccaatggatgaaagtcgggcatctgattttggattgatgaaggccgacaggaatgggcacatcactgatttccttgaaaagcccaagggtgcagatttggaatcaatgcaagtggacatgggattgtttggattatccccagagtttgcaagtacgtacaaatacatggcttcaatgggaatatatgtattcaaggcagatgttctcagaaagcttctgagaggccattatcctacagctaatgattttggcttagaagtgattccaatggctgcaaaagattatgatgtgcaggcttatttgtttgatggttactgggaagatattggaacaataaagtctttctttgaagcaaaccttgctctcactgatcagtctcccaacttctatttttatgatcccgtgaagcctatttttacatctcctagatttttacccccaaccaaggtagaaaactgcaaggttttgaactctatagtttcacatggctgctttctaactgagtgcagtgttgagcactctgtcattggtatccgctcaaggttagaaccgggagtgcagctcaaggacaccatgatgatgggggcagattactaccagactgaagctgagagattatctgagctgtctgttggaaaagtcccagtcggtgttggagagaacactaaaataaggaactgtatcattgataaaaatgctcgaattggaaagaatgtagtcattatgaactctgagaatgtgcaagaagcagacaggccagctgaaggatattacattcgttctgggataactgtggtgctcaagaatgcagtaattctgaatggtacaaaaatttagaagattatagaattatctgcagaataccaatccctcagtgaagagcacaccattgaagcccacagcagagttctacgacgcagatgcagtcaataaaaccccaatagcacaaaagattaggagactgtcgatgcagctaaagaagtgtggatataggcatggagcacctgcaacacgccaacgatgtttggattggcggagaaagagatggag

SEQ ID NO: 68247 - DNA, 2193 bp, Zea Mays
gtgcccccacgcgcctacccactgttcccggctccccacccgctccactccgtcccgtcccgtcccgttacaaaaccccgagctgcaaccccacagccagagagagagactctcccggctcccctgcctgcgcgccgtctcctccaggctccagcgcctcgcggccaccccgtacgtaccacggcacggctgcacggccgatggcgtaccccgccgcgccgcacacgagcgcggccttcctcgctagcttcgcgacgccgctccccgcgcgccgcgcctcgcccccgacccggcgccgcgcggtgtcggtcgccgccatcgccaccaccaccacctgcgtcttcgccgacgccccccgtgggatcaaggcggactcgggcgcccaggcggcggcggctgcggctgcgcggagggacgtcagcccggacaccgtggcctccatcatcctcggcggtggcgccggcacgcgcctcttcccgctcacgcgtacaagggccaagcccgcggtgcccgtcgggggatgctacaggctcatcgacatcccgatgagcaactgcataaacagcaagatcaacaagatctacgtcctcacccagttcaattcccagtctctcaatcgccacatcgcaaggacatacaactttggtgagggagttggattcagtggcgggtctgtggaggtgctggcagctacccaaacagctggggaatcaggaaagaaatggttccagggaacagcagatgctgtcaggcagttcctctggctttttgaggatgcaagactcaaatgtatagaaaacatactgattctgtctggtgatcatctgtatcggatggattacatggattttgtgcagaagcatgttgactctggtgctgatatttcagttgcgtgtgttccaatggatgaaagtcgggcatctgattttggattgatgaaggccgacaggaatgggcacatcactgatttccttgaaaagcccaagggtgcagatttggaatcaatgcaagtggacatgggattgtttggattatccccagagtttgcaagtacgtacaaatacatggcttcaatgggaatatatgtattcaaggcagatgttctcagaaagcttctgagaggccattatcctacagctaatgattttggcttagaagtgattccaatggctgcaaaagattatgatgtgcaggcttatttgtttgatggttactgggaagatattggaacaataaagtctttctttgaagcaaaccttgctctcactgatcagtctcccaacttctatttttatgatcccgtgaagcctatttttacatctcctagatttttacccccaaccaaggtagaaaactgcaaggttttgaactctatagtttcacatggctgctttctaactgagtgcagtgttgagcactctgtcattggtatccgctcaaggttagaaccgggagtgcagctcaaggacaccatgatgatgggggcagattactaccagactgaagctgagagattatctgagctgtctgttggaaaagtcccagtcggtgttggagagaacactaaaataaggaactgtatcattgataaaaatgctcgaattggaaagaatgtagtcattatgaactctgagaatgtgcaagaagcagacaggccagctgaaggatattacattcgttctgggataactgtggtgctcaagaatgcagtaattctgaatggtacaaaaatttagaagattatagaattatctgcagaataccaatccctcagtgaagagcacaccattgaagcccacagcagagttctacgacgcagatgcagtcaataaaaccccaatagcacaaaagattaggagactgtcgatgcagctaaagaagtgtggatataggcatggagcacctgcaacacgccaacggtacggccaaaccatgagcatgaggccatttcacgtcctttcataagcctcggctagtgccggcgcgcgcagggtatcttttgttccttttttctagcagtaatttacgtgaagtgtctgtacatgtagagggagagatagggtacaagtacgagagagcatgttatagtacctactcttattatttgtttatttattgttgtgccgaagaacgacccgtgcatctcatgtgccaagtccatgcctaattgcctattgatgcccactttcgggg

SEQ ID NO: 68248 - DNA, 2162 bp, Zea Mays
gtgcccccacgcgcctacccactgttcccggctccccacccgctccactccgtcccgtcccgtcccgttacaaaaccccgagctgcaaccccacagccagagagagagactctcccggctcccctgcctgcgcgccgtctcctccaggctccagcgcctcgcggccaccccgtacgtaccacggcacggctgcacggccgatggcgtaccccgccgcgccgcacacgagcgcggccttcctcgctagcttcgcgacgccgctccccgcgcgccgcgcctcgcccccgacccggcgccgcgcggtgtcggtcgccgccatcgccaccaccaccacctgcgtcttcgccgacgccccccgtgggatcaaggaggagcaggcggactcgggcgcccaggcggcggcggctgcggctgcgcggagggacgtcagcccggacaccgtggcctccatcatcctcggcggtggcgccggcacgcgcctcttcccgctcacgcgtacaagggccaagcccgcggtgcccgtcgggggatgctacaggctcatcgacatcccgatgagcaactgcataaacagcaagatcaacaagatctacgtcctcacccagttcaattcccagtctctcaatcgccacatcgcaaggacatacaactttggtgagggagttggattcagtggcgggtctgtggaggtgctggcagctacccaaacagctggggaatcaggaaagaaatggttccagggaacagcagatgctgtcaggcagttcctctggctttttgaggatgcaagactcaaatgtatagaaaacatactgattctgtctggtgatcatctgtatcggatggattacatggattttgtgcagaagcatgttgactctggtgctgatatttcagttgcgtgtgttccaatggatgaaagtcgggcatctgattttggattgatgaaggccgacaggaatgggcacatcactgatttccttgaaaagcccaagggtgcagatttggaatcaatgcaagtggacatgggattgtttggattatccccagagtttgcaagtacgtacaaatacatggcttcaatgggaatatatgtattcaaggcagatgttctcagaaagcttctgagaggccattatcctacagctaatgattttggcttagaagtgattccaatggctgcaaaagattatgatgtgcaggcttatttgtttgatggttactgggaagatattggaacaataaagtctttctttgaagcaaaccttgctctcactgatcagtctcccaacttctatttttatgatcccgtgaagcctatttttacatctcctagatttttacccccaaccaaggttttgaactctatagtttcacatggctgctttctaactgagtgcagtgttgagcactctgtcattggtatccgctcaaggacaccatgatgatgggggcagattactaccagactgaagctgagagattatctgagctgtctgttggaaaagtcccagtcggtgttggagagaacactaaaataaggaactgtatcattgataaaaatgctcgaattggaaagaatgtagtcattatgaactctgagaatgtgcaagaagcagacaggccagctgaaggatattacattcgttctgggataactgtggtgctcaagaatgcagtaattctgaatggtacaaaaatttagaagattatagaattatctgcagaataccaatccctcagtgaagagcacaccattgaagcccacagcagagttctacgacgcagatgcagtcaataaaaccccaatagcacaaaagattaggagactgtcgatgcagctaaagaagtgtggatataggcatggagcacctgcaacacgccaacggtacggccaaaccatgagcatgaggccatttcacgtcctttcataagcctcggctagtgccggcgcgcgcagggtatcttttgttccttttttctagcagtaatttacgtgaagtgtctgtacatgtagagggagagatagggtacaagtacgagagagcatgttatagtacctactcttattatttgtttatttattgttgtgccgaagaacgacccgtgcatctcatgtgccaagtccatgcctaattgcctattgatgcccactttcgggg

SEQ ID NO: 68249 - DNA, 4065 bp, Zea Mays
gtgataacgaccaagattggttttaggatcacaaactgcagacagccttgtttacatctccgtataaaacgtctgtcaggaacacaaaaagtcataatccatgagacaaggtttttaaagcatgtggacaagtataaaattgttgtattgatcatttaatcaatcagaagagaactacgcacccatctaggggaatagctggtaaacagcaagtcatcagtaaccatgagggtttcagagattgtccattcaaacttaccaccacattaccaggacctccaacccatgccaagcaaagtgaaaagaaattgtagatgacccaagcatcatagctgaaacacaattgaattgagtttaaacatgattctagatatagtactgcgttatatagcacaaatttgtcagggaactgcagaaacaatgaaaaaaccaacaggatgattaggagaaagaatatttagtgcacctaatcaaccgcctattcacaaaataaatgcagtaacaataacacaaatcaatgaattatcatgccagcaaagcttttcaagagtcaagactactcaaatattgttcttcttcttccgccttctcgttttggaaagaaggatcagattgggacattaagcttctttgtgattgcattactatgaccaatgttgttctgcaggagtgctatgatgaatgtacctcatgactctaaagtcaggtgccattagtacagatggccatgccctggggcacttttttctttgtgaaatagttgaggtcatttttgcaaagatgtccacggctgagtcttcaaaggaagaaaaaaaaccaacctttgtcttgaaagaggtagactccagtcctcgctagttaatagagtatacagttcctatgtgaatgggcactaaacaatggcttcagcatatattcatcactatatctggagtgcatgttttcaaacaaactataaattgaaactatccaaaaatagcaatagtctgagattttgatctaggtaacttcacatttattggagccacaaaagaattagcaagcagttattgggtgtgtttggtttagcttttggctttgacttttgccccctaaaagctaaaagccaaccaaagggctgaatccaggaaacagctttttctaaaagctgactttctcgcagtgcaaaactgaaagcacctcaggacctgcttttagtggcttttagatggaactatgaaaacatatatcgaagaacttttaacgacttttagtggtttccatcaaacagtttttagctttttaacaactcacagcctacagcagcttttttcacagctcacagcccacagcaacttttttcacagccatagcccaaccaaacagacccattgtttgctcaacgattcagagccttaaccatggggcaacatgctccagttggttttacccaattcaactcagcgatttacataaaactcaactgagcttaagtgtaaataatatctaaaaagaatgacctctgctgctgatatatgagtaccagaaagatcataaatacaagttgagacttgtaaggcgttgttgtaattgtgagatcacaatggccaaaggaagcatgcatcatcaacaataacaacaaagccttttagtcccaaacaagttggggtaggctggaattgaaacccatccgaaaccacaagttaaagttcaggcacatggatagctgttttcaatgtacttctattcaagactaaatttttggatatattacatcctttcgactctccttttactgctccttcccaaatcaacttcagtcttcccctacctcttttcccattgctatcatgccttatgatcccactacccattagtgcctctatggaggtttccattgaacatatccaaaccatctcaaccagtgttgcacaagcttttcttcaactggtgctaactctaacctatcatgtatatcatcgttccggtcaatctccttgtatggccataaatccaacgcatgcgcatttctgtaacacttatcttctgaacatgtcgtctttttgtaggccaacattctacaccatacaacatagcaaatctaatcgtcgtctttgttttctaggcatgtattgtccttccagtggccaaaactcaaacagactaacactaatacaaataagcaattaataagggtcctttggtggtacagtctaaaatccaaaatgcttttttttcaaaaacacactaacttgccaacaggctatctacttcagactggagggtaaataacatggtatctacttcaggctgagggaaaataacaggttatctacatcaaactggaggaaaaattctccccataacggctgatttggtgaccagtgatcacgagaggatccatgggggaggaatccccttgttattcagttttgaatagcaaggggttcctccccatggtccccccccccctccccggtgatccttggtcaccaaaccagtgctaaatgtagggggaaaagcaatggttgcaataatattctaacctatgttaccccacatgtcatcagtatgagaacaatgtttcatggacaatttggtacaaaagatcacgaaacatgcatggctggatcacatggttgttagatggtggatctaactacaacaaatgtttctagaagtaataatgcggatctagctgaggtttctagaagtggtaagttcatcactgatgattttattaaaatgaagtactagattgatcacatctcaactatctgattggataaatgtattcttggactacaaagtgtcacaggaaacattgctgtaacttgtaagcatatggcattgctcatgaagttagtatcatggtctcgataggcatgcatagttaaaaaacagcctccgcagccaatttcctctgttatttgatccctaattgggtaagtattcacacaattgaacttcacttcatttatctgcgggaactggcacagtggggaagccccggctttcataaaaaaaccaagaggcatatttgtaatgcagtgtcagaagtagcctgccccagtccttcagaagcaccagtggggatactgcttataccattactactatataactgcagactaaaaagttaacattcttttgaactgaacttcttgatttggttcaggtaatgcgtcattaatggtcaagttgacttaatgattgtagtgcaagggcatttcagaacttgtgcacgcataccgagtgccatcaaagctagcaatattgtgatctaaacgaagttgcaaattcatgcccttctcacattaacagcactgtttcacttgggattgcattttgtcaatggttagggttatggaccatatcaagtcacaggacttataccagatgagtactaaaagggagggttacaagagcagttttatttcttgtattagttctgattatgagggcatcattatccatcgtgaatgaaagcatatatgtccaagtgatatgaacatgaatgagatgacacaggataatataaaataagttttcagttacaagtagttgacttacatttctcgaatagaattgaagtagattgcttgatgcggtaagacaagggaaagaaatgacatcactgcatatacctgaaatttaatgtacagatagttacaaaaggatcaaaagctggatacaatatacatctgtaagatgaaagggttaaatgaatcaagacaatccagtcatatgattccatgctgacacttgaaaccaactatctaggacaaatgttcaagttccatgcccagaggatagatgccatgattcatatgcattatgccaaaccaaatagaacaaagacatggcacaaatagtgtaaccaaacccctgtgatataataatgtcatgtggctgacagatcatgcattcatgcaggaagcagaactggaaaaatcatgtttatgagataatatgtattcttctcattccgatggttccactacaaaaaaagttgattttatgagatgaggtaaagaaaatatctgagccagcgagcacaaataaaacataaaccattccgctcag

SEQ ID NO: 68250 - DNA, 642 bp, Zea Mays
ctggagataggcagctttctcagcattttttatgaaaccagattttgcagcaaggaaaaccagcacaccctgttagaaaagcttccagactgttacaaaaggatatttatttcactacgtaacaacaaatactggatggtatttttgctgcaaaactgccattccatgtaagaaattggaacaggctgctggactattggctcgcaagtactccctcagttgacaaatatatgacacggttgggttttttttttggcaaaaactttagtcactcgtcttgttcagaagaaattgagttatcatttatttagtgtggtttgttttatcacttgagctcgtttgagcgtgacttaaaatttttcattttcaaatacatattttgaatgagacgagtgattaaacttttgaaaaaaaaagtcaacggtgtctgttagactacccgtctagggtttgtggtgttccccttgtaatgaccgtcatacccccagtgtaatgggcctggcccagttacttactctattaataccactcccaaccctgtttagggtatgggtttagtttccaatatggtatcagattagggttacgtcctctccacacactgctacagccgccagggggcttcttccccctgcagccgcc

SEQ ID NO: 68251 - DNA, 1504 bp, Zea Mays
gctcgggtggtgcctcgggttcagccaacctcgcacatggcgcgctgctccgtcgcgaaaccgctctgcgccaccaccgcgactccccgccttacccgtcgctgccggcagctctccgcgaacgccaccaccccggccatggccaccagtaaagcacggttgccggccctaaacaaaccggccaaaccgccgccgcctctcctctcgcgtccgaagctccccgtccccaccaacaccgcgactgacaccactagcggcaaggattgcaccaagaaaccaccgccggaagctacggactcacatccgccctcgtccggcgccggcgacgtgctccgcctgatggacgcgctgggcatcccgcccgacgaggacatctacatatcccttctcagggagtgcgccgacgcagcagaggtggcctccgtgcacgcgcacataaccgcccgtcgcgcctccgatggactcccgtcgccggtcgccaaccgtctcctgctttcttacgccgcgtgtggggacatcgaagctgcccgccgggtattcgacggaatgcccaccactaacggcatggcgtgggcgaccatggtgtccgcctactcggatggctgcctccaccatgaagcgatgcgtctgttcgcccacatgtgccatggaacgccggtcctggacggcgattgctactcccatgccatcgtggccgtgctgcggtcatgtacccgtgcaggcgagctacgtctcggtgagcagctgtactgcgatggaggcggttttcacagaagcgcgcggcgagttctcgcgacgacgatgcagcaccactgtcaggaaccagtccctgaggcggcctggacgagcctgatcacatcctgccaccgtgaaagcctactgagcgaggctgtggatgtcttcagggacatggcgtcctcgggcgttccaaggagcagcttctccctgtcgagcatcctcgcggtgttcgcagagtcacaggacccagggtgctgctgcgggcagcaggtgcacgccgacgccatcaagcgcggcgtggacacgaaccagttcgttggctccgggctcatacacatgtacgcgaagcaagggcagctggcggacgccaccagggcgtttgagacgatcggtggcaagcctgacgccgcgtgctggagtgccctggccatggcctatgctcgcggcggacggtacagagaggccaccagaatcatgtatcagatgaaagctgccgggatgaatccttctaaggagatggccgatgcggttaggttggcttgtttcagatgataatcctgaactactagtagtctggtagttgttgccgccaaagagtgagttactttgattgtacaattgtgttaagcagacgccagtgcactggtgtctggttccaaatgataaggtactttttttcatttaggaggccgccctatagtcatatgctgtactactcattaactactctctttttgtaatgctgggcgaatatggtctagggcct

SEQ ID NO: 68252 - DNA, 1684 bp, Zea Mays
ttcagttatctccgtatgcatggatcctgcggttgtgaattttcgtgcggtagtttggatggctgggaaagtcggtgggtcaagtccgagtggaagaaggatgagaacatggctggtgaatggaaccacacctcgggaaaatggaatggagatgccgaggacaaaggtattcaaacctccgaggattacaggttctatgccatttcagccgaataccctgagttcagcaacaaggataagaccctggtgctgcagttctctgtgaagcacgagcagaagcttgactgcggtggtggctacgtcaagttgctgggtggtggtgatgtagaccagaagaaatttggtggagacacatcttacagcattatgtttggaccagatatctgtgggtacagcaccaagaaggttcacactatcctgaccaaggatggcaagaaccacttgatcaagaaggatgtgccttgtgagactgatcagttgactcatgtttacactttgatcatccgtcctgatgcaacatacagcattctcattgataatgaagataagcaaactggcagcatctacgagcactgggatattcttccccctaagaaaatcaaggacccagaggctaagaagcctgaggactgggatgacaaggagtacattcctgaccctgaggacaagaagccagagggctatgatgatattcccaaggaaattcctgaccctgatgctaagaagcctgaggactgggacgatgaggaagatggtgaatggactgcccctaccattcccaacccagaatacaagggaccatggaaacaaaagaaaatcaagaacccgaactaccagggtaaatggaaggcacctatgattgacaacccagattttaaggatgatccatacatttacgccttcgacagcttgaagtacattggcattgagctgtggcaggttaaatcgggcactctgtttgacaacatcatcatcactgatgaccctgccttggccaagacttttgcagaggagacctggggcaagcacaaggaggcagaaaaggctgcttttgatgaggccgagaaaaaaaaggaagaagaggatgccgccaagggtggggatgatgaggatgatgacctagaggatgaggaagacgatgagaaggcagacgaggacaaggccgactctgatgccgaggatggcaaggattctgatgatgagaagcacgacgagctctagatggcgaggatgatgttgcggccgctggcctagatttatcagctctgccactatgaagttctttttttttcccgtgaccaccaagaatgtagaacactgctaataagcagatggacagtttgggtcgccgtagcgctttgtagtcatttttcccattaaagccgataacactgaacaaggaggaaggatcttttgcccacgattgttatctccctttctgatgttaaatgtgagcctttgcgaaagcactggttccgtcacgcgtgtggactttgcatgtgcggcgtgtttaggttgaggatcgtcgtgccgttttcgcgtagggaaacgttcgtgcctgatcactgttctagctatcgatatggtctcttttcaggcaaactcgctccgtttcctcctctcagtgttactgattttgcctggtataagatttgttattttttttattgggcccgtccatata

SEQ ID NO: 68253 - DNA, 1772 bp, Zea Mays
ccgtaaacccacccacaccccctgctccttttaagcagccccgctcgctctccgcagtgaccgatagaacacgacctggggggttcagatcggatcggaagcttccataagtttccatcgggcttcgccggtatggcgatccgcaaggggtcttcgtacgccgtcgcggcacttctcgcgctcgcctctgtcgccgccgttgcaggggaggtcttcttccaggagaagttcgaagatggctgggaaagtcggtgggtcaagtccgagtggaagaaggatgagaacatggctggtgaatggaaccacacctcgggaaaatggaatggagatgccgaggacaaagttctctgtgaagcacgagcagaagcttgactgcggtggtggctacgtcaagttgctgggtggtggtgatgtagaccagaagaaatttggtggagacacatcttacagcattatgtttggaccagatatctgtgggtacagcaccaagaaggttcacactatcctgaccaaggatggcaagaaccacttgatcaagaaggatgtgccttgtgagactgatcagttgactcatgtttacactttgatcatccgtcctgatgcaacatacagcattctcattgataatgaagataagcaaactggcagcatctacgagcactgggatattcttccccctaagaaaatcaaggacccagaggctaagaagcctgaggactgggatgacaaggagtacattcctgaccctgaggacaagaagccagagggctatgatgatattcccaaggaaattcctgaccctgatgctaagaagcctgaggactgggacgatgaggaagatggtgaatggactgcccctaccattcccaacccagaatacaagggaccatggaaacaaaagaaaatcaagaacccgaactaccagggtaaatggaaggcacctatgattgacaacccagattttaaggatgatccatacatttacgccttcgacagcttgaagtacattggcattgagctgtggcaggttaaatcgggcactctgtttgacaacatcatcatcactgatgaccctgccttggccaagacttttgcagaggagacctggggcaagcacaaggaggcagaaaaggctgcttttgatgaggccgagaaaaaaaaggaagaagaggatgccgccaagggtggggatgatgaggatgatgacctagaggatgaggaagacgatgagaaggcagacgaggacaaggccgactctgatgccgaggatggcaaggattctgatgatgagaagcacgacgagctctagatggcgaggatgatgttgcggccgctggcctagatttatcagctctgccactatgaagttctttttttttcccgtgaccaccaagaatgtagaacactgctaataagcagatggacagtttgggtcgccgtagcgctttgtagtcatttttcccattaaagccgataacactgaacaaggaggaaggatcttttgcccacgattgttatctccctttctgatgttaaatgtgagcctttgcgaaagcactggttccgtcacgcgtgtggactttgcatgtgcggcgtgtttaggttgaggatcgtcgtgccgttttcgcgtagggaaacgttcgtgcctgatcactgttctagctatcgatatggtctcttttcaggcaaactcgctccgtttcctcctctcagtgttactgattttgcctggtataagatttgttattttttttattgggcccgtccatata

SEQ ID NO: 68254 - DNA, 1844 bp, Zea Mays
ccgtaaacccacccacaccccctgctccttttaagcagccccgctcgctctccgcagtgaccgatagaacacgacctggggggttcagatcggatcggaagcttccataagtttccatcgggcttcgccggtatggcgatccgcaaggggtcttcgtacgccgtcgcggcacttctcgcgctcgcctctgtcgccgccgttgcaggggaggtcttcttccaggagaagttcgaagatggctgggaaagtcggtgggtcaagtccgagtggaagaaggatgagaacatggctggtgaatggaaccacacctcgggaaaatggaatggagatgccgaggacaaaggtattcaaacctccgaggattacaggttctatgccatttcagccgaataccctgagttcagcaacaaggataagaccctggtgctgcagttctctgtgaagcacgagcagaagcttgactgcggtggtggctacgtcaagttgctgggtggtggtgatgtagaccagaagaaatttggtggagacacatcttacagatatctgtgggtacagcaccaagaaggttcacactatcctgaccaaggatggcaagaaccacttgatcaagaaggatgtgccttgtgagactgatcagttgactcatgtttacactttgatcatccgtcctgatgcaacatacagcattctcattgataatgaagataagcaaactggcagcatctacgagcactgggatattcttccccctaagaaaatcaaggacccagaggctaagaagcctgaggactgggatgacaaggagtacattcctgaccctgaggacaagaagccagagggctatgatgatattcccaaggaaattcctgaccctgatgctaagaagcctgaggactgggacgatgaggaagatggtgaatggactgcccctaccattcccaacccagaatacaagggaccatggaaacaaaagaaaatcaagaacccgaactaccagggtaaatggaaggcacctatgattgacaacccagattttaaggatgatccatacatttacgccttcgacagcttgaagtacattggcattgagctgtggcaggttaaatcgggcactctgtttgacaacatcatcatcactgatgaccctgccttggccaagacttttgcagaggagacctggggcaagcacaaggaggcagaaaaggctgcttttgatgaggccgagaaaaaaaaggaagaagaggatgccgccaagggtggggatgatgaggatgatgacctagaggatgaggaagacgatgagaaggcagacgaggacaaggccgactctgatgccgaggatggcaaggattctgatgatgagaagcacgacgagctctagatggcgaggatgatgttgcggccgctggcctagatttatcagctctgccactatgaagttctttttttttcccgtgaccaccaagaatgtagaacactgctaataagcagatggacagtttgggtcgccgtagcgctttgtagtcatttttcccattaaagccgataacactgaacaaggaggaaggatcttttgcccacgattgttatctccctttctgatgttaaatgtgagcctttgcgaaagcactggttccgtcacgcgtgtggactttgcatgtgcggcgtgtttaggttgaggatcgtcgtgccgttttcgcgtagggaaacgttcgtgcctgatcactgttctagctatcgatatggtctcttttcaggcaaactcgctccgtttcctcctctcagtgttactgattttgcctggtataagatttgttattttttttattgggcccgtccatata

SEQ ID NO: 68255 - DNA, 1842 bp, Zea Mays
gggagacaagcacttgcggtgagcccaccatgcagcagtgaccgatagaacacgacctggggggttcagatcggatcggaagcttccataagtttccatcgggcttcgccggtatggcgatccgcaaggggtcttcgtacgccgtcgcggcacttctcgcgctcgcctctgtcgccgccgttgcaggggaggtcttcttccaggagaagttcgaagatggctgggaaagtcggtgggtcaagtccgagtggaagaaggatgagaacatggctggtgaatggaaccacacctcgggaaaatggaatggagatgccgaggacaaaggtattcaaacctccgaggattacaggttctatgccatttcagccgaataccctgagttcagcaacaaggataagaccctggtgctgcagttctctgtgaagcacgagcagaagcttgactgcggtggtggctacgtcaagttgctgggtggtggtgatgtagaccagaagaaatttggtggagacacatcttacagcattatgtttggaccagatatctgtgggtacagcaccaagaaggttcacactatcctgaccaaggatggcaagaaccacttgatcaagaaggatgtgccttgtgagactgatcagttgactcatgtttacactttgatcatccgtcctgatgcaacatacagcattctcattgataatgaagataagcaaactggcagcatctacgagcactgggatattcttccccctaagaaaatcaaggacccagaggctaagaagcctgaggactgggatgacaaggagtacattcctgaccctgaggacaagaagccagagggctatgatgatattcccaaggaaattcctgaccctgatgctaagaagcctgaggactgggacgatgaggaagatggtgaatggactgcccctaccattcccaacccagaatacaagggaccatggaaacaaaagaaaatcaagaacccgaactaccagggtaaatggaaggcacctatgattgacaacccagattttaaggatgatccatacatttacgccttcgacagcttgaagtacattggcattgagctgtggcaggttaaatcgggcactctgtttgacaacatcatcatcactgatgaccctgccttggccaagacttttgcagaggagacctggggcaagcacaaggaggcagaaaaggctgcttttgatgaggccgagaaaaaaaaggaagaagaggatgccgccaagggtggggatgatgaggatgatgacctagaggatgaggaagacgatgagaaggcagacgaggacaaggccgactctgatgccgaggatggcaaggattctgatgatgagaagcacgacgagctctagatggcgaggatgatgttgcggccgctggcctagatttatcagctctgccactatgaagttctttttttttcccgtgaccaccaagaatgtagaacactgctaataagcagatggacagtttgggtcgccgtagcgctttgtagtcatttttcccattaaagccgataacactgaacaaggaggaaggatcttttgcccacgattgttatctccctttctgatgttaaatgtgagcctttgcgaaagcactggttccgtcacgcgtgtggactttgcatgtgcggcgtgtttaggttgaggatcgtcgtgccgttttcgcgtagggaaacgttcgtgcctgatcactgttctagctatcgatatggtctcttttcaggcaaactcgctccgtttcctcctctcagtgttactgattttgcctggtataagatttgttattttttttattgggcccgtccatata

SEQ ID NO: 68256 - DNA, 1287 bp, Zea Mays
tccagaccagcatgaggggatggaggattggtgatgttacgaattctcgaccatatttctgccttggagatctctgggaggctttcaatgagtggagcttttacggggctggtgttccccttgttataagtggaagtgaatctgtgattcagtattatgtgccatacctttctgctatacagctgtatgcagaccctttgaagcttccatcgaggatcagcgaaggtagcagtgaaactgatgatatccgattaagaagcttaactgtggaagctacacatcgattggatggtggctttcaaagggatggcgatgaaatgcactcaccatcgactcgtccaatttttgaatatcttgagacagatccaccatttggtagagagcctttaacagacaaggtatcagttcttgcaagtagatttccagatttgaagaaattcagaagttgtgacctgctgccaaccagttggatgtctgttgcatggtaccctatctatagaatccctactggaccaacactcaaggatttggatgcatgtttcttgacatttcattacttatcaacaccttccaaggatactgatcccagtacaccaccatgccccaatttgggggggcttaattgcaacatgaacgccgctggcaaactaacattgcccgtctttggactggcatcatacaaattgaagagctctatttggtcgtcaaataggcctgaggagcagcagcttgcagcttcactgacgcagacagcagatgactggcttcgccatcgccaagtgtaccatccagacttccggttctttctcacccacttcaacacagcattgagatgacatgagatggtcgcatctctcgctgtaaattgtcttcgttagtacaacctccgttctcgaatatttgttgtccactatatttttgaactaaaacgcgacaaataaaaaagaacggaggaagtatattatatgttgttggctgagccaggctacctgtaacactatgtggttgaccgcgtaactagcgcttctctgaacttttttcgtatggttcagtagttcaagccagacagctaatttgtaacttctccaataattcttttgttgtaggtaaacttttgagagtaaacattatggagatctgtaaaacagaaactgatggttataaactttttaaacttagacttgagaacacattgcttataatttagtttaaccttgtattatatgttctcatctaagatccagaatatttgggggctattagagcgatgtttaatttctgtctttc

SEQ ID NO: 68257 - DNA, 1610 bp, Zea Mays
tcataggttgatgttgcagtcatgtgagtcatccaacctagattttttccctgagcaagtgagcaagccggttgagaaacacttggtgccaaaaagaatctagtcatagcattattttatggttaggccagcagtattgctaaaaggagggacaatttatattcatcagagcaaaaggagtttttgtgagagttattgaatatgctgcttttgatttttttgtttcttcggtttggtttattttataataaatgattatgcatctatccagaccagcatgaggggatggaggattggtgatgttacgaattctcgaccatatttctgccttggagatctctgggaggctttcaatgagtggagcttttacggggctggtgttccccttgttataagtggaagtgaatctgtgattcagtattatgtgccatacctttctgctatacagctgtatgcagaccctttgaagcttccatcgaggatcagcgaaggtagcagtgaaactgatgatatccgattaagaagcttaactgtggaagctacacatcgattggatggtggctttcaaagggatggcgatgaaatgcactcaccatcgactcgtccaatttttgaatatcttgagacagatccaccatttggtagagagcctttaacagacaaggtatcagttcttgcaagtagatttccagatttgaagaaattcagaagttgtgacctgctgccaaccagttggatgtctgttgcatggtatgtctgagtgctcttggattatctgacatcatttacaatacaagtttttgagtggtaccctatctatagaatccctactggaccaacactcaaggatttggatgcatgtttcttgacatttcattacttatcaacaccttccaaggatactgatcccagtacaccaccatgccccaatttgggggggcttaattgcaacatgaacgccgctggcaaactaacattgcccgtctttggactggcatcatacaaattgaagagctctatttggtcgtcaaataggcctgaggagcagcagcttgcagcttcactgacgcagacagcagatgactggcttcgccatcgccaagtgtaccatccagacttccggttctttctcacccacttcaacacagcattgagatgacatgagatggtcgcatctctcgctgtaaattgtcttcgttagtacaacctccgttctcgaatatttgttgtccactatatttttgaactaaaacgcgacaaataaaaaagaacggaggaagtatattatatgttgttggctgagccaggctacctgtaacactatgtggttgaccgcgtaactagcgcttctctgaacttttttcgtatggttcagtagttcaagccagacagctaatttgtaacttctccaataattcttttgttgtaggtaaacttttgagagtaaacattatggagatctgtaaaacagaaactgatggttataaactttttaaacttagacttgagaacacattgcttataatttagtttaaccttgtattatatgttctcatctaagatccagaatatttgggggctattagagcgatgtttaatttctgtctttc

SEQ ID NO: 68258 - DNA, 1167 bp, Zea Mays
ggcatgcgaattgggtccccaaaatcttaaatttctccgaattgtgaggcataaagcaatttttgtcgaaaagaggaatgatgaagcacagaggggaaaaaatcgatgcgtgagtagtagccagttttactgataactgaggattcacccacttacaggtccattcatgactactccttaggtactactaactctatcaaggtttttcaagagtttatctcatctacttctacatgaggtcttgagggtgctgatcaggtcctggtatacaagatagatcattaatttaacacaagccttaagcaagaattagaagcaggaaaattacatgaaagcacacttaggcactgataaagacatgagttaaaatggggctgttggatggctgctcaatgctccggattgaaatcggtgaagaggtaagatgggttgatggcttgctctgtagctttctaaatggaagtctgagtgactgaatagagctagagcaaactgttcagaatactgacacaaatgctaacttctggcattgaactagggtcgaacataacagctggttgccatataaatatttttgaatcatgtgtcaggattatcaaacaccggttgagatggtttggacatgtctaacggagatctctagaggcactagtacgtagtgggatcctaatgcgtgatagcaatgagaagagaggtagggaaggtcgaagttgacatgagaagatgctttaaaggagacttaaagtaatggaatatacttaaagatttagccttgaataggagtgcatgggaaacagctatccatgtgcttgaaccttgacttgtggtttctactgggtttcaactttagcttacccgacttgcttgggactaaaagactttattgttgttgttttatgtttcaggattgttgatttagtggttgtaaaatggcaaagcttggtagtcatatatcactcatacaatatggattttgtaggaaagagcaaggtgatgttggagccttcggcactgggtctgccctcctgtgttgccctgcatatgtgagaaatatgcttaatgtttgatattttgttgttcaactgtgcaaggactgtagtcctatttttactcatcagggcaccacttcttgatcccatgctatctctacatagatgttcaactgtg

SEQ ID NO: 68259 - DNA, 215 bp, Zea Mays
taggggtgtcaaatctcgaaaggcatgcaaattgagaccaaatatcaaaatctctccacaattcgggactatgtgtgcaagttactatatttgagagtcggtggactttggcatattttcctcttcattcagagactcatgtttcttcaggaaacaataactcgtgtttataatgtcgtgcaatacgaaacaggttccaggtcaagggaactcga

SEQ ID NO: 68260 - DNA, 2180 bp, Zea Mays
ctggaccccgactgccgagctacctctgcgacaggacccggcggtggacgacgacctgccgcaggtggtggtccaggagaagcagcatggcggcggtgctgccgctcggactgcgatggcgacggcgacggcgacgcgggacgggtcggtgggttggagcggcaagccgtgccgcagagacaggtccgggggatggttcgccggcttcctcatgctcgcgaaccaggcgctggtgacgttcgcggtcaactgcgtggggaccaacctggtgacgttcatgtcggtggtcatgaggctggacaacgccgacgccgccaacaaggccaacaactgggccggcaccacctacgtcttctccatcgtcggggccctcgtcagcgactcctactggggaagatacaaggcctgcaccatcttccagctcatcttcctcgcggggctggtggagctggccgtagcctgccacgtgttcctcgacaagtcctgccacttcggcggcggcggcggcgggcggcaggagcactgcaggccgccgacgacggcgcagtccctcgtcttctacgtctccatctaccagatcgcgctcgggaacggcgcgtaccagccggcggtcaccacgttcggcgccgaccagttcgacgagaccgacgcgcgggagcgccggtccaaggccgccttcttcggatacttcttcgtcgccaacaacctcggcggcgtcctcgccgtcaccgcgctcgcctacatggaggacgagggccagtgggtcctggccttctggatcgccaccgccgcggcgctgctcggcttcctcctcttcgccgtcgggaccatcaggtacaggcacttccttcccagcggcaacgctgttgtcagcgtctgccaggtggtcgtcgctgccgtcaggaaccggcgcgtcagagctacggttcgagcgcaggatatgtacgaccccgataccgatggagatcgcggcaagaagggggtcaggaagatggtgcacacaccagagtacaggtaggtgtctggacaaggcagcggtgatcaaagatccagcgtctgcgttccgagcaccggcaggtcaaccacagggccattcctcctccaagcccaacccatggaggctctgcacactgacccaagtggaagaactgaagtgcatcctgaggctagtcccgatctggctctgcagcatcctctactccacctcctactcgcagatgtcgtcggtgttcatcgagcaggcgcagaccatggacgactccctgtcgaagctgacgatccctcccgccggcatggacgtcttcgagatactgggcgtcacggccttcgtgttcatctaccgcttctgcatcgtcagggtcatggccaaaatatcgcacgagccgacggagctccagaggatgggcaccgggctcgtgatctcggccgcggccatggtcgcgtccggcgtggtggagcagcagaggctggcgcgcgccacggccggcgtcgacgcgtccagctctctcagcatcctctggcagatcccgcagtacctgctgatcggagcgtccgaggtgttcatgtacgtcaccatgacagagttcttcaacgaccagctcccggaaggcctgaggagcctcgggagcgccatgagcgtggcctccatgtcggccgggagcttcgcgagcagcctcctcgtcactctggtgatggccatcacctgtagaggcggccggcctgggtggatacctcaggatctcaacaagggccatgtggactggttcttctacctcatagcagcccttaacgccgtggacctgctggcgtttgtggtgtttgccaagaggtatagaccggctccggtgatcatacatggagaagatgaaaccggtggtgtcgagaaggcccaggatgcggaggaatgcatttgaatgcatatctcaaacattccatgtgtgggcctgtttagatatactccttatacatgtgttattatagcgtggattgatatggaatttaaaactaaattccataccaatccattctaaggcacatagatgaagctagatacataagcattcaaacgaacctttaataatctctcacaagccatattgttggaatattggatttgactgcattcaaacatatctctactgtcatttgctagggcggtagtgctttattttttctggcag

SEQ ID NO: 68261 - DNA, 958 bp, Zea Mays
catattttcattataaacctatttggagacataaatgtcaatactattttctacagaactagtcaaacttgagtctgattgactccaaaaaacaagacgagatttacattcttttaggaatggagggagtaataacaggactgccaaagaaactatggtttccgaagatgaaaacccaatggcagacaatggcggcagaaacaatggcatctgatcaaacaaaagacatgcacaaacaaatcttggaaacaatcaaacaaaacaatgtaacaaacaatagctgcaaccttgcatattttgctatcagtattgtttgtttcgactccaggatattttctggtcagcaagttaccaatctccatttctatcatcacatactgatgcaaacttcaactccagtcatctcatcttgtacttgggaagaagaaaacttcaccaagtgcagactaagatgacaccaggaggagcacatcattatacgatttggctaactttcatcattccagtttgaaaataaacataaaaaggaaaattgaacacggcaacataaaaaatatgacgaatccttccttcacaagaaaaaaggcaccattcttgatggtaaaagataagggcactcaataacttaacagggataatatttgaacaggaaaaaaagaactaagtttctacagtaactctatgcccaagataaaagaactagaaacatcaagacgacccaattcttcttctcttaacaagttaaatgcaggagcatcacgggctcataattattggaagttagcaaattttcagattgaggcctagctaagtacacgtatttttctcacaacacacaggtgtaccaatatattaaaaagagaagctaactgcacagttacctgtcttgaagtttcatttaaattttttgaatcaacatgctgaaccagagatgttttgacatatctggagaaaaatc

SEQ ID NO: 68262 - DNA, 1479 bp, Zea Mays
gtcacatctcccctcgggcctcgccgcctcgccgcctcgcaccttttactgaaggtttgacctcacctgcccctcctctcctctctccgccccctgctcctccgagtgaccgtacgccgtagctcgacccggccgatccccgaaaccctagacgcgccgctggtcgccggaggccgggccatggacgtcggcgcggagctgcgcgaggcccaccgcctgacgggccacgccgaccgcgtgtgggcgctcgcttggaaccccgccccgggccccggctccagccccgttctcgcctcctgcagcggcgacaagaccgtccggatctggaagcgcgcccctgacggcgcctggcagtgctcggatgtgctggaagacacgcacaaccgcacggtgaggtcctgcgcctggtcccccaacgggaagctgctcgccaccgcgagcttcgacgccaccacggcagtgtgggagtacaacggcgccgactttgagtgcgtcgccacgctggaggggcacgacaacgaggtgaagagcgtgtcatggagcccgtctgggtcactgctcgccacatgcagccgggacaagatggtgtggatatgggaggtgctgccagggaacgagttcgagtgtgtctcggtgctgccgggccacacgcaggacgtcaagatggtgcagtggcacccaattcttgacattttggtctccgtcagctatgataattccatcagggtctgggctggtgatggagacgatgagtggcactgtgtgcagacactaactgaagccaataactgtggtcattcatcaacagtatgggcattatcctttaaccttaaaggtgacaggatggtcacatgcagtgatgaccaaacgttgaaaatatgggacacaagtgctgatttgtctcaaccaaaaactggcgaaggtcatgactcttgcgaggatattatagctagtggtgcgggcgatgatgcaatctgcttttttactgaggagaagggtagcatggttgaaaagccctcatacagattaatattaaagaaagagaaggcacatgtcatggacataaactgtgtgcgatggtgtcctcaggacccaaggttattggcatctgcgagcgacgacggcacggtgaaattgtgggaactgagagggaatgtgcttgattgagttctgttgtaatcactgtagcgtgcgttgagataatagagcagattaggtatcacctttggatttctgttctactgagctcggctctctgtagttcatacttgtatatcgagagggtattttatgatggtcttttacaagatttaccgtgcaaactatgaaccgtgccatcctctcagagacatggtattgatcgtgtatacattatggaagggacagccgaacatgtccaaccattttttaaagttcaattcatgtacaatgatgagtgatgaataatgaataaagatttgcagcttcttgtatgcggaa

SEQ ID NO: 68263 - DNA, 6970 bp, Zea Mays
ccgcctcgcaccttttactgaaggtctgggctggtgatggagacgatgagtggcactgtgtgcagacactaactgaagccaataactgtggtcattcatcaacagtatgggcattatcctttaaccttaaaggtgacaggatggtcacatgcagtgatgaccaaacgttgaaaatatgggacacaagtgctgatttgtctcaaccaaaaactggcgaaggtcatgactcttggtaagaagttagttttcttttaaggattgtgttctctgcatgaatttggtaacccaggagtagcataacttagcccagaagcttaggctgtagaagaacctgtagctcaccagccctcagaacttctactttacagtactactatgtatcaaaaatattaatgtccttataccattttttattaatgctgattttgtgcatcaaaatttcacattttctgtttatcttgtcctgttgcaaatgcagaactaactagggtgtagctttgctttgcagagaagtgtttctcttatattgtcctttcaactcggctaaagttgacaagctgagaaatacttcccaccatgatacacttaatggctatggattgacttaagcattaactcttgtagttctcttgatggtgtatagtatgttttaggtaatcttgacaattaattcctatatattaaaccgctgtggaacaacctgcagcgaagtcatccacgtcgtctaaattatttacattgttccgttacgaaacgtactctgcacacttcccttgcacgtgggtctggaactttcccttcaaagacatccgtgccaggctaaggaggataaggcactaggaggataaggcgaggcgccacagggcagccatcgtgcgctctcgccgtcccgcgcagatccagcttccttgcgcggacgcccgtggttgctgctgtcatgctgccggatcccggcctagggttgcagctgtttcagatccagcgtcaccaggcgggaatcagacattgatgccaaagcgcaagtgtatagcccgaacatcaatacctttgatgtgaagctggggacctttgtgccgtcttaaaatgtcatcatctaaatgacgatatgttcggaagagatttcgagcagagcctgattccgtgcgggatctgctcaaggagccatattttgcagcccctgtttgtatcagtcggtcacctacctacaaaaccccggcctgaaccgtgtacagtgttatctgaagctgcagtgtttaagcagtgtgaagctattttgaagaagattatggaaatgtagtaatatattcaatgttccggttgatgttgagaagctgcaaattcctgattagtttgacattgtcaagatcccaatggatcttggtaacagtccacaagaagctccaatctggctcatgcacaagtccatctgattttgctgcggatgccaggctgacctttaacaacgctatggcttataatccttgggggcatgctgtgcacgacatgaccattcagttgaacaagatgtttgagagtcgatggaggccaaatgagaagaaactagcttttgctgccactgagaaatttgaagaggaagacaatacctcctatggactgcagtgagacatggagtgtgtatagcatgaaaaaccaaacatgacagttgaagagacaagcatttgagaactgtttggtttctatatcccattagttatctgctgcaacaatgcaacgacagcaatactgtcagtgactacatgctatttgagttgaagaaacatttgttattttctattattatatatattatgacatattaaacagtgcagcaacctcatcctaattatttaatactgtatttggtatgaaatgtcctattctgtttggacacttcactggcatgacacatgcgtctgaacatttctcgttggagatacgagatatatatgcgcgcactagcgcgcgctaatgactatttattattaagtgatatgttgtgggcgcctaggactgcgcagtggtgatcgcagcaaggcttgggattgtggaaggtatctcagtgggtagggggatcggccagaggaggagctggttctgtcagctggcccaaggtgcgccaggacgaccaaggaagctctaccggccaggtaaaacttcttttgataaccctaatacaaactacatcaactcctttatagattaggcaccactttattctcaaccacctctaacaactgagagctaatctctccactaaaataggagggctaactgactccctctttatctcttcttatcttctaaacaaatagcccagttaggacttatcctttgtggcgcctggcatactgccggcccacaaaggtgtctacaacatttccccccctcgccgacaaagagctcgtcctcgagcgtcatggtcgggtatctaagcttgaagtcttccagctgctcccaagaagtatccgtctctgctcggcctgtccacttgatcagaacttcccacacccccaattcagccttgcatggaggactttttctggtgtagggatgactctgccgatgaggagctcgggcagtggtataacttgggttggagcctcccctatgaatttcttaagtagagaaatgtggaacacatcatgtattctggccctaggaggaagctggagcttgtaagagacagtgcccaccctcgatagcacttgataaggcccaaagaactttgagccaagcttgtgaggtgtagcagaagtgacaccaactgttgtgcgctgctgtaagcgtagccatacccaatcgccctcatggaactccacttcacgtcggtgcttgtcctggtagcttttcattgtaacctgtgacatcaatcggtcacgaatatccgccaagaattcatcgcgagcatgtagttgtttgtcaatatcagccacctgtgatgttcctggatggtagggcagaagagcaggaggttctcggccatataccaccttgaatggagagcatcgaagagcagtttggaaggaagtgttgtagcagaattcagcccatggaagccatttaagccactctcttggtctatcccctgccaggcaccgaagatacatggtgataattcgattgaccacttccgactgtccatcagattgggggtggaatgctaaactcatgggcaacttgactcctgccagctggaacaattctgaccagaatgtgctagtaaatattgtatctctatcactgacaatggagtaaggcaacccatggagacggacaatgttatcaaagaaggcctttgctaccgatgctgctgtgtaagggtgtcccagagcaataaagtgtgcgaacttggagaaacaatcatcaaccgtgagaatcaccgacttgtcgcccacttttgggaacccctcaatgaagtacatagaaatatcactccatacttctgaaggcactgatagaggttgcaggagaccaccgggatggagatgttcagttttattgcgctggcagactgaacaacctttgatgaactccttaactctctgtaatgcatgaggattatcgaatgacgaccggaacctgtgaattgtcttttggattccttcatgtcctgtgtcatgggcactggcaatagtatcggccaaagagtagaggcatatggcacatagactttaccttcgaaaaggagcaacccatccaaatctgtccaacccgatgaaacagtgtcggcagcaagctgctggcgcacatcttggatttgtgggtccgttgcagcctcggctcgcaaactgtcaaacagctcaaaaggtgtagagatggtgttgagcgccatgcctggctcgacacgacgtgagagagcatcaactgcgccattgagtttgccaggcttgtactccaccacaaaatcatatccgaatactttgctcacccatgtatgttggggaattgtggtcagtcgctgatctaacagatatttaaggctgtagtgatcggtgcggaccagaaactggcgcccccagatataaggcctccagtgacggactgctttcactaacccaatcagttctcgttcatatgccgacaacttttgatgctgaggtgctactgccctgctgaagaaagcaatagctccacctccctggtgtaacacgacaccaaaaccagaccctgatgcatcacaatcaacgatgaaactgcggtcgaagtcgggcatatgtagtaatggtgcagacattaaggcttgtttgagcagattaaaaggctcctctgcttcttctgtccatctgaatgcctctcgttttaacagtgttgtcaagggggctgctacaatgccataaccagcgatgaatttccgatagtacccggttagacccaaaaatcctctgagcaccggatggagcgcggtggtggccatgactccactgcttcaaccttggaagggtccatcacaactcccttatcagagatgatgtggcctaagtaacccacctgtgtttcgccaaaggaacacttggtgcgcttgagggctaacttctgctctcttaacaattggaatacatgccgcatatgttgaagatgctcggtccaggaagagctatagattaatatgtcatcgaagaataccagtacaaacttacggatgaacggcttgagtacaccattcataagcacctggaatgtcgatggtgcattagtcaagccaaaaggcatgactaagaactcgtagtggccatgggagagattctgatatttgccatcagcaagaaacaggtttgtaaaattgccatcaggcccacatttcatagacccagctggacccataattcatagacacactggtaattataacaagaagacaacattgtgagtggcaaaaatccaattatctctggccatggtgcgtgcggaaggtcgtcttatcgatgtcctctgggtgcatgcgcacctgatggtagcctctacgcaagtcaagcttggtgaagaaccgggctccctgaagctcatccaagagttcatccactactaggataggaaatttgtccttgaccgtcttcgtgctgagctcacggtagtcaatgcagaagcgccatgtgttgtctgatttcttcacaagcagcactggtgatgagaacgccgaagtacactcccggatgataccttgggacatcatctggtcacactgtcattcaatctcatctttgagcaactgagggtagcggtacggtcgtaccgccactggtactgtccctggcagaagacggatgcgatgatcatggcggcgaggtggaggaagtccctggggctcgacgaagaggtcttcaaaggatagcagcaaggtatcgaacaagttgtccacgcaccatgtgtccgtggcgccaaaaagacatcatcaacttctcaaagttgcagatgaaaggacccaaagaatgcaaccattccaccccgagcaccacatcaaagccatccaggggaagagtgtagcaggttgtggtaaaggtctcttcgccgacagtgaatggggtctgagaacagacgtccccactcaacaccttctcaccatttgcaaccttgacaggcagttcagctgttggagtcacatgcagtcccagtcttggcacaatagcatcgcggatgaatgtatgggtggatcccgaatccacaagagcaatgagggccacaccattgatagactttcaatttcagtgtgtcggcgatgtcaatcccagtgagagcatgaagtgatatgcccagttcctctgccagtgcattagttgtcctggtatctttgccatccaattccaacagaaaaaccccgcaagcagggcacttgtgatcgactgtatatttttcagagcagtggtagcattcactgctggcccgtttggcggcaacctcctccgaggagagcctgcgcaaacggggtttgctggtagccgataacgagggctttgttgcgtttgcagatgtcgttggttttgatgtagcagatggcgtccttacggcattcataggcgtgtgccaggtgcatggctcgctgcagtgtagttggagtcagcggttcaacatcagtccgaagcggttcacccaagcctacggtaaacatctgagtttgctggagctgcgtcatatcctcgcaacgacagagaatggacagaaactgacgttgatagtcttcgacagtgctggtgcgccgaaggtccttgagatcagccatatcgttggaccgtagaggtggtccaaaccgcatacgggtgaactcaacgaagcgggaccaagtgagcacgtcgcccgtgtcccgctccagagtgtagaaccactctgccgccacaccgtccaaatggagtgatgcctgccacaccttctcatcggatggagtcctcatgcccctgaagtaagtctcacatttattgatccatggcagggggtcggactcaccatcgtagtggggaaaggagacattgggtcttcgatagccaccatcgtcgacgcggtcacgaggagcagatcttgtgctagccatgaccccgacaggcgccgtcggactcaccatcgtagcgtgatccgctgtccatgcagttcgaggcgtgagttaatggtggagagctgcgccaatatttgatccaatttggctgagtcgaaggaggtcttcgcaggatcgtgatcgacgccggacatgttggtcgatgcgttggaggaatctgataccaaattgatatgtcgtgagcgcataggactgcgcagtggtgatcgcagtaaggcttgggactgtggaagggatctcagtgggtagggggatcggccagaggaggagctggttccatcagctggcccaaggtgcgccaggacgaccaaggacttttgataaccctaatacaaactacagcagctcctttatagattaggcgccactttattctcaaccacctctaacaactgagagctaatctctccactaaaataggagggctaa

SEQ ID NO: 68264 - DNA, 7124 bp, Zea Mays
gtcacatctcccctcgggcctcgccgcctcgccgcctcgcaccttttactgaaggtttgacctcacctgcccctcctctcctctctccgccccctgctcctccgagtgaccgtacgccgtagctcgacccggccgatccccgaaaccctagacgcgccgctggtcgccggaggccgggccatggacgtcggcgcggagctgcgcgaggcccaccgcctgacgggccacgccgaccgcgtgtgggcgctcgcttggaaccccgccccgggccccggctccagccccgttctcgcctcctgcagcggcgacaagaccgtccggatctggaagcgcgcccctgacggcgcctggcagtgctcggatgtgctggaagacacgcacaaccgcacggtgaggtcctgcgcctggtcccccaacgggaagctgctcgccaccgcgagcttcgacgccaccacggcagtgtgggagtacaacggcgccgactttgagtgcgtcgccacgctggaggggcacgacaacgaggtgaagagcgtgtcatggagcccgtctgggtcactgctcgccacatgcagccgggacaagatggtgtggatatgggaggtgctgccagggaacgagttcgagtgtgtctcggtgctgccgggccacacgcaggacgtcaagatggtgcagtggcacccaattcttgacattttggtctccgtcagctatgataattccatcagggtctgggctggtgatggagacgatgagtggcactgtgtgcagacactaactgaagccaataactgtggtcattcatcaacagtatgggcattatcctttaaccttaaaggtgacaggatggtcacatgcagtgatgaccaaacgttgaaaatatgggacacaagtgctgatttgtctcaaccaaaaactggcgaaggtcatgactcttgagaagtgtttctcttatattgtcctttcaactcggctaaagttgacaagctgagaaatacttcccaccatgatacacttaatggctatggattgacttaagcattaactcttgtagttctcttgatggtgtatagtatgttttaggtaatcttgacaattaattcctatatattaaaccgctgtggaacaacctgcagcgaagtcatccacgtcgtctaaattatttacattgttccgttacgaaacgtactctgcacacttcccttgcacgtgggtctggaactttcccttcaaagacatccgtgccaggctaaggaggataaggcactaggaggataaggcgaggcgccacagggcagccatcgtgcgctctcgccgtcccgcgcagatccagcttccttgcgcggacgcccgtggttgctgctgtcatgctgccggatcccggcctagggttgcagctgtttcagatccagcgtcaccaggcgggaatcagacattgatgccaaagcgcaagtgtatagcccgaacatcaatacctttgatgtgaagctggggacctttgtgccgtcttaaaatgtcatcatctaaatgacgatatgttcggaagagatttcgagcagagcctgattccgtgcgggatctgctcaaggagccatattttgcagcccctgtttgtatcagtcggtcacctacctacaaaaccccggcctgaaccgtgtacagtgttatctgaagctgcagtgtttaagcagtgtgaagctattttgaagaagattatggaaatgtagtaatatattcaatgttccggttgatgttgagaagctgcaaattcctgattagtttgacattgtcaagatcccaatggatcttggtaacagtccacaagaagctccaatctggctcatgcacaagtccatctgattttgctgcggatgccaggctgacctttaacaacgctatggcttataatccttgggggcatgctgtgcacgacatgaccattcagttgaacaagatgtttgagagtcgatggaggccaaatgagaagaaactagcttttgctgccactgagaaatttgaagaggaagacaatacctcctatggactgcagtgagacatggagtgtgtatagcatgaaaaaccaaacatgacagttgaagagacaagcatttgagaactgtttggtttctatatcccattagttatctgctgcaacaatgcaacgacagcaatacttggtgatcgcagcaaggcttgggattgtggaaggtatctcagtgggtagggggatcggccagaggaggagctggttctgtcagctggcccaaggtgcgccaggacgaccaaggaagctctaccggccaggtaaaacttcttttgataaccctaatacaaactacatcaactcctttatagattaggcaccactttattctcaaccacctctaacaactgagagctaatctctccactaaaataggagggctaactgactccctctttatctcttcttatcttctaaacaaatagcccagttaggacttatcctttgtggcgcctggcatactgccggcccacaaaggtgtctacaacatttccccccctcgccgacaaagagctcgtcctcgagcgtcatggtcgggtatctaagcttgaagtcttccagctgctcccaagaagtatccgtctctgctcggcctgtccacttgatcagaacttcccacacccccaattcagccttgcatggaggactttttctggtgtagggatgactctgccgatgaggagctcgggcagtggtataacttgggttggagcctcccctatgaatttcttaagtagagaaatgtggaacacatcatgtattctggccctaggaggaagctggagcttgtaagagacagtgcccaccctcgatagcacttgataaggcccaaagaactttgagccaagcttgtgaggtgtagcagaagtgacaccaactgttgtgcgctgctgtaagcgtagccatacccaatcgccctcatggaactccacttcacgtcggtgcttgtcctggtagcttttcattgtaacctgtgacatcaatcggtcacgaatatccgccaagaattcatcgcgagcatgtagttgtttgtcaatatcagccacctgtgatgttcctggatggtagggcagaagagcaggaggttctcggccatataccaccttgaatggagagcatcgaagagcagtttggaaggaagtgttgtagcagaattcagcccatggaagccatttaagccactctcttggtctatcccctgccaggcaccgaagatacatggtgataattcgattgaccacttccgactgtccatcagattgggggtggaatgctaaactcatgggcaacttgactcctgccagctggaacaattctgaccagaatgtgctagtaaatattgtatctctatcactgacaatggagtaaggcaacccatggagacggacaatgttatcaaagaaggcctttgctaccgatgctgctgtgtaagggtgtcccagagcaataaagtgtgcgaacttggagaaacaatcatcaaccgtgagaatcaccgacttgtcgcccacttttgggaacccctcaatgaagtacatagaaatatcactccatacttctgaaggcactgatagaggttgcaggagaccaccgggatggagatgttcagttttattgcgctggcagactgaacaacctttgatgaactccttaactctctgtaatgcatgaggattatcgaatgacgaccggaacctgtgaattgtcttttggattccttcatgtcctgtgtcatgggcactggcaatagtatcggccaaagagtagaggcatatggcacatagactttaccttcgaaaaggagcaacccatccaaatctgtccaacccgatgaaacagtgtcggcagcaagctgctggcgcacatcttggatttgtgggtccgttgcagcctcggctcgcaaactgtcaaacagctcaaaaggtgtagagatggtgttgagcgccatgcctggctcgacacgacgtgagagagcatcaactgcgccattgagtttgccaggcttgtactccaccacaaaatcatatccgaatactttgctcacccatgtatgttggggaattgtggtcagtcgctgatctaacagatatttaaggctgtagtgatcggtgcggaccagaaactggcgcccccagatataaggcctccagtgacggactgctttcactaacccaatcagttctcgttcatatgccgacaacttttgatgctgaggtgctactgccctgctgaagaaagcaatagctccacctccctggtgtaacacgacaccaaaaccagaccctgatgcatcacaatcaacgatgaaactgcggtcgaagtcgggcatatgtagtaatggtgcagacattaaggcttgtttgagcagattaaaaggctcctctgcttcttctgtccatctgaatgcctctcgttttaacagtgttgtcaagggggctgctacaatgccataaccagcgatgaatttccgatagtacccggttagacccaaaaatcctctgagcaccggatggagcgcggtggtggccatgactccactgcttcaaccttggaagggtccatcacaactcccttatcagagatgatgtggcctaagtaacccacctgtgtttcgccaaaggaacacttggtgcgcttgagggctaacttctgctctcttaacaattggaatacatgccgcatatgttgaagatgctcggtccaggaagagctatagattaatatgtcatcgaagaataccagtacaaacttacggatgaacggcttgagtacaccattcataagcacctggaatgtcgatggtgcattagtcaagccaaaaggcatgactaagaactcgtagtggccatgggagagattctgatatttgccatcagcaagaaacaggtttgtaaaattgccatcaggcccacatttcatagacccagctggacccataattcatagacacactggtaattataacaagaagacaacattgtgagtggcaaaaatccaattatctctggccatggtgcgtgcggaaggtcgtcttatcgatgtcctctgggtgcatgcgcacctgatggtagcctctacgcaagtcaagcttggtgaagaaccgggctccctgaagctcatccaagagttcatccactactaggataggaaatttgtccttgaccgtcttcgtgctgagctcacggtagtcaatgcagaagcgccatgtgttgtctgatttcttcacaagcagcactggtgatgagaacgccgaagtacactcccggatgataccttgggacatcatctggtcacactgtcattcaatctcatctttgagcaactgagggtagcggtacggtcgtaccgccactggtactgtccctggcagaagacggatgcgatgatcatggcggcgaggtggaggaagtccctggggctcgacgaagaggtcttcaaaggatagcagcaaggtatcgaacaagttgtccacgcaccatgtgtccgtggcgccaaaaagacatcatcaacttctcaaagttgcagatgaaaggacccaaagaatgcaaccattccaccccgagcaccacatcaaagccatccaggggaagagtgtagcaggttgtggtaaaggtctcttcgccgacagtgaatggggtctgagaacagacgtccccactcaacaccttctcaccatttgcaaccttgacaggcagttcagctgttggagtcacatgcagtcccagtcttggcacaatagcatcgcggatgaatgtatgggtggatcccgaatccacaagagcaatgagggccacaccattgatagactttcaatttcagtgtgtcggcgatgtcaatcccagtgagagcatgaagtgatatgcccagttcctctgccagtgcattagttgtcctggtatctttgccatccaattccaacagaaaaaccccgcaagcagggcacttgtgatcgactgtatatttttcagagcagtggtagcattcactgctggcccgtttggcggcaacctcctccgaggagagcctgcgcaaacggggtttgctggtagccgataacgagggctttgttgcgtttgcagatgtcgttggttttgatgtagcagatggcgtccttacggcattcataggcgtgtgccaggtgcatggctcgctgcagtgtagttggagtcagcggttcaacatcagtccgaagcggttcacccaagcctacggtaaacatctgagtttgctggagctgcgtcatatcctcgcaacgacagagaatggacagaaactgacgttgatagtcttcgacagtgctggtgcgccgaaggtccttgagatcagccatatcgttggaccgtagaggtggtccaaaccgcatacgggtgaactcaacgaagcgggaccaagtgagcacgtcgcccgtgtcccgctccagagtgtagaaccactctgccgccacaccgtccaaatggagtgatgcctgccacaccttctcatcggatggagtcctcatgcccctgaagtaagtctcacatttattgatccatggcagggggtcggactcaccatcgtagtggggaaaggagacattgggtcttcgatagccaccatcgtcgacgcggtcacgaggagcagatcttgtgctagccatgaccccgacaggcgccgtcggactcaccatcgtagcgtgatccgctgtccatgcagttcgaggcgtgagttaatggtggagagctgcgccaatatttgatccaatttggctgagtcgaaggaggtcttcgcaggatcgtgatcgacgccggacatgttggtcgatgcgttggaggaatctgataccaaattgatatgtcgtgagcgcataggactgcgcagtggtgatcgcagtaaggcttgggactgtggaagggatctcagtgggtagggggatcggccagaggaggagctggttccatcagctggcccaaggtgcgccaggacgaccaaggacttttgataaccctaatacaaactacagcagctcctttatagattaggcgccactttattctcaaccacctctaacaactgagagctaatctctccactaaaataggagggctaa

SEQ ID NO: 68265 - DNA, 1174 bp, Zea Mays
gtcacatctcccctcgggcctcgccgcctcgccgcctcgcaccttttactgaaggtttgacctcacctgcccctcctctcctctctccgccccctgctcctccgagtgaccgtacgccgtagctcgacccggccgatccccgaaaccctagacgcgccgctggtcgccggaggccgggccatggacgtcggcgcggagctgcgcgaggcccaccgcctgacgggccacgccgaccgcgtgtgggcgctcgcttggaaccccgccccgggccccggctccagccccgttctcgcctcctgcagcggcgacaagaccgtccggatctggaagcgcgcccctgacggcgcctggcagtgctcggatgtgctggaagacacgcacaaccgcacggtgaggtcctgcgcctggtcccccaacgggaagctgctcgccaccgcgagcttcgacgccaccacggcagtgtgggagtacaacggcgccgactttgagtgcgtcgccacgctggaggggcacgacaacgaggtgaagagcgtgtcatggagcccgtctgggtcactgctcgccacatgcagccgggacaagatggtgtggatatgggaggtgctgccagggaacgagttcgagtgtgtctcggtgctgccgggccacacgcaggacgtcaagatggtgcagtggcacccaattcttgacattttggtctccgtcagctatgataattccatcagggtctgggctggtgatggagacgatgagtggcactgtgtgcagacactaactgaagccaataactgtggtcattcatcaacagtatgggcattatcctttaaccttaaaggtgacaggatggtcacatgcagtgatgaccaaacgttgaaaatatgggacacaagtgctgatttgtctcaaccaaaaactggcgaaggtcatgactcttggactgcgcagtggtgatcgcagtaaggcttgggactgtggaagggatctcagtgggtagggggatcggccagaggaggagctggttccatcagctggcccaaggtgcgccaggacgaccaaggacttttgataaccctaatacaaactacagcagctcctttatagattaggcgccactttattctcaaccacctctaacaactgagagctaatctctccactaaaataggagggctaa

SEQ ID NO: 68266 - DNA, 614 bp, Zea Mays
taataaggcaagagttaaacatgttgattatattatcccaggagaaaaatatccaacagctcaaccagcttatcgagagccttcagcgccagctactgcactgccgtggtagcaataacactgttcatgctgctgccgccgttgccacagaagcgagtgaagtcgagggacatgaggtcattgaagatgagaatagacgatgatccttggcgtacatgcttctacgatgccggtacagctgctaaagagcagaacagtcgtctgaatgcttgaattcactgtattgtatatttgatactccgccgactagtggattcccccgaccctgtaagcctgtagagaattgtaattttttataatgtgatttatttaggtcgcggctactaattcacctggaaagttaccttgccattctttcttctgatgatggcgctccatcgatgcttgattgctccctcaatggctgaattgtatgcagtctctgatttttgtatttgacctgtgaaggcgttcagatgaaaagttggctgatgaactgttcagttcaggtatgcagccagcattcactggcatgccgccgcctcatcgtgctcctcaaaacttgtggccccgag

SEQ ID NO: 68267 - DNA, 1494 bp, Zea Mays
cacatctctttaacccattgactgacctcgtccccaacccaaccctggtgaagctgtgcgtaggatcaatcaatctcaatctcaccttgggtagagaccgcgcgcagccccagccccagcctcatggccgacggggtgttctataaatagagttgcttgtcccctaccttcggacgcacaacacaagagctactactacagctcctcatctcaagtgtgtagacgagacagagagacactgagagagcgccatggccagcctccaagtcactcctacttcggcgttcactgagtggaacgagctgaagttcgaaggcctgtacctgttccacacgcccctgggctcaggcgccaaccaagctcgggtcatagacaacaaggcgccgattggcatcggtgccaccgtagttaacaactggacagtgtatgacgggccagggccgaacgcaaagctggttgcccgtgcacagggcttgcatatccaagccggcaactgggtcaactccttcagcctagtgttcgtggatcaaaggttcagtgggtccacgcttgaagtgaccgggatagtagttgaatccggggagtgggctattgttgggggcaccggtcagtttgccatggcaaacggtgtcatcttcaagaagttccatgagcagagaagcgaagggaacatcatacaactcaccatccatgctttctgtccggtgctcggaccgagaaagcgctcggccgcaaaagttggaccgtggggtgggagcggcgggtctccggtggacatcacggcagagccccagcgtctgaagagcatcaccgttgctactggcatcgccgtgacctcgattgccttctcctacgtcgactccgccggccaaacccaatctgctggtcgctggggcggttccggtggagaaactgagccggtgatccagctcggcgactccgaggtgctcacggagctgtccgggacgatcggcaacgtcgacggccacaccgtcataacctccatcaagttcgtcacaagcctcaagacctacggccctttcggagcatggggggacgggagtgacactccgttcgcgatccccgtgcagcaagggagtgccatcgttggcttcttcgcacgagctggggtctacctcgacgcccttggcgtttacgatgcaaacatacttgatgtgtttgtctctagggtgcggcaaacatttgatacaagggaagaagcctacctcttttaccttgactatgcaaagttggctggttttagtgtcaggacaaagaggtgtaattgcaactgctggtgtggtgtgattgcaaccccgcattaggtgtgattgcaactgctgtataattctacccaaatatctgttaaaaaatgtaaacaaaatgattgcaactgctggtgtgttgtaattgcaactactggtgtggtgtggatgcaactgctgagttgctctgatgtgattgcaagtactgaataactctgaaaattttgtt

SEQ ID NO: 68268 - DNA, 1231 bp, Zea Mays
cacatctctttaacccattgactgacctcgtccccaacccaaccctggtgaagctgtgcgtaggatcaatcaatctcaatctcaccttgggtagagaccgcgcgcagccccagccccagcctcatggccgacggggtgttctataaatagagttgcttgtcccctaccttcggacgcacaacacaagagctactactacagctcctcatctcaagtgtgtagacgagacagagagacactgagagagcgccatggccagcctccaagtcactcctacttcggcgttcactgagtggaacgagctgaagttcgaaggcctgtacctgttccacacgcccctgggctcaggcgccaaccaagctcgggtcatagacaacaaggcgccgattggcatcggtgccaccgtagttaacaactggacagtgtatgacgggccagggccgaacgcaaagctggttgcccgtgcacagggcttgcatatccaagccggcaactgggtcaactccttcagcctagtgttcgtggatcaaaggttcagtgggtccacgcttgaagtgaccgggatagtagttgaatccggggagtgggctattgttgggggcaccgagccccagcgtctgaagagcatcaccgttgctactggcatcgccgtgacctcgattgccttctcctacgtcgactccgccggccaaacccaatctgctggtcgctggggcggttccggtggagaaactgagccggtgatccagctcggcgactccgaggtgctcacggagctgtccgggacgatcggcaacgtcgacggccacaccgtcataacctccatcaagttcgtcacaagcctcaagacctacggccctttcggagcatggggggacgggagtgacactccgttcgcgatccccgtgcagcaagggagtgccatcgttggcttcttcgcacgagctggggtctacctcgacgcccttggcgtttacgtgcgatccctgtgatgagactctcacgagaggggcagctagctgctctgctagctccaccggctttcatcgcgtcaccctccgttttatttcctactgctacttgttgtgtcttgaataatttcgataaataaaggactccgccagagattggcacttgaatcgatccataaatgcttgtgtgaattagtgcttcaagtttccaactccattaattgtccattagatttacaacactgtgtccaaccgagcta

SEQ ID NO: 68269 - DNA, 1018 bp, Zea Mays
caacttcatcaagtttttaaggattctgaatgctttctcgaaggtgccaccaaagccgaagattccccctgttcaaagaggtggaagcagcacctgtgttggttgatggccctctagaaccgcaaacgtcaaatatcatgtcaactactactcacattcaagaggatcctttatctgcatttttcagtgcagctgcaaatgctggtggcaactctgctgtagctgttgcaaggcaaccaattcaactttttggtgctactccggtggctacacatgcagctactagtatcactacaatacaatcgccaggcttgcattatttgcttccttcacaagcctcatcggtttctgggatgcctgctgatgctcatggttctataggaaggtccacaaaccttgtaaatccatcacttttctcaccattgacgtcttcacagacaacaatggtgtgcactaattctgtagtagcaattgctccacctcaacatcctcagactgctcagcagccgcaaagtgctcccttgcttcagccttttctattacctacggcttcaccatctccaccatatgggactccattacttcaaccatttccgccacctaatccatcgccatctcttgcgtctgcaccagtcttgagcccagcactgtctagagacaaagtccgagatgcattactgagacttgtggagaacgatgaattcatagatttagtctacggcgagatcatgaacagacagtaatggattttcaaggtacagtcctctccatcaggctagcttgtgcttggactctgtcattatctgttgtctaggctatttcaagttatcctgtaaattcattgatgaaatccttcggtttgtggagcttgtgctattaatgtacttttgacatttacaaaatctgtgctgtgttcgtggtgcagaaaagttttgttctgagtattatcttgaaacttttgttcaaccaaccttttgagaagattccctattcagcttcggaatatcatatgcttttt

SEQ ID NO: 68270 - DNA, 1262 bp, Zea Mays
gagaattcactttctacaagtggaacaattgcaagcattgatttattgacagattgcaggaatgctcaacctagattccagttcattgtcatgaaccgcaggaatacagataatctagttgaagatctcttgggagattttgaataccaactccaagctccttatattatgtaccgaaatgctgctcaagaagttataggaatttggttttacaactctcaggagtgtcaagaagttgcaaatctttttagcaggattctgaatgctttctcgaaggtgccaccaaagccgaagattccccctgttcaaagtgaatttgaagaggtggaagcagcacctgtgttggttgatggccctctagaaccgcaaacgtcaaatatcatgtcaactactactcacattcaagaggatcctttatctgcatttttcagtgcagctgcaaatgctggtggcaactctgctgtagctgttgcaaggcaaccaattcaactttttggtgctactccggtggctacacatgcagctactagtatcactacaatacaatcgccaggcttgcattatttgcttccttcacaagcctcatcggtttctgggatgcctgctgatgctcatggttctataggaaggtccacaaaccttgtaaatccatcacttttctcaccattgacgtcttcacagacaacaatggtgtgcactaattctgtagtagcaattgctccacctcaacatcctcagactgctcagcagccgcaaagtgctcccttgcttcagccttttctattacctacggcttcaccatctccaccatatgggactccattacttcaaccatttccgccacctaatccatcgccatctcttgcgtctgcaccagtcttgagcccagcactgtctagagacaaagtccgagatgcattactgagacttgtggagaacgatgaattcatagatttagtctacggcgagatcatgaacagacagtaatggattttcaaggtacagtcctctccatcaggctagcttgtgcttggactctgtcattatctgttgtctaggctatttcaagttatcctgtaaattcattgatgaaatccttcggtttgtggagcttgtgctattaatgtacttttgacatttacaaaatctgtgctgtgttcgtggtgcagaaaagttttgttctgagtattatcttgaaacttttgttcaaccaaccttttgagaagattccctattcagcttcggaatatcatatgcttttt

SEQ ID NO: 68271 - DNA, 1245 bp, Zea Mays
ggagaattcactttctacaagtggaacaattgcaagcattgatttattgacaggaatgctcaacctagattccagttcattgtcatgaaccgcaggaatacagataatctagttgaagatctcttgggagattttgaataccaactccaagctccttatattatgtaccgaaatgctgctcaagaagttataggaatttggttttacaactctcaggagtgtcaagaagttgcaaatctttttagcaggattctgaatgctttctcgaaggtgccaccaaagccgaagattccccctgttcaaagaggtggaagcagcacctgtgttggttgatggccctctagaaccgcaaacgtcaaatatcatgtcaactactactcacattcaagaggatcctttatctgcatttttcagtgcagctgcaaatgctggtggcaactctgctgtagctgttgcaaggcaaccaattcaactttttggtgctactccggtggctacacatgcagctactagtatcactacaatacaatcgccaggcttgcattatttgcttccttcacaagcctcatcggtttctgggatgcctgctgatgctcatggttctataggaaggtccacaaaccttgtaaatccatcacttttctcaccattgacgtcttcacagacaacaatggtgtgcactaattctgtagtagcaattgctccacctcaacatcctcagactgctcagcagccgcaaagtgctcccttgcttcagccttttctattacctacggcttcaccatctccaccatatgggactccattacttcaaccatttccgccacctaatccatcgccatctcttgcgtctgcaccagtcttgagcccagcactgtctagagacaaagtccgagatgcattactgagacttgtggagaacgatgaattcatagatttagtctacggcgagatcatgaacagacagtaatggattttcaaggtacagtcctctccatcaggctagcttgtgcttggactctgtcattatctgttgtctaggctatttcaagttatcctgtaaattcattgatgaaatccttcggtttgtggagcttgtgctattaatgtacttttgacatttacaaaatctgtgctgtgttcgtggtgcagaaaagttttgttctgagtattatcttgaaacttttgttcaaccaaccttttgagaagattccctattcagcttcggaatatcatatgcttttt

SEQ ID NO: 68272 - DNA, 1256 bp, Zea Mays
ggagaattcactttctacaagtggaacaattgcaagcattgatttattgacaggaatgctcaacctagattccagttcattgtcatgaaccgcaggaatacagataatctagttgaagatctcttgggagattttgaataccaactccaagctccttatattatgtaccgaaatgctgctcaagaagttataggaatttggttttacaactctcaggagtgtcaagaagttgcaaatctttttagcaggattctgaatgctttctcgaaggtgccaccaaagccgaagattccccctgttcaaagtgaatttgaagaggtggaagcagcacctgtgttggttgatggccctctagaaccgcaaacgtcaaatatcatgtcaactactactcacattcaagaggatcctttatctgcatttttcagtgcagctgcaaatgctggtggcaactctgctgtagctgttgcaaggcaaccaattcaactttttggtgctactccggtggctacacatgcagctactagtatcactacaatacaatcgccaggcttgcattatttgcttccttcacaagcctcatcggtttctgggatgcctgctgatgctcatggttctataggaaggtccacaaaccttgtaaatccatcacttttctcaccattgacgtcttcacagacaacaatggtgtgcactaattctgtagtagcaattgctccacctcaacatcctcagactgctcagcagccgcaaagtgctcccttgcttcagccttttctattacctacggcttcaccatctccaccatatgggactccattacttcaaccatttccgccacctaatccatcgccatctcttgcgtctgcaccagtcttgagcccagcactgtctagagacaaagtccgagatgcattactgagacttgtggagaacgatgaattcatagatttagtctacggcgagatcatgaacagacagtaatggattttcaaggtacagtcctctccatcaggctagcttgtgcttggactctgtcattatctgttgtctaggctatttcaagttatcctgtaaattcattgatgaaatccttcggtttgtggagcttgtgctattaatgtacttttgacatttacaaaatctgtgctgtgttcgtggtgcagaaaagttttgttctgagtattatcttgaaacttttgttcaaccaaccttttgagaagattccctattcagcttcggaatatcatatgcttttt

SEQ ID NO: 68273 - DNA, 1562 bp, Zea Mays
gaaaaggaaacagaaaaaaaaaatcacaggagaaaccgatttcccccttttttctttattttcttcgtcctcttcgtctcgactcgccgcccagtcacctcaaatcccttcgatccaatctccaaaccctaggcaatccaacatcaaagtattagctgcccccttcgtcaaaccgcggcggcgcggccatggcccacggcggcggcgccgggaaggcgaaggtgacgccgaacctggcggtggacggcgagggcacgcgcacgctcaaccgcactgtgctgcagcgcctcgacccggccgttgaggatattctcatcaccgcggctcacgtcacgctgtacgactttgacaccgatgtcaaccagtggagacggaaggacgtggaggggtcgctcttcgtcgtcaagagataatctagttgaagatctcttgggagattttgaataccaactccaagctccttatattatgtaccgaaatgctgctcaagaagttataggaatttggttttacaactctcaggagtgtcaagaagttgcaaatctttttagcaggattctgaatgctttctcgaaggtgccaccaaagccgaagattccccctgttcaaagtgaatttgaagaggtggaagcagcacctgtgttggttgatggccctctagaaccgcaaacgtcaaatatcatgtcaactactactcacattcaagaggatcctttatctgcatttttcagtgcagctgcaaatgctggtggcaactctgctgtagctgttgcaaggcaaccaattcaactttttggtgctactccggtggctacacatgcagctactagtatcactacaatacaatcgccaggcttgcattatttgcttccttcacaagcctcatcggtttctgggatgcctgctgatgctcatggttctataggaaggtccacaaaccttgtaaatccatcacttttctcaccattgacgtcttcacagacaacaatggtgtgcactaattctgtagtagcaattgctccacctcaacatcctcagactgctcagcagccgcaaagtgctcccttgcttcagccttttctattacctacggcttcaccatctccaccatatgggactccattacttcaaccatttccgccacctaatccatcgccatctcttgcgtctgcaccagtcttgagcccagcactgtctagagacaaagtccgagatgcattactgagacttgtggagaacgatgaattcatagatttagtctacggcgagatcatgaacagacagtaatggattttcaaggtacagtcctctccatcaggctagcttgtgcttggactctgtcattatctgttgtctaggctatttcaagttatcctgtaaattcattgatgaaatccttcggtttgtggagcttgtgctattaatgtacttttgacatttacaaaatctgtgctgtgttcgtggtgcagaaaagttttgttctgagtattatcttgaaacttttgttcaaccaaccttttgagaagattccctattcagcttcggaatatcatatgcttttt

SEQ ID NO: 68274 - DNA, 1491 bp, Zea Mays
gaaaaggaaacagaaaaaaaaaatcacaggagaaaccgatttcccccttttttctttattttcttcgtcctcttcgtctcgactcgccgcccagtcacctcaaatcccttcgatccaatctccaaaccctaggcaatccaacatcaaagtattagctgcccccttcgtcaaaccgcggcggcgcggccatggcccacggcggcggcgccgggaaggcgaaggtgacgccgaacctggcggtggacggcgagggcacgcgcacgctcaaccgcactgtgctgcagcgcctcgacccggccgttgaggatattctcatcaccgcggctcacgtcacgctgtacgactttgacaccgatgtcaaccagtggagacggaaggacgtggaggggtcgctcttcgtcgtcaagaggaatgctcaacctagattccagttcattgtcatgaaccgcaggaatacagataatctagttgaagatctcttgggagattttgaataccaactccaagctccttatattatgtaccgaaatgctgctcaagaagttataggaatttggttttacaactctcaggagtgtcaagaagttgcaaatctttttagcaggattctgaatgctttctcgaaggtgccaccaaagccgaagattccccctgttcaaaggcagctgcaaatgctggtggcaactctgctgtagctgttgcaaggcaaccaattcaactttttggtgctactccggtggctacacatgcagctactagtatcactacaatacaatcgccaggcttgcattatttgcttccttcacaagcctcatcggtttctgggatgcctgctgatgctcatggttctataggaaggtccacaaaccttgtaaatccatcacttttctcaccattgacgtcttcacagacaacaatggtgtgcactaattctgtagtagcaattgctccacctcaacatcctcagactgctcagcagccgcaaagtgctcccttgcttcagccttttctattacctacggcttcaccatctccaccatatgggactccattacttcaaccatttccgccacctaatccatcgccatctcttgcgtctgcaccagtcttgagcccagcactgtctagagacaaagtccgagatgcattactgagacttgtggagaacgatgaattcatagatttagtctacggcgagatcatgaacagacagtaatggattttcaaggtacagtcctctccatcaggctagcttgtgcttggactctgtcattatctgttgtctaggctatttcaagttatcctgtaaattcattgatgaaatccttcggtttgtggagcttgtgctattaatgtacttttgacatttacaaaatctgtgctgtgttcgtggtgcagaaaagttttgttctgagtattatcttgaaacttttgttcaaccaaccttttgagaagattccctattcagcttcggaatatcatatgcttttt

SEQ ID NO: 68275 - DNA, 1605 bp, Zea Mays
catcccgtttccagcaacctaaaagaaaaggaaacagaaaaaaaaaatcacaggagaaaccgatttcccccttttttctttattttcttcgtcctcttcgtctcgactcgccgcccagtcacctcaaatcccttcgatccaatctccaaaccctaggcaatccaacatcaaagtattagctgcccccttcgtcaaaccgcggcggcgcggccatggcccacggcggcggcgccgggaaggcgaaggtgacgccgaacctggcggtggacggcgagggcacgcgcacgctcaaccgcactgtgctgcagcgcctcgacccggccgttgaggatattctcatcaccgcggctcacgtcacgctagacggaaggacgtggaggggtcgctcttcgtcgtcaagaggaatgctcaacctagattccagttcattgtcatgaaccgcaggaatacagataatctagttgaagatctcttgggagattttgaataccaactccaagctccttatattatgtaccgaaatgctgctcaagaagttataggaatttggttttacaactctcaggagtgtcaagaagttgcaaatctttttagcaggattctgaatgctttctcgaaggtgccaccaaagccgaagattccccctgttcaaagtgaatttgaagaggtggaagcagcacctgtgttggttgatggccctctagaaccgcaaacgtcaaatatcatgtcaactactactcacattcaagaggatcctttatctgcatttttcagtgcagctgcaaatgctggtggcaactctgctgtagctgttgcaaggcaaccaattcaactttttggtgctactccggtggctacacatgcagctactagtatcactacaatacaatcgccaggcttgcattatttgcttccttcacaagcctcatcggtttctgggatgcctgctgatgctcatggttctataggaaggtccacaaaccttgtaaatccatcacttttctcaccattgacgtcttcacagacaacaatggtgtgcactaattctgtagtagcaattgctccacctcaacatcctcagactgctcagcagccgcaaagtgctcccttgcttcagccttttctattacctacggcttcaccatctccaccatatgggactccattacttcaaccatttccgccacctaatccatcgccatctcttgcgtctgcaccagtcttgagcccagcactgtctagagacaaagtccgagatgcattactgagacttgtggagaacgatgaattcatagatttagtctacggcgagatcatgaacagacagtaatggattttcaaggtacagtcctctccatcaggctagcttgtgcttggactctgtcattatctgttgtctaggctatttcaagttatcctgtaaattcattgatgaaatccttcggtttgtggagcttgtgctattaatgtacttttgacatttacaaaatctgtgctgtgttcgtggtgcagaaaagttttgttctgagtattatcttgaaacttttgttcaaccaaccttttgagaagattccctattcagcttcggaatatcatatgcttttt

SEQ ID NO: 68276 - DNA, 2737 bp, Zea Mays
cgcgctcgatctctccagccccagccgttcctcctccctgctcgctctctctccctcctcccgctccagctcccctgtgtgccgtggtctctcagctccctacatccatggcacgcggctacgatttcaccgcgccctgctcctccaccggattgcactccggctctcccatggcgctcgagcgctctgcgctctgcccgccgtcgcaggccgcggcgcccctgctcctcctcccgaagcttttccccatggcgctcggcctctcggccacctagccgagcttctccctggtctcccatggctgccgagctgcgccctggttcttgcttctctctccctgctgccgcatcgccctctctctctcatccccatagccgagcaccctctgccccagctcgtgttgctccctcccatggcggctgagctctctagctcggtcctgctcatcccagcgtgtcgtggttcctctgctcgaccatggcgtggatagcggacgagtccctacttttctttcccatcctctcctccctagtccttgttcagattttgcctagccgctgcgcagccccctcggcttctccgccccagcacgccgtgcccagctcccctgcacgcttgtttcctgcgcgcgcaaagctctctgctcgccgtcgaatcgcctgctcgctgtccacgccatggcgtcggctaccgccgattccgccattgaactctcaagctcgccaacgctctagctcgctgttgtcgccaagtccgaatatcacagcttgttctagtggccgtgagttcttacctgtgtgcgcacgagctcctctgcttggcccgtcgtcgttctccagctccttatcgcactcggctattcgtcgtcatcgctcagtcacacgacaggctgactgcgtgtcgtgtgtcgcacatcttaggtcctcgacggcgcgttgttcgcctttgcactgggtgcgacagaatcgtcttttccctatccagtgctcgcgcagttttctgctcgccagcacgtcccctcagcccgcttggccttaattcccatcgcgtcgtcgatttcgccggttatcatcattcgtcgttgcgtcgcgtgtgcagccctatatacgtcaccctcctgtgtcgtcgtcattctatgcgtcatcaagaaatttcgggtgaagacggagctagcagcgtggtgttcaccaagtgcgtgacaaaaagctcgaacaagtcgtcgatcgtcatcctcgtctacgccaagctctgaaaagattaggcgcagagaaaaataaatcaatacgtggccggagaattctcgatgtggacaaagaaaaagcgcgattcgacgcagcactcaccctattttcggtgaaatgctgagctgaaaggcgtcgtcgatttcgtggtttcaagtcggatgtcctaagggtaaattaattcgtattcaagtcaactaggtctataaatagaattgttggtcgcaataaatgttattaatttagcatacatatattgtgatggtcgatttagataaatcggtaaatcaagtaattaagttacatagtttaaagagttaataaaaagctaggaataaaaatagattttctagtgtattatgttaatttggttaatggatgaagtcgatgccctgcttaattagtcagcttattctaggtttggtgtttaattcgctgtcgtataagtattatttaggttcgtgatattcctccttatatgcatacatgtgcattatgcatatcatttaggtacgttaattaatcacatgatgcggaagacgacctaagtcgaccccaagcacgggctaatccgcaggatgatgttgatggacaaacctggagatggataatggagtgagtatcggaataaaggctgaacaacaagtggacgtcacctaacaacactaacctagtgttattcaggcaagccccagtgcatttgccacctccttgctattttaaaatctttatcaccttatatgatgcattaggtgataggagttgtgtgctaaaccgttgaatgcatttccttccttgaaaattgattaccctttcttgatacccgtttgaaaagaattttatgatgcttagccttgctttagcaaacaaaaatgttttgttttaaaacaaaagtgatgcttcagtgggtgggaatgttttcaaaaataaaatttgatggtggatccgtcaaaggccttgatgggttcaacatcggaaaagatgtacctctgccaggtaccaaaatttgggttgaaaattgttgggggccttcgtctttcgaaggtcatcaaaaacataatttaacaatgtcttccaagtatggcttatgaacaggtaccttcggactcaggataacagtatacacgaagggagcatggtcatgacgaaggtttccgctgctccgaagctacactcaagggagcttcggcccaatcgcagaaaaaggaaccgacttaaaggggaaagggttgtttagccctcatagatttatttatatgtcattaataaatgtaaagggcatgactataatttctcacaggctgcgtcctgtgtctataaatagatgaacagtaccccatactgttcacgttgacttgtactcgcttttgcgtcacacttgtattttctagccttctatcaagccgaaggtaccttttgtaattcgatattgttcttacctttccatgattatataatgaagaataaataatatgatataattatttgtgttgttt

SEQ ID NO: 68277 - DNA, 1813 bp, Zea Mays
atggatttcactgtaacgacgcatatgcatgcagggaggcatctcgccgagatatgcaagagcgagtaccccaagttcgtgaggatttgcctgtggatcctcgcggaggtcgcggtgatcgccgccgatatcccggaaggatatggatggattggtgcgaataatctctcccattatatggacgttccgttcgtgcgtgttggatcgtcttgccatctgaacaagagctagcggcagcagcggaggaatccgcacggacttgcagcttccaaagaacaatactatatatataggagtataatactcggtaatctatcgctttgtttgtttgtttgtttgttactgacagtatgtgtatacgtttgctatatgttatttgcagttatagggacagccttcgctttcaacctcttgttccacatccccgtgtgggtgggggtcctcatcaccggctccagcactcttctgctcctgggcctacagagatacggggtgcggaagctggagttcctgatctcgatgctggtgttcgtcatggcggcgtgcttcttcggggagctgagcttcgtgaagccgccggcggtggacgtggtcaaggggctcttcatccccaggctcaagggcgacggcgccaccgcggacgccattgcgctcctcggagctctcgtcatgccgcacaacctgttcctgcactccgcgctggtgctgtcgaggaagacgccgtcgtcggtgagggggatcaaggacgcgtgccggttcttcctctacgagagcggcttcgcgctgttcgtggcgctgctcatcaacatcgccgtcatctccgtctccggcaccgtctgcttctccggcaacctgtcgcccgaggacgccggcaagtgcagcgacctctcgctcgactcttcctccttcctcctcaagaacgtgctgggcaggtccagttcgatcgtgtacggcgtggcgctcttggcgtctggccagagctccaccataacaggcacctactccggccagtacatcatgcagggttttctggacatcaggatgaagaagtggctgaggaacctgatgacacgctgcatcgccatcgcgcccagcctagtcgtctccatcatcggcggctccagtggcgccggccgtctcatcatcatcgcttcgatgatcctgtccttcgagctgccgttcgctctcatcccgctcctcaagttcagcagcagcagcagcaagatggggccccacaagaactccatctatatcatcgtgttctcgtggctgctggggctgatgatcatcggcatcaacatgtacttcctgagcaccagcttcgtggggtggctcgtccacaactcgctccccaagtacgccaacgtgctcgtcggcctgctcgtcttccccctcatgctcgtctacgtcgtcgccgtcatctacctcaccttcaggaaggacaccgtcgtcaccttcgtcgccgactccgcccagctggccgtggtcgacgccgagaaggccaacaaggcggcggcggccgccggcgacgacgacgacgaccggcccgtgccgttccggcaggacctcgcggacatccctctgccggagtagcgtagcgctacagattaattaaacactctccctgtcttcttcaagtataaatataaatatatatacacatatatagccagttgtacgtatatatacgcacgtacgcgtggtgtttcgtcttttggacgactcaatatatgattgctcgtagccgtagatatgcatggctgctccagcctccaactagtattatttagcaagatgcatggcgggggcttag

SEQ ID NO: 68278 - DNA, 1381 bp, Zea Mays
cacatcagcggtgccgcctcatcttccttccctctcgtcatggcgcaactcccttgccccgccgccgccgccgccgctaatgtagcggccgggaaagaagagactgccacctgggaggacgcgctggacctggatgactccgacatctgcttcgttccccctcccctcccctactcattcgacgccaccgcctcccagccccagcaggacaaacccccgcactctttccaccaccagccccaccgcatccccggccccactgccgccgtccaggacacgattcttccccgctccgccccccgtccgcctctctcatcgagacgcggggacgccgacttcctgctgcccccgtggctctgcgctctccagttccttgggaaggaccgcgcgtgggaacggccgggtatcaggacgattaaggacaacaaggaattgattcgagcacctttggtggctggggtggtgacgttgtgcaggccaaacgggctcggagatctcttcttggttctaaaggatccaaccgactcaatcggtgcttcagttcacaagaaagttcttttggaggagaataatggccatgatatctcaattgggtgtgctgttgtttttattaagtccaggtagctgttttccgtccgtctgacaagttgtgctacctcaatgttaccaaaggaaaagtgatcaagtaaaaattgtgctgccccagctaagcaagtgatttcaccaaatacttctgaaagaagtcaaggcgaagattctgccagcaatacaatgatgagaattttaggtcgtgaagacatgatgcccagtaacgagatgacagttactgaggtttctcatgaacacagtgcaacacctgattcaactaattgcacttcaacgtgggatatttatggtaggtttagtttgggaagtaacaaggaagataaattgctggtaggagatccgcataacaagcatacatcaagctgcagtactgatgggcatccccagcaaaatttgagtattccaaacactataggttgcttctcaaccccgaaagaaaatgttaataccagcagcggatcacatctcaaacgcaaaaaggttgtatcagaatggacagatgagcagctttctgaactgtttgctgactactagcattgtagtatatatctgataaacgagttgttagatttctagaagtcaatgtattgcagttatattactgatgtgagctttgtaagaacttgacaagttttgtacagttgcacctatagcatctagagctgtgtatggttgttgtccagctcacttttctgaaacggttgtcatgccggtctttcattgtaacaattttatgaatctgccttctgataattgaactaaagataattgtgtc

SEQ ID NO: 68279 - DNA, 1025 bp, Zea Mays
attgatttttgttggtctgcattcttatcccttcaccgccgacgctcagcatccagttccatcacgtatgccatggccttgttagcctccagtgcttgtttctgctctcgtctccttcctgctaggccacgccatctcctccgtgtcgcatgtcctgagctccatcaatggacgccgcccattgcagctcgttggtgttcgtcatcaagcgctgctcttcgtcgtggcagttggatgatgccgcggcaccgtcgcaccctagtcgtgctcggccttcgcagcatcgctgcgctcgccgttgcgctcgcttcagcatcctcacagtgcaacacaaccatggtcgcacccctgcttggtctccagctcgcgtcgacatggcttcgccatggtccctgctcaccgctgcagcacctcaattggtcgtccctgctgttcccttcgcgtcgacgctccttcgctggccacgctcgccaaagctcgctagcgtcggccgttgtctctgctctaccaggctgcaccccaccttagctcacacgttcctcgttctggccctgctcaggctcctccctcgccgtagcacaggtcgccaccctgtggctgcacccaggccacagcttcctgcgcactcgcctgcagccccagcgtgctgtgcgctagccgccgtcgcgtgtccctgcctcctgcacgcgctagccgcgcctgggtcccgctccatctatctagctcggcctcagcacatgtcgtactccagtccaccatgccgcgcacaggaacgcgtttgtcgagcgtcgctcttgtcgtggccatcggcctcacgtctgtccaagttttcatcccctgcatcactattgccctcgcaccactggtcgtcgatctgtcagcctcactgctcgtcgtccggtacgataattaatcacgtgatacaaaagacgacccaagtccaccccaaccgcgggctaatccgcaagatgatgttgatggacgaaccggaagatggataatctgaacgagtgcgtgccaggaca

SEQ ID NO: 68280 - DNA, 1528 bp, Zea Mays
attgatttttgttggtctgcattcttatcccttcaccgccgacgctcagcatccagttccatcacgtatgccatggccttgttagcctccagtgcttgtttctgctctcgtctccttcctgctaggccacgccatctcctccgtgtcgcatgtcctgagctccatcaatggacgccgcccattgcagctcgttggtgttcgtcatcaagcgctgctcttcgtcgtggcagttggatgatgccgcggcaccgtcgcaccctagtcgtgctcggccttcgcagcatcgctgcgctcgccgttgcgctcgcttcagcatcctcacagtgcaacacaaccatggtcgcacccctgcttggtctccagctcgcgtcgacatggcttcgccatggtccctgctcaccgctgcagcacctcaattggtcgtccctgctgttcccttcgcgtcgacgctccttcgctggccacgctcgccaaagctcgctagcgtcggccgttgtctctgctctaccaggctgcaccccaccttagctcacacgttcctcgttctggccctgctcaggctcctccctcgccgtagcacaggtcgccaccctgtggctgcacccaggccacagcttcctgcgcactcgcctgcagccccagcgtgctgtgcgctagccgccgtcgcgtgtccctgcctcctgcacgcgctagccgcgcctgggtcccgctccatctatctagctcggcctcagcacatgtcgtactccagtccaccatgccgcgcacaggaacgcgtttgtcgagcgtcgctcttgtcgtggccatcggcctcacgtctgtccaagttttcatcccctgcatcactattgccctcgcaccactggtcgtcgatctgtcagcctcactgctcgtcgtccggtgagcccccgtcatttttaccgcggcttgcattccttgtgctcgattaaatgtgtgaaccggtgaatattgtagttcttgtggatgtcgagtcacattaatagctatagttatgtgtgtttttgtgtgtgacattggaggcatacgtctaatattattaagttggttcgatgaatgcgatgtgattattttcatgattttggagtagtcgagttgggtgttgaggttaggtttgagatgctagtcacgcgaagaacgtattagtagacgcatatgcctagcatggttaaactagtagcgttgacatgctgattttagtcaaaaatctgagaaccccggtgatgaagtcgatattctacgttaatagttagtataatcggtttatgtctgtgattggtaaatgttatactcagaatattgtttttgatgtttgagttaggtccgtttaagctagaaaagtgtgctggttgtatttagtaatatctcagcatctagtgattgcttttgaatgttattatgtgccttgccactaggtatttaattcactatcgtgtagcaataattaggtgttgaaggctaaaaagagcctcgcggacggtccggccctgaggccggacggtccgcggtg

SEQ ID NO: 68281 - DNA, 2717 bp, Zea Mays
aggcaactagtcgatgaggtaaatcttgtacaacattgcataagtgctcactttattcatgggtacaacattcaccacattatcttacacttagttgtaggccactttaggaacatattttttatgccgcttatctaaagcatggagttcccatttatgatttatgtcacttacgtatgatactatcgttatctctcctgttacttgtttcaggtatcagaattcctggattccaaatctgagacggatgttgatgttgactataacagcttgtactcaaagcaggactttctacagggggacgatgatcacgggatgagagtcgctgcagcgacatacttgaaaaattttacccgccgcaatttggaaactcgtctgtgttcatctgaggtttacaaggagttccgtgaccaacttgcccaggctttgcttcgagtggagcctgcaattcttcgagtgctgattgaagttttccgccaagttgttgaaaaagattttgtcaaggataacttgtggcctgagcttatccctcagttgaaactagtgatccagagcagcaacctaattagtccaggccagcatcctgagtggaatactattaatgcactcacagtacttcaatctgttgtaagacccttccagtatttcttgaatccaaaagttgtgaaagagtctgttccacaacagttggagcaaattgcagcagagattcttgtaccattgcaagtgacattccatcacttctctgacaaggttcttttgtcacctgatgggactaacttggaatatgagcagctcctactcatcacatgcaaatgcatgtatttcactgtgaggtcatacatgccatctagggtgaaacaaattttgccttccttttgcaaagacatgttccgtatactagattctttgaactttaatagtcttattgaagatggatctaccatgaagctcaagattgcaaagagatgtctcattatattttgcgcacttgttacacgtcaccggaaacatacagataactagatgccacatattgtcaactgtgcaataaaaatatcaaaacaaagcatccatttaagtaaactcgactctctccccaatcggattgtttcattggcatttgatgtgatttctcgagttttggaaacaggaccgggatggtgactagtttcaccacatttttcttcacttcttgattcagcaatttttccagcattagcattgaatgagaaggatatagaagaatgggaggaggatactgatgagtatatgcaaaagaatcttccttctgaacttgatgacatttctggatggactgaggatttgttcactgccagaaaaagtgcaatcaatttacttggtgttatagcgctatcaaaggttgtgattccttttttattatagtttgttgaacacacatagtactgacttcaggctgagcaaaacattttaagggattgttttgctatattgtattccatgactttgtcattctatatcaagtgatttcaatggctgcatgcagtctttcatatttgaacacacttgctatttttcacagaaccatgtagtttgttgaattaactcaaaaattgagatgttgctgtcatttgcttacacttttttttggtttcagggtccaccagttgcatctgcagcatcaaagcgtaagaaaggtgataaaaataaagggaaatctgaaatgagctcaattggggagttattggtcatcccattcctgtcaaagtttcctataccttctcatggtgaggatgcatcatcagtagcagtgcagaattatttcggtgttttgatggcatatggaggcctccaagattttctgactggaaagaaagatttgacaattacattgatcaggaaccggattctcccattatattctttggatccttgcagcatgcagcccatatttgatttcaacggctaattgggttattggtcagcttgcgatatgcctaccagaggacatgagttctagtatttatcagtccttaatgaaggcgttgaccatggagtatgtggaggacataacttgttatccggtttgtgcctctgcttctggtgctattgcagaactcatcgagaatagctatgttccacctgactggctcattctcctgcaagtggttctgaaaagaataagtactggagatgaaaatgagtctgctcttctgtccaagcttctgggcacaatagttgagggtggacaggaaaaagttctgtctcatattcctgaaattgtatccaacattgctagtactgtaatggagctcctgccccttgtcccagatccttggcctcaggtagtagtgcatctttcttctgtgtggtcaatattttggtactttgtcatgatgaccggcgggaggaacaccgggcgtgtaggagtgatcaagaacagggagaagcacaagggcagcttcgagaccatccacatgctgcttagagctttttgctatgtctagttttctcctatttgttgtataggaaaacatagaatggaattcaaatttggtggccgcaaaatgtggagacttgaattcatataaagttaggcttaacattagtgcaaacagctgtattttagtttagatttagagtacacttatgtatgtgttgtttgacaatgcttatttatgatatattgaatgatacttatttatattatattaattataatgttgttcaatata

SEQ ID NO: 68282 - DNA, 3003 bp, Zea Mays
tgggactgcatgaccagttttagttaggcaactagtcgatgaggtaaatcttgtacaacattgcataagtgctcactttattcatgggtacaacattcaccacattatcttacacttagttgtaggccactttaggaacatattttttatgccgcttatctaaagcatggagttcccatttatgatttatgtcacttacgtatgatactatcgttatctctcctgttacttgtttcaggtatcagaattcctggattccaaatctgagacggatgttgatgttgactataacagcttgtactcaaagcaggactttctacaggcacccattcttctttccctccacttgccgctccagttgcagttggtcgaaaaaagtggaaaggaaaggggcaaaatatcctagggttctgcctccatggacatcgagacccacgccgccgccctggcccgcgacgagctgcggcggctcctcgccgccaccctcagtcccgacaaggcgtcggtggacaccgccgcggcggggctcgacgcgctctcttccgacccacgcttccccctcgccatcctcgctgtcgctgcaggggacgatgatcacgggatgagagtcgctgcagcgacatacttgaaaaattttacccgccgcaatttggaaactcgtctgtgttcatctgaggtttacaaggagttccgtgaccaacttgcccaggctttgcttcgagtggagcctgcaattcttcgagtgctgattgaagttttccgccaagttgttgaaaaagattttgtcaaggataacttgtggcctgagcttatccctcagttgaaactagtgatccagagcagcaacctaattagtccaggccagcatcctgagtggaatactattaatgcactcacagtacttcaatctgttgtaagacccttccagtatttcttgaatccaaaagttgtgaaagagtctgttccacaacagttggagcaaattgcagcagagattcttgtaccattgcaagtgacattccatcacttctctgacaaggttcttttgtcacctgatgggactaacttggaatatgagcagctcctactcatcacatgcaaatgcatgtatttcactgtgaggtcatacatgccatctagggtgaaacaaattttgccttccttttgcaaagacatgttccgtatactagattctttgaactttaatagtcttattgaagatggatctaccatgaagctcaagattgcaaagagatgtctcattatattttgcgcacttgttacacgtcaccggaaacatacagataactagatgccacatattgtcaactgtgcaataaaaatatcaaaacaaagcatccatttaagtaaactcgactctctccccaatcggattgtttcattggcatttgatgtgatttctcgagttttggaaacaggaccgggatggtgactagtttcaccacatttttcttcacttcttgattcagcaatttttccagcattagcattgaatgagaaggatatagaagaatgggaggaggatactgatgagtatatgcaaaagaatcttccttctgaacttgatgacatttctggatggactgaggatttgttcactgccagaaaaagtgcaatcaatttacttggtgttatagcgctatcaaaggttgtgattccttttttattatagtttgttgaacacacatagtactgacttcaggctgagcaaaacattttaagggattgttttgctatattgtattccatgactttgtcattctatatcaagtgatttcaatggctgcatgcagtctttcatatttgaacacacttgctatttttcacagaaccatgtagtttgttgaattaactcaaaaattgagatgttgctgtcatttgcttacacttttttttggtttcagggtccaccagttgcatctgcagcatcaaagcgtaagaaaggtgataaaaataaagggaaatctgaaatgagctcaattggggagttattggtcatcccattcctgtcaaagtttcctataccttctcatggtgaggatgcatcatcagtagcagtgcagaattatttcggtgttttgatggcatatggaggcctccaagattttctgactggaaagaaagatttgacaattacattgatcaggaaccggattctcccattatattctttggatccttgcagcatgcagcccatatttgatttcaacggctaattgggttattggtcagcttgcgatatgcctaccagaggacatgagttctagtatttatcagtccttaatgaaggcgttgaccatggagtatgtggaggacataacttgttatccggtttgtgcctctgcttctggtgctattgcagaactcatcgagaatagctatgttccacctgactggctcattctcctgcaagtggttctgaaaagaataagtactggagatgaaaatgagtctgctcttctgtccaagcttctgggcacaatagttgagggtggacaggaaaaagttctgtctcatattcctgaaattgtatccaacattgctagtactgtaatggagctcctgccccttgtcccagatccttggcctcaggtagtagtgcatctttcttctgtgtggtcaatattttggtactttgtcatgatgaccggcgggaggaacaccgggcgtgtaggagtgatcaagaacagggagaagcacaagggcagcttcgagaccatccacatgctgcttagagctttttgctatgtctagttttctcctatttgttgtataggaaaacatagaatggaattcaaatttggtggccgcaaaatgtggagacttgaattcatataaagttaggcttaacattagtgcaaacagctgtattttagtttagatttagagtacacttatgtatgtgttgtttgacaatgcttatttatgatatattgaatgatacttatttatattatattaattataatgttgttcaatata

SEQ ID NO: 68283 - DNA, 3489 bp, Zea Mays
gtttatatgtgaagtttaggtctaaaattatgagtttatttgaaatgattttgtgcacgattatgaggtggactagtacatatatgtgattaagtgggtgattttagatctactttaatataaggtattagcatatttgaagtattaggcacatgaaaattttagaagttaactaggagttaaattaggattcttgctgttgggactgcatgaccagttttagttaggcaactagtcgatgaggtaaatcttgtacaacattgcataagtgctcactttattcatgggtacaacattcaccacattatcttacacttagttgtaggccactttaggaacatattttttatgccgcttatctaaagcatggagttcccatttatgatttatgtcacttacgtatgatactatcgttatctctcctgttacttgtttcaggtatcagaattcctggattccaaatctgagacggatgttgatgttgactataacagcttgtactcaaagcaggactttctacagggtgaggtgctcgtttcgatgtggctagagtaacttgtgtactctatctcatcgtttttaatttattcgtttatatatatatatatagtgtgatttaatatggtgtaatgtttctcatcctaatgacaccccaaacatacattcttcttccacggctgggtagccaaacaatcccacaacagtaaaattcttctaccaagtgaagaaccatggagaaaatgccttcctaatcattgttcccgctttgcaactaacatttccatttcccgccacactctcccgcgcagcacccattcttctttccctccacttgccgctccagttgcagttggtcgaaaaaagtggaaaggaaaggggcaaaatatcctagggttctgcctccatggacatcgagacccacgccgccgccctggcccgcgacgagctgcggcggctcctcgccgccaccctcagtcccgacaaggcgtcggtggacaccgccgcggcggggctcgacgcgctctcttccgacccacgcttccccctcgccatcctcgctgtcgctgcaggggacgatgatcacgggatgagagtcgctgcagcgacatacttgaaaaattttacccgccgcaatttggaaactcgtctgtgttcatctgaggtttacaaggagttccgtgaccaacttgcccaggctttgcttcgagtggagcctgcaattcttcgagtgctgattgaagttttccgccaagttgttgaaaaagattttgtcaaggataacttgtggcctgagcttatccctcagttgaaactagtgatccagagcagcaacctaattagtccaggccagcatcctgagtggaatactattaatgcactcacagtacttcaatctgttgtaagacccttccagtatttcttgaatccaaaagttgtgaaagagtctgttccacaacagttggagcaaattgcagcagagattcttgtaccattgcaagtgacattccatcacttctctgacaaggttcttttgtcacctgatgggactaacttggaatatgagcagctcctactcatcacatgcaaatgcatgtatttcactgtgaggtcatacatgccatctagggtgaaacaaattttgccttccttttgcaaagacatgttccgtatactagattctttgaactttaatagtcttattgaagatggatctaccatgaagctcaagattgcaaagagatgtctcattatattttgcgcacttgttacacgtcaccggaaacatacagataactagatgccacatattgtcaactgtgcaataaaaatatcaaaacaaagcatccatttaagtaaactcgactctctccccaatcggattgtttcattggcatttgatgtgatttctcgagttttggaaacaggaccgggatggtgactagtttcaccacatttttcttcacttcttgattcagcaatttttccagcattagcattgaatgagaaggatatagaagaatgggaggaggatactgatgagtatatgcaaaagaatcttccttctgaacttgatgacatttctggatggactgaggatttgttcactgccagaaaaagtgcaatcaatttacttggtgttatagcgctatcaaaggttgtgattccttttttattatagtttgttgaacacacatagtactgacttcaggctgagcaaaacattttaagggattgttttgctatattgtattccatgactttgtcattctatatcaagtgatttcaatggctgcatgcagtctttcatatttgaacacacttgctatttttcacagaaccatgtagtttgttgaattaactcaaaaattgagatgttgctgtcatttgcttacacttttttttggtttcagggtccaccagttgcatctgcagcatcaaagcgtaagaaaggtgataaaaataaagggaaatctgaaatgagctcaattggggagttattggtcatcccattcctgtcaaagtttcctataccttctcatggtgaggatgcatcatcagtagcagtgcagaattatttcggtgttttgatggcatatggaggcctccaagattttctgactggaaagaaagatttgacaattacattgatcaggaaccggattctcccattatattctttggatccttgcagcatgcagcccatatttgatttcaacggctaattgggttattggtcagcttgcgatatgcctaccagaggacatgagttctagtatttatcagtccttaatgaaggcgttgaccatggagtatgtggaggacataacttgttatccggtttgtgcctctgcttctggtgctattgcagaactcatcgagaatagctatgttccacctgactggctcattctcctgcaagtggttctgaaaagaataagtactggagatgaaaatgagtctgctcttctgtccaagcttctgggcacaatagttgagggtggacaggaaaaagttctgtctcatattcctgaaattgtatccaacattgctagtactgtaatggagctcctgccccttgtcccagatccttggcctcaggtagtagtgcatctttcttctgtgtggtcaatattttggtactttgtcatgatgaccggcgggaggaacaccgggcgtgtaggagtgatcaagaacagggagaagcacaagggcagcttcgagaccatccacatgctgcttagagctttttgctatgtctagttttctcctatttgttgtataggaaaacatagaatggaattcaaatttggtggccgcaaaatgtggagacttgaattcatataaagttaggcttaacattagtgcaaacagctgtattttagtttagatttagagtacacttatgtatgtgttgtttgacaatgcttatttatgatatattgaatgatacttatttatattatattaattataatgttgttcaatata

SEQ ID NO: 68284 - DNA, 3518 bp, Zea Mays
tggagcccagttttgctccccgacacgtgagatcccttcactagcatctctcttcctcaagcgccatccctggcttctcccatgccgagcgtctccaatgcccaaacctccatggccgacgtcgccctgctcaggtccaaccagctccccttcctgttgttgtgtccagccgatgcccctccctccatcttcctctctgcagcaaccctaccacggttgtgcccctgcttccatggtgagctcgccccagccccaacgtcggacgtgccgtcgccctcacgtccagctcctccatccccctggttccctcctagctccgaccaggtttgccaggtccgaccgttctgctcgccgcgccctccccatgccagcacgcgagcgccccctcccgtccctgctcctctccatcgacgcccaggccgatgccgagctcccagcccctcccgatggcgtggtcaagcatctaggtatcagaattcctggattccaaatctgagacggatgttgatgttgactataacagcttgtactcaaagcaggactttctacagggtgaggtgctcgtttcgatgtggctagagtaacttgtgtactctatctcatcgtttttaatttattcgtttatatatatatatatagtgtgatttaatatggtgtaatgtttctcatcctaatgacaccccaaacatacattcttcttccacggctgggtagccaaacaatcccacaacagtaaaattcttctaccaagtgaagaaccatggagaaaatgccttcctaatcattgttcccgctttgcaactaacatttccatttcccgccacactctcccgcgcagcacccattcttctttccctccacttgccgctccagttgcagttggtcgaaaaaagtggaaaggaaaggggcaaaatatcctagggttctgcctccatggacatcgagacccacgccgccgccctggcccgcgacgagctgcggcggctcctcgccgccaccctcagtcccgacaaggcgtcggtggacaccgccgcggcggggctcgacgcgctctcttccgacccacgcttccccctcgccatcctcgctgtcgctgcaggggacgatgatcacgggatgagagtcgctgcagcgacatacttgaaaaattttacccgccgcaatttggaaactcgtctgtgttcatctgaggtttacaaggagttccgtgaccaacttgcccaggctttgcttcgagtggagcctgcaattcttcgagtgctgattgaagttttccgccaagttgttgaaaaagattttgtcaaggataacttgtggcctgagcttatccctcagttgaaactagtgatccagagcagcaacctaattagtccaggccagcatcctgagtggaatactattaatgcactcacagtacttcaatctgttgtaagacccttccagtatttcttgaatccaaaagttgtgaaagagtctgttccacaacagttggagcaaattgcagcagagattcttgtaccattgcaagtgacattccatcacttctctgacaaggttcttttgtcacctgatgggactaacttggaatatgagcagctcctactcatcacatgcaaatgcatgtatttcactgtgaggtcatacatgccatctagggtgaaacaaattttgccttccttttgcaaagacatgttccgtatactagattctttgaactttaatagtcttattgaagatggatctaccatgaagctcaagattgcaaagagatgtctcattatattttgcgcacttgttacacgtcaccggaaacatacagataactagatgccacatattgtcaactgtgcaataaaaatatcaaaacaaagcatccatttaagtaaactcgactctctccccaatcggattgtttcattggcatttgatgtgatttctcgagttttggaaacaggaccgggatggtgactagtttcaccacatttttcttcacttcttgattcagcaatttttccagcattagcattgaatgagaaggatatagaagaatgggaggaggatactgatgagtatatgcaaaagaatcttccttctgaacttgatgacatttctggatggactgaggatttgttcactgccagaaaaagtgcaatcaatttacttggtgttatagcgctatcaaaggttgtgattccttttttattatagtttgttgaacacacatagtactgacttcaggctgagcaaaacattttaagggattgttttgctatattgtattccatgactttgtcattctatatcaagtgatttcaatggctgcatgcagtctttcatatttgaacacacttgctatttttcacagaaccatgtagtttgttgaattaactcaaaaattgagatgttgctgtcatttgcttacacttttttttggtttcagggtccaccagttgcatctgcagcatcaaagcgtaagaaaggtgataaaaataaagggaaatctgaaatgagctcaattggggagttattggtcatcccattcctgtcaaagtttcctataccttctcatggtgaggatgcatcatcagtagcagtgcagaattatttcggtgttttgatggcatatggaggcctccaagattttctgactggaaagaaagatttgacaattacattgatcaggaaccggattctcccattatattctttggatccttgcagcatgcagcccatatttgatttcaacggctaattgggttattggtcagcttgcgatatgcctaccagaggacatgagttctagtatttatcagtccttaatgaaggcgttgaccatggagtatgtggaggacataacttgttatccggtttgtgcctctgcttctggtgctattgcagaactcatcgagaatagctatgttccacctgactggctcattctcctgcaagtggttctgaaaagaataagtactggagatgaaaatgagtctgctcttctgtccaagcttctgggcacaatagttgagggtggacaggaaaaagttctgtctcatattcctgaaattgtatccaacattgctagtactgtaatggagctcctgccccttgtcccagatccttggcctcaggtagtagtgcatctttcttctgtgtggtcaatattttggtactttgtcatgatgaccggcgggaggaacaccgggcgtgtaggagtgatcaagaacagggagaagcacaagggcagcttcgagaccatccacatgctgcttagagctttttgctatgtctagttttctcctatttgttgtataggaaaacatagaatggaattcaaatttggtggccgcaaaatgtggagacttgaattcatataaagttaggcttaacattagtgcaaacagctgtattttagtttagatttagagtacacttatgtatgtgttgtttgacaatgcttatttatgatatattgaatgatacttatttatattatattaattataatgttgttcaatata

SEQ ID NO: 68285 - DNA, 3365 bp, Zea Mays
tggagcccagttttgctccccgacacgtgagatcccttcactagcatctctcttcctcaagcgccatccctggcttctcccatgccgagcgtctccaatgcccaaacctccatggccgacgtcgccctgctcaggtccaaccagctccccttcctgttgttgtgtccagccgatgcccctccctccatcttcctctctgcagcaaccctaccacggttgtgcccctgcttccatggtgagctcgccccagccccaacgtcggacgtgccgtcgccctcacgtccagctcctccatccccctggttccctcctagctccgaccaggtatcagaattcctggattccaaatctgagacggatgttgatgttgactataacagcttgtactcaaagcaggactttctacagggtgaggtgctcgtttcgatgtggctagagtaacttgtgtactctatctcatcgtttttaatttattcgtttatatatatatatatagtgtgatttaatatggtgtaatgtttctcatcctaatgacaccccaaacatacattcttcttccacggctgggtagccaaacaatcccacaacagtaaaattcttctaccaagtgaagaaccatggagaaaatgccttcctaatcattgttcccgctttgcaactaacatttccatttcccgccacactctcccgcgcagcacccattcttctttccctccacttgccgctccagttgcagttggtcgaaaaaagtggaaaggaaaggggcaaaatatcctagggttctgcctccatggacatcgagacccacgccgccgccctggcccgcgacgagctgcggcggctcctcgccgccaccctcagtcccgacaaggcgtcggtggacaccgccgcggcggggctcgacgcgctctcttccgacccacgcttccccctcgccatcctcgctgtcgctgcaggggacgatgatcacgggatgagagtcgctgcagcgacatacttgaaaaattttacccgccgcaatttggaaactcgtctgtgttcatctgaggtttacaaggagttccgtgaccaacttgcccaggctttgcttcgagtggagcctgcaattcttcgagtgctgattgaagttttccgccaagttgttgaaaaagattttgtcaaggataacttgtggcctgagcttatccctcagttgaaactagtgatccagagcagcaacctaattagtccaggccagcatcctgagtggaatactattaatgcactcacagtacttcaatctgttgtaagacccttccagtatttcttgaatccaaaagttgtgaaagagtctgttccacaacagttggagcaaattgcagcagagattcttgtaccattgcaagtgacattccatcacttctctgacaaggttcttttgtcacctgatgggactaacttggaatatgagcagctcctactcatcacatgcaaatgcatgtgaggtcatacatgccatctagggtgaaacaaattttgccttccttttgcaaagacatgttccgtatactagattctttgaactttaatagtcttattgaagatggatctaccatgaagctcaagattgcaaagagatgtctcattatattttgcgcacttgttacacgtcaccggaaacatacagataactagatgccacatattgtcaactgtgcaataaaaatatcaaaacaaagcatccatttaagtaaactcgactctctccccaatcggattgtttcattggcatttgatgtgatttctcgagttttggaaacaggaccgggatggtgactagtttcaccacatttttcttcacttcttgattcagcaatttttccagcattagcattgaatgagaaggatatagaagaatgggaggaggatactgatgagtatatgcaaaagaatcttccttctgaacttgatgacatttctggatggactgaggatttgttcactgccagaaaaagtgcaatcaatttacttggtgttatagcgctatcaaaggttgtgattccttttttattatagtttgttgaacacacatagtactgacttcaggctgagcaaaacattttaagggattgttttgctatattgtattccatgactttgtcattctatatcaagtgatttcaatggctgcatgcagtctttcatatttgaacacacttgctatttttcacagaaccatgtagtttgttgaattaactcaaaaattgagatgttgctgtcatttgcttacacttttttttggtttcagggtccaccagttgcatctgcagcatcaaagcgtaagaaaggtgataaaaataaagggaaatctgaaatgagctcaattggggagttattggtcatcccattcctgtcaaagtttcctataccttctcatggtgaggatgcatcatcagtagcagtgcagaattatttcggtgttttgatggcatatggaggcctccaagattttctgactggaaagaaagatttgacaattacattgatcaggaaccggattctcccattatattctttggatccttgcagcatgcagcccatatttgatttcaacggctaattgggttattggtcagcttgcgatatgcctaccagaggacatgagttctagtatttatcagtccttaatgaaggcgttgaccatggagtatgtggaggacataacttgttatccggtttgtgcctctgcttctggtgctattgcagaactcatcgagaatagctatgttccacctgactggctcattctcctgcaagtggttctgaaaagaataagtactggagatgaaaatgagtctgctcttctgtccaagcttctgggcacaatagttgagggtggacaggaaaaagttctgtctcatattcctgaaattgtatccaacattgctagtactgtaatggagctcctgccccttgtcccagatccttggcctcaggtagtagtgcatctttcttctgtgtggtcaatattttggtactttgtcatgatgaccggcgggaggaacaccgggcgtgtaggagtgatcaagaacagggagaagcacaagggcagcttcgagaccatccacatgctgcttagagctttttgctatgtctagttttctcctatttgttgtataggaaaacatagaatggaattcaaatttggtggccgcaaaatgtggagacttgaattcatataaagttaggcttaacattagtgcaaacagctgtattttagtttagatttagagtacacttatgtatgtgttgtttgacaatgcttatttatgatatattgaatgatacttatttatattatattaattataatgttgttcaatata

SEQ ID NO: 68286 - DNA, 2828 bp, Zea Mays
tggagcccagttttgctccccgacacgtgagatcccttcactagcatctctcttcctcaagcgccatccctggcttctcccatgccgagcgtctccaatgcccaaacctccatggccgacgtcgccctgctcaggtccaaccagctccccttcctgttgttgtgtccagccgatgcccctccctccatcttcctctctgcagcaaccctaccacggttgtgcccctgcttccatggtgagctcgccccagccccaacgtcggacgtgccgtcgccctcacgtccagctcctccatccccctggttccctcctagctccgaccaggtatcagaattcctggattccaaatctgagacggatgttgatgttgactataacagcttgtactcaaagcaggactttctacagggggacgatgatcacgggatgagagtcgctgcagcgacatacttgaaaaattttacccgccgcaatttggaaactcgtctgtgttcatctgaggtttacaaggagttccgtgaccaacttgcccaggctttgcttcgagtggagcctgcaattcttcgagtgctgattgaagttttccgccaagttgttgaaaaagattttgtcaaggataacttgtggcctgagcttatccctcagttgaaactagtgatccagagcagcaacctaattagtccaggccagcatcctgagtggaatactattaatgcactcacagtacttcaatctgttgtaagacccttccagtatttcttgaatccaaaagttgtgaaagagtctgttccacaacagttggagcaaattgcagcagagattcttgtaccattgcaagtgacattccatcacttctctgacaaggttcttttgtcacctgatgggactaacttggaatatgagcagctcctactcatcacatgcaaatgcatgtatttcactgtgaggtcatacatgccatctagggtgaaacaaattttgccttccttttgcaaagacatgttccgtatactagattctttgaactttaatagtcttattgaagatggatctaccatgaagctcaagattgcaaagagatgtctcattatattttgcgcacttgttacacgtcaccggaaacatacagataactagatgccacatattgtcaactgtgcaataaaaatatcaaaacaaagcatccatttaagtaaactcgactctctccccaatcggattgtttcattggcatttgatgtgatttctcgagttttggaaacaggaccgggatggtgactagtttcaccacatttttcttcacttcttgattcagcaatttttccagcattagcattgaatgagaaggatatagaagaatgggaggaggatactgatgagtatatgcaaaagaatcttccttctgaacttgatgacatttctggatggactgaggatttgttcactgccagaaaaagtgcaatcaatttacttggtgttatagcgctatcaaaggttgtgattccttttttattatagtttgttgaacacacatagtactgacttcaggctgagcaaaacattttaagggattgttttgctatattgtattccatgactttgtcattctatatcaagtgatttcaatggctgcatgcagtctttcatatttgaacacacttgctatttttcacagaaccatgtagtttgttgaattaactcaaaaattgagatgttgctgtcatttgcttacacttttttttggtttcagggtccaccagttgcatctgcagcatcaaagcgtaagaaaggtgataaaaataaagggaaatctgaaatgagctcaattggggagttattggtcatcccattcctgtcaaagtttcctataccttctcatggtgaggatgcatcatcagtagcagtgcagaattatttcggtgttttgatggcatatggaggcctccaagattttctgactggaaagaaagatttgacaattacattgatcaggaaccggattctcccattatattctttggatccttgcagcatgcagcccatatttgatttcaacggctaattgggttattggtcagcttgcgatatgcctaccagaggacatgagttctagtatttatcagtccttaatgaaggcgttgaccatggagtatgtggaggacataacttgttatccggtttgtgcctctgcttctggtgctattgcagaactcatcgagaatagctatgttccacctgactggctcattctcctgcaagtggttctgaaaagaataagtactggagatgaaaatgagtctgctcttctgtccaagcttctgggcacaatagttgagggtggacaggaaaaagttctgtctcatattcctgaaattgtatccaacattgctagtactgtaatggagctcctgccccttgtcccagatccttggcctcaggtagtagtgcatctttcttctgtgtggtcaatattttggtactttgtcatgatgaccggcgggaggaacaccgggcgtgtaggagtgatcaagaacagggagaagcacaagggcagcttcgagaccatccacatgctgcttagagctttttgctatgtctagttttctcctatttgttgtataggaaaacatagaatggaattcaaatttggtggccgcaaaatgtggagacttgaattcatataaagttaggcttaacattagtgcaaacagctgtattttagtttagatttagagtacacttatgtatgtgttgtttgacaatgcttatttatgatatattgaatgatacttatttatattatattaattataatgttgttcaatata

SEQ ID NO: 68287 - DNA, 3375 bp, Zea Mays
tggagcccagttttgctccccgacacgtgagatcccttcactagcatctctcttcctcaagcgccatccctggcttctcccatgccgagcgtctccaatgcccaaacctccatggccgacgtcgccctgctcaggtccaaccagctccccttcctgttgttgtgtccagccgatgcccctccctccatcttcctctctgcagcaaccctaccacggttgtgcccctgcttccatggtgagctcgccccagccccaacgtcggacgtgccgtcgccctcacgtccagctcctccatccccctggttccctcctagctccgaccaggtatcagaattcctggattccaaatctgagacggatgttgatgttgactataacagcttgtactcaaagcaggactttctacagggtgaggtgctcgtttcgatgtggctagagtaacttgtgtactctatctcatcgtttttaatttattcgtttatatatatatatatagtgtgatttaatatggtgtaatgtttctcatcctaatgacaccccaaacatacattcttcttccacggctgggtagccaaacaatcccacaacagtaaaattcttctaccaagtgaagaaccatggagaaaatgccttcctaatcattgttcccgctttgcaactaacatttccatttcccgccacactctcccgcgcagcacccattcttctttccctccacttgccgctccagttgcagttggtcgaaaaaagtggaaaggaaaggggcaaaatatcctagggttctgcctccatggacatcgagacccacgccgccgccctggcccgcgacgagctgcggcggctcctcgccgccaccctcagtcccgacaaggcgtcggtggacaccgccgcggcggggctcgacgcgctctcttccgacccacgcttccccctcgccatcctcgctgtcgctgcaggggacgatgatcacgggatgagagtcgctgcagcgacatacttgaaaaattttacccgccgcaatttggaaactcgtctgtgttcatctgaggtttacaaggagttccgtgaccaacttgcccaggctttgcttcgagtggagcctgcaattcttcgagtgctgattgaagttttccgccaagttgttgaaaaagattttgtcaaggataacttgtggcctgagcttatccctcagttgaaactagtgatccagagcagcaacctaattagtccaggccagcatcctgagtggaatactattaatgcactcacagtacttcaatctgttgtaagacccttccagtatttcttgaatccaaaagttgtgaaagagtctgttccacaacagttggagcaaattgcagcagagattcttgtaccattgcaagtgacattccatcacttctctgacaaggttcttttgtcacctgatgggactaacttggaatatgagcagctcctactcatcacatgcaaatgcatgtatttcactgtgaggtcatacatgccatctagggtgaaacaaattttgccttccttttgcaaagacatgttccgtatactagattctttgaactttaatagtcttattgaagatggatctaccatgaagctcaagattgcaaagagatgtctcattatattttgcgcacttgttacacgtcaccggaaacatacagataactagatgccacatattgtcaactgtgcaataaaaatatcaaaacaaagcatccatttaagtaaactcgactctctccccaatcggattgtttcattggcatttgatgtgatttctcgagttttggaaacaggaccgggatggtgactagtttcaccacatttttcttcacttcttgattcagcaatttttccagcattagcattgaatgagaaggatatagaagaatgggaggaggatactgatgagtatatgcaaaagaatcttccttctgaacttgatgacatttctggatggactgaggatttgttcactgccagaaaaagtgcaatcaatttacttggtgttatagcgctatcaaaggttgtgattccttttttattatagtttgttgaacacacatagtactgacttcaggctgagcaaaacattttaagggattgttttgctatattgtattccatgactttgtcattctatatcaagtgatttcaatggctgcatgcagtctttcatatttgaacacacttgctatttttcacagaaccatgtagtttgttgaattaactcaaaaattgagatgttgctgtcatttgcttacacttttttttggtttcagggtccaccagttgcatctgcagcatcaaagcgtaagaaaggtgataaaaataaagggaaatctgaaatgagctcaattggggagttattggtcatcccattcctgtcaaagtttcctataccttctcatggtgaggatgcatcatcagtagcagtgcagaattatttcggtgttttgatggcatatggaggcctccaagattttctgactggaaagaaagatttgacaattacattgatcaggaaccggattctcccattatattctttggatccttgcagcatgcagcccatatttgatttcaacggctaattgggttattggtcagcttgcgatatgcctaccagaggacatgagttctagtatttatcagtccttaatgaaggcgttgaccatggagtatgtggaggacataacttgttatccggtttgtgcctctgcttctggtgctattgcagaactcatcgagaatagctatgttccacctgactggctcattctcctgcaagtggttctgaaaagaataagtactggagatgaaaatgagtctgctcttctgtccaagcttctgggcacaatagttgagggtggacaggaaaaagttctgtctcatattcctgaaattgtatccaacattgctagtactgtaatggagctcctgccccttgtcccagatccttggcctcaggtagtagtgcatctttcttctgtgtggtcaatattttggtactttgtcatgatgaccggcgggaggaacaccgggcgtgtaggagtgatcaagaacagggagaagcacaagggcagcttcgagaccatccacatgctgcttagagctttttgctatgtctagttttctcctatttgttgtataggaaaacatagaatggaattcaaatttggtggccgcaaaatgtggagacttgaattcatataaagttaggcttaacattagtgcaaacagctgtattttagtttagatttagagtacacttatgtatgtgttgtttgacaatgcttatttatgatatattgaatgatacttatttatattatattaattataatgttgttcaatata

SEQ ID NO: 68288 - DNA, 3095 bp, Zea Mays
ccgccatggagcccagttttgctccccgacacgtgagatcccttcactagcatctctcttcctcaagcgccatccctggcttctcccatgccgagcgtctccaatgcccaaacctccatggccgacgtcgccctgctcaggtccaaccagctccccttcctgttgttgtgtccagccgatgcccctccctccatcttcctctctgcagcaaccctaccacggttgtgcccctgcttccatggtgagctcgccccagccccaacgtcggacgtgccgtcgccctcacgtccagctcctccatccccctggttccctcctagctccgaccaggtatcagaattcctggattccaaatctgagacggatgttgatgttgactataacagcttgtactcaaagcaggactttctacaggcacccattcttctttccctccacttgccgctccagttgcagttggtcgaaaaaagtggaaaggaaaggggcaaaatatcctagggttctgcctccatggacatcgagacccacgccgccgccctggcccgcgacgagctgcggcggctcctcgccgccaccctcagtcccgacaaggcgtcggtggacaccgccgcggcggggctcgacgcgctctcttccgacccacgcttccccctcgccatcctcgctgtcgctgcaggggacgatgatcacgggatgagagtcgctgcagcgacatacttgaaaaattttacccgccgcaatttggaaactcgtctgtgttcatctgaggtttacaaggagttccgtgaccaacttgcccaggctttgcttcgagtggagcctgcaattcttcgagtgctgattgaagttttccgccaagttgttgaaaaagattttgtcaaggataacttgtggcctgagcttatccctcagttgaaactagtgatccagagcagcaacctaattagtccaggccagcatcctgagtggaatactattaatgcactcacagtacttcaatctgttgtaagacccttccagtatttcttgaatccaaaagttgtgaaagagtctgttccacaacagttggagcaaattgcagcagagattcttgtaccattgcaagtgacattccatcacttctctgacaaggttcttttgtcacctgatgggactaacttggaatatgagcagctcctactcatcacatgcaaatgcatgtatttcactgtgaggtcatacatgccatctagggtgaaacaaattttgccttccttttgcaaagacatgttccgtatactagattctttgaactttaatagtcttattgaagatggatctaccatgaagctcaagattgcaaagagatgtctcattatattttgcgcacttgttacacgtcaccggaaacatacagataactagatgccacatattgtcaactgtgcaataaaaatatcaaaacaaagcatccatttaagtaaactcgactctctccccaatcggattgtttcattggcatttgatgtgatttctcgagttttggaaacaggaccgggatggtgactagtttcaccacatttttcttcacttcttgattcagcaatttttccagcattagcattgaatgagaaggatatagaagaatgggaggaggatactgatgagtatatgcaaaagaatcttccttctgaacttgatgacatttctggatggactgaggatttgttcactgccagaaaaagtgcaatcaatttacttggtgttatagcgctatcaaaggttgtgattccttttttattatagtttgttgaacacacatagtactgacttcaggctgagcaaaacattttaagggattgttttgctatattgtattccatgactttgtcattctatatcaagtgatttcaatggctgcatgcagtctttcatatttgaacacacttgctatttttcacagaaccatgtagtttgttgaattaactcaaaaattgagatgttgctgtcatttgcttacacttttttttggtttcagggtccaccagttgcatctgcagcatcaaagcgtaagaaaggtgataaaaataaagggaaatctgaaatgagctcaattggggagttattggtcatcccattcctgtcaaagtttcctataccttctcatggtgaggatgcatcatcagtagcagtgcagaattatttcggtgttttgatggcatatggaggcctccaagattttctgactggaaagaaagatttgacaattacattgatcaggaaccggattctcccattatattctttggatccttgcagcatgcagcccatatttgatttcaacggctaattgggttattggtcagcttgcgatatgcctaccagaggacatgagttctagtatttatcagtccttaatgaaggcgttgaccatggagtatgtggaggacataacttgttatccggtttgtgcctctgcttctggtgctattgcagaactcatcgagaatagctatgttccacctgactggctcattctcctgcaagtggttctgaaaagaataagtactggagatgaaaatgagtctgctcttctgtccaagcttctgggcacaatagttgagggtggacaggaaaaagttctgtctcatattcctgaaattgtatccaacattgctagtactgtaatggagctcctgccccttgtcccagatccttggcctcaggtagtagtgcatctttcttctgtgtggtcaatattttggtactttgtcatgatgaccggcgggaggaacaccgggcgtgtaggagtgatcaagaacagggagaagcacaagggcagcttcgagaccatccacatgctgcttagagctttttgctatgtctagttttctcctatttgttgtataggaaaacatagaatggaattcaaatttggtggccgcaaaatgtggagacttgaattcatataaagttaggcttaacattagtgcaaacagctgtattttagtttagatttagagtacacttatgtatgtgttgtttgacaatgcttatttatgatatattgaatgatacttatttatattatattaattataatgttgttcaatata

SEQ ID NO: 68289 - DNA, 1088 bp, Zea Mays
aagcagagtacctcgactggtggtgcagatatgttattcatgaacacaagttataaaaataaatgtgctgagtaaatattgtatcttgccaaagatatgaatttgtagattgattgcccacccttggtgtgcgtgcttcgctagctataaaggggcatcctcctcatctggtctaattcaatcaaccgacgacacagatagaatttcctttccgccaataatggatcaatgtttaggtagcagccatatggacggggatcagcagacaccaccccggttaccattgttgactgctctttttgatcagcacaggcagcaagtagaccggactcttcaagaacataacgagcaggtacggctacagctacagcaacagatatctgcacaaaacgagactctactaaacctggccgagtcgatggcgagagatgcgctggcggaaaagaacggagaagtgtcgcgcctacgcatggagctgaagagcacgcaagagcttctgcgaaccgcgttgcaggaaagggatgaggtgcagtacctcgccaaagggttctacgaaatgaaccggtggctcatcatgtcccggctgcctcctgtgttgcaggcaacaacaagtgtcgtccacgcacttgatgatggctcatcctccactggctcctgtagccaggcaccgaacgtggagggagcttctgtagggaggagcaccacacgtgttgttgttaccaggcttctctgtaaggtctgttgtgcccgtgatgcttgtatgctaatcctgccgtgccaacacctctgcgcatgcgagtcgtgcggaatcagtcttacagtatgccctctctgctaccttgcaaaggacaatgtgatggaggtggaggctcggtttggctgataaggaaagaggcaggcagggggggaagaagtcgtcatgcatgttttgttcttcataaggtgttagttgtaaccttgtatgagttcttgttgtttttgtttaccttactctctcttcgaagataatagtataaaacatcactccaacctacacagaactattgttgttcccgtacgtagctgtacatcgcctgttaaggtgtctc

SEQ ID NO: 68290 - DNA, 1109 bp, Zea Mays
cttgcctagttggttggctgattgtgacaaaagtcgaatatatgccagtactcactactcacgcaccaaagctcatgatgctgcatattatgtttttttgggacgccgcactcactctcagtattggtaggtccatccgcttctgcagaaaagttatagcataacacagcaattcagaggggtgattaggaaatttcctctcaaatgtcatcttattgcacgttttccaaattgacaacgccaagcctgcaaagaaaaaataagaaggcatatgtacgttggggtaaattcagacaatgcagagaatacttggaacacattttggaatatctgacatcatttctgtatcgcacagagccattgcaagacgtcgataagattttttttaaagctgaagagtgaatttgaggaacgatgggccaatggagaaatacctggatggggaaataaaggcgcagaaaacgagtctaaaatagatcttgattactacagcacagttgaaacaggtccttaatgctttgttcaacctttgcaaaattaataaaagaagacaggaacaagcagccaaaaatggaatcatccctcacttgatgaaatttgtcatgtcagactcacctctgcggcagtatgccctgcctttgttgtgtacttaaatctgctcgaggatgatgcatgggcatgcacgacattagattctattgctgtttgtttggctcacgataatgatcacagaaaagtggaacaagcactcttgaaaagaggccattcagaatttaatgaagttcttccaagattgcctagaacagttttttggccatatattggacgctttcttgaagataataacgaaatcttctaggctaaatataacaatggctaccaatggtttaacaacattgctcattgcaagacttgaccattcaaatttggtggtcgcaaaagtgtggagacttgaattcatataaagttaggcttaacattagtgcaaacagttgtattttagtttagatttagagtacactaatgtatgcgttgtttgacaatgcttatttatgatatattgaatggtacttatttatatcatattaattataatgttgttcaatata

SEQ ID NO: 68291 - DNA, 1373 bp, Zea Mays
ccaccttagtgattcgctttgtttagctattttaggtttggacacgatctatatttgtcgtttgtactatgaaaggctcaaagaggtatttatataaccttgcctagttggttggctgattgtgacaaaagtcgaatatatgccagtactcactactcacgcaccaaagctcatgatgctgcatattatgtttttttgggacgccgcactcactctcagtattggtaggtccatccgcttctgcagaaaagttatagcataacacagcaattcagaggggtgattaggaaatttcctctcaaatgtcatcttattgcacgttttccaaattgacaacgccaagcctgcaaagaaaaaataagaaggcatatgtacgttggggtaaattcaggaaacttttggtcgttacctcgacttgcatgagctttataacgagttcataaattccaagtttggaacgctaatggaatactcgacttatgttggctgtttctcctagatggacaagatctcacatagtcataaagctaccagatatgtcatgccttttcactaagacaatgcagagaatacttggaacacattttggaatatctgacatcatttctgtatcgcacagagccattgcaagacgtcgataagattttttttaaagctgaagagtgaatttgaggaacgatgggccaatggagaaatacctggatggggaaataaaggcgcagaaaacgagtctaaaatagatcttgattactacagcacagttgaaacaggtccttaatgctttgttcaacctttgcaaaattaataaaagaagacaggaacaagcagccaaaaatggaatcatccctcacttgatgaaatttgtcatgtcagactcacctctgcggcagtatgccctgcctttgttgtgtacttaaatctgctcgaggatgatgcatgggcatgcacgacattagattctattgctgtttgtttggctcacgataatgatcacagaaaagtggaacaagcactcttgaaaagaggccattcagaatttaatgaagttcttccaagattgcctagaacagttttttggccatatattggacgctttcttgaagataataacgaaatcttctaggctaaatataacaatggctaccaatggtttaacaacattgctcattgcaagacttgaccattcaaatttggtggtcgcaaaagtgtggagacttgaattcatataaagttaggcttaacattagtgcaaacagttgtattttagtttagatttagagtacactaatgtatgcgttgtttgacaatgcttatttatgatatattgaatggtacttatttatatcatattaattataatgttgttcaatata

SEQ ID NO: 68292 - DNA, 2178 bp, Zea Mays
cgtaactcccctttccctcgcctctctgcggcgctgcgcggcacctagcttcctatacgaagcaccggaggcggggtagactagcgggctggccatggcgtcaacggtgctggaggcgacgagggtggcccatgaggacttggagaggctggagcgcctcgcggcgcgcgagctgcaatgggagcccgataacccgcgcgaccgcttttttcagtcccaccgcgtccgccacatgctcgacctcgtcgtctccacctcctgcaagctcgtccatccgcttctgcagaaaagttatagcataacacagcaattcagaggggtgattaggaaatttcctctcaaatgtcatcttattgcacgttttccaaattgacaacgccaagcctgcaaagaaaaaataagaaggcatatgtacgttggggtaaattcaggttagttttagcctaacttctcatgaagtcagatttaaaaatgggatgagtcccatctgaaaacctctgtaaaactgcaccatgcaaatctagcaataggacatctaaagaaaatatttctatgttctcaggttcattagagagatcaattcacacaccatttcttggcccttctttttggaactgttgtgtcctgcatcttaccatagaagaattgataattttcatgggtggttttcatttccaaagttctgtcatactgtcactgaccccaccatgagttaaaagtatgtataagatttagtagtgaactgctgccatcaaatccacccatgtattgtacattgtagtgagatgagatcatgagaatagaaacccactgaaatttataccccaatcatcttcaatattcagccactatagcatttggttcttcacaaatcctatgtaactcagtgtactcggtttttaaatctcaatccatatatcattccacaaaaaaatcttcctgttattgtttgatttctgttgtgggattttggtggtgtcgatggtaagatttaggcaatgattgaaactgtgatggtgaattatcaataacttgacaatcattcaatgatacattctttttttattttcaccaatgtgtggtcctttttatgctagttaatgttacatattcactacactttttctattaatattatactattctcacaatagttttaattaggttgctaatgacctggttctgcattttgataggaaacttttggtcgttacctcgacttgcatgagctttataacgagttcataaattccaagtttggaacgctaatggaatactcgacttatgttggctgtttctcctagatggacaagatctcacatagtcataaagctaccagatatgtcatgccttttcactaagacaatgcagagaatacttggaacacattttggaatatctgacatcatttctgtatcgcacagagccattgcaagacgtcgataagattttttttaaagctgaagagtgaatttgaggaacgatgggccaatggagaaatacctggatggggaaataaaggcgcagaaaacgagtctaaaatagatcttgattactacagcacagttgaaacaggtccttaatgctttgttcaacctttgcaaaattaataaaagaagacaggaacaagcagccaaaaatggaatcatccctcacttgatgaaatttgtcatgtcagactcacctctgcggcagtatgccctgcctttgttgtgtacttaaatctgctcgaggatgatgcatgggcatgcacgacattagattctattgctgtttgtttggctcacgataatgatcacagaaaagtggaacaagcactcttgaaaagaggccattcagaatttaatgaagttcttccaagattgcctagaacagttttttggccatatattggacgctttcttgaagataataacgaaatcttctaggctaaatataacaatggctaccaatggtttaacaacattgctcattgcaagacttgaccattcaaatttggtggtcgcaaaagtgtggagacttgaattcatataaagttaggcttaacattagtgcaaacagttgtattttagtttagatttagagtacactaatgtatgcgttgtttgacaatgcttatttatgatatattgaatggtacttatttatatcatattaattataatgttgttcaatata

SEQ ID NO: 68293 - DNA, 1208 bp, Zea Mays
ccaaaaccctagctacccggcgtaactcccctttccctcgcctctctgcggcgctgcgcggcacctagcttcctatacgaagcaccggaggcggggtagactagcgggctggccatggcgtcaacggtgctggaggcgacgagggtggcccatgaggacttggagaggctggagcgcctcgcggcgcgcgagctgcaatgggagcccgataacccgcgcgaccgcttttttcagtcccaccgcgtccgccacatgctcgacctcgtcgtctccacctcctgcaagctcgaaacttttggtcgttacctcgacttgcatgagctttataacgagttcataaattccaagtttggaacgctaatggaatactcgacttatgttggctgtttctcctagatggacaagatctcacatagtcataaagctaccagatatgtcatgccttttcactaagagccattgcaagacgtcgataagattttttttaaagctgaagagtgaatttgaggaacgatgggccaatggagaaatacctggatggggaaataaaggcgcagaaaacgagtctaaaatagatcttgattactacagcacagttgaaacaggtccttaatgctttgttcaacctttgcaaaattaataaaagaagacaggaacaagcagccaaaaatggaatcatccctcacttgatgaaatttgtcatgtcagactcacctctgcggcagtatgccctgcctttgttgtgtacttaaatctgctcgaggatgatgcatgggcatgcacgacattagattctattgctgtttgtttggctcacgataatgatcacagaaaagtggaacaagcactcttgaaaagaggccattcagaatttaatgaagttcttccaagattgcctagaacagttttttggccatatattggacgctttcttgaagataataacgaaatcttctaggctaaatataacaatggctaccaatggtttaacaacattgctcattgcaagacttgaccattcaaatttggtggtcgcaaaagtgtggagacttgaattcatataaagttaggcttaacattagtgcaaacagttgtattttagtttagatttagagtacactaatgtatgcgttgtttgacaatgcttatttatgatatattgaatggtacttatttatatcatattaattataatgttgttcaatata

SEQ ID NO: 68294 - DNA, 1723 bp, Zea Mays
cttggcaggcccaaatctatccgtccatagtccttgtaccgcgaaatctaaaatccccaaaaccctagctacccggcgtaactcccctttccctcgcctctctgcggcgctgcgcggcacctagcttcctatacgaagcaccggaggcggggtagactagcgggctggccatggcgtcaacggtgctggaggcgacgagggtggcccatgaggacttggagaggctggagcgcctcgcggcgcgcgagctgcaatgggagcccgataacccgcgcgaccgcttttttcagtcccaccgcgtccgccacatgctcgacctcgtcgtctccacctcctgcaagctcgaaacttttggtcgttacctcgacttgcatgagctttataacgagttcataaattccaagtttggaacgctaatggaatactcgacttatgttggctgtttctcctagatggacaagatctcacatagtcataaagctaccagatatgtcatgccttttcactaaggtctgaaacatatgatttcctagcatgtgcttgactagtatggttatgccatatccatctctggttgaatcccttttgtcttttctgatagcggtagtatgtggtgagggacattgcctaccgtaggttagtagggttcaacttcaacatgttcaagtctatatctaggatagataatcagctgcctgttgttgaacctgtgtaccatttatttcatatggttcatagggaaaaagaacctaattcatggtatagggcagtgcatatccaagtacatatgtatgatagttgctcagctttttcatctgtctattattcagtttcatatgttggtgcgcttataagtgaattgtagtgttggatattgtttatatttttcaacttctttaattgacagacaatgcagagaatacttggaacacattttggaatatctgacatcatttctgtatcgcacagagccattgcaagacgtcgataagattttttttaaagctgaagagtgaatttgaggaacgatgggccaatggagaaatacctggatggggaaataaaggcgcagaaaacgagtctaaaatagatcttgattactacagcacagttgaaacaggtccttaatgctttgttcaacctttgcaaaattaataaaagaagacaggaacaagcagccaaaaatggaatcatccctcacttgatgaaatttgtcatgtcagactcacctctgcggcagtatgccctgcctttgttgtgtacttaaatctgctcgaggatgatgcatgggcatgcacgacattagattctattgctgtttgtttggctcacgataatgatcacagaaaagtggaacaagcactcttgaaaagaggccattcagaatttaatgaagttcttccaagattgcctagaacagttttttggccatatattggacgctttcttgaagataataacgaaatcttctaggctaaatataacaatggctaccaatggtttaacaacattgctcattgcaagacttgaccattcaaatttggtggtcgcaaaagtgtggagacttgaattcatataaagttaggcttaacattagtgcaaacagttgtattttagtttagatttagagtacactaatgtatgcgttgtttgacaatgcttatttatgatatattgaatggtacttatttatatcatattaattataatgttgttcaatata

SEQ ID NO: 68295 - DNA, 1173 bp, Zea Mays
agcagttatcaaaacttcaaaaatgataagattactaatacaatatttttttgttacctttagatttcagctccccttggcaggcccaaatctatccgtccatagtccttgtaccgcgaaatctaaaatccccaaaaccctagctacccggcgtaactcccctttccctcgcctctctgcggcgctgcgcggcacctagcttcctatacgaagcaccggaggcggggtagactagcgggctggccatggcgtcaacggtgctggaggcgacgagggtggcccatgaggacttggagaggctggagcgcctcgcggcgcgcgagctgcaatgggagcccgataacccgcgcgaccgcttttttcagtcccaccgcgtccgccacatgctcgacctcgtcgtctccacctcctgcaagctcagccattgcaagacgtcgataagattttttttaaagctgaagagtgaatttgaggaacgatgggccaatggagaaatacctggatggggaaataaaggcgcagaaaacgagtctaaaatagatcttgattactacagcacagttgaaacaggtccttaatgctttgttcaacctttgcaaaattaataaaagaagacaggaacaagcagccaaaaatggaatcatccctcacttgatgaaatttgtcatgtcagactcacctctgcggcagtatgccctgcctttgttgtgtacttaaatctgctcgaggatgatgcatgggcatgcacgacattagattctattgctgtttgtttggctcacgataatgatcacagaaaagtggaacaagcactcttgaaaagaggccattcagaatttaatgaagttcttccaagattgcctagaacagttttttggccatatattggacgctttcttgaagataataacgaaatcttctaggctaaatataacaatggctaccaatggtttaacaacattgctcattgcaagacttgaccattcaaatttggtggtcgcaaaagtgtggagacttgaattcatataaagttaggcttaacattagtgcaaacagttgtattttagtttagatttagagtacactaatgtatgcgttgtttgacaatgcttatttatgatatattgaatggtacttatttatatcatattaattataatgttgttcaatata

SEQ ID NO: 68296 - DNA, 584 bp, Zea Mays
gttgtgacagggcgatccagcagcttcatgcagaaggcgcagctgaaacttctgccgaagatattgaggacgtcgtcctctgcgctgtcgtcgacatcatcgtcgggggcagaagcagcagatcggcctgccagaatattttggcggcggcgtgccttctctgcatcggagagggtggtgtcggcctcgatcgcgcggacggcggcgacgagctcgcctcctgccgcaggggccgcgggggctacaggatcgccggagcagtcggggcagctccagatcgcagcttcagacagcgcgggtggattcgagaggcatggggagtgccacggggtggcgcaggtggagcaccgtagcaggtctacctcggacggtgcggccacaccgcagaccatgcagacgccagcatcgtcgcagggaagatcggccgccatagtggtggtgggggcggcagcgagcctgcggcgcggctgagtctgggagttggggaatgagggctcggtggttcactgtcttagggttttgtggggagcggactgcagaagggacatgtgagaagcgtgagccgtgaggaagtgacgaaagcg

SEQ ID NO: 68297 - DNA, 1210 bp, Zea Mays
aacatgaagaacattgttaagagcaagagagtatgtattagtattgatcgaacaagaaccaatgtgtttaatttgcaaacatgaaccattgcccacttgcactatgtcactgccatggtactaatcctgctcagctaggcaatcaaggtcacttgtgatgtgatctatgacatcgatatcgttgaactagttggggtcgaccatgtaggagagcgtagacgcgaaggccgttaaagattcattctgttatgacaaggatcgtttccacgacgatcactaagggagcaacacttgatggtggtgtggccatgacgatcaccacaagggtcgttgccacgacgatcatccatctggtaacaacacttgatggtggtgtggcctgacttgccacagatcaggcactaatgacaagagtcgttgacttctatggccatggccatgggagtggccaccaaaacacatgttgttggcagaggcattgtattgcaactgtaatttgaccacatgttagagttgatgaggctcaaatgcaaccaagtctacgaacacatcatcgagaaagagcagtttggccttggttgtcattgatgtgacaaatgggttataatcggttaggatccctgatagctcctcgtcacataaaggggcgtcagcggtaataagcttggtggtaagccccgtgatcttgcagaaaagttagtggcagatagatcacgtttctttgatgtagtaaggtccacaaagatttgcactgtgtgcgccttcgtggattagtcaaaattcttctagagggggtcccagacctccttggaagacatggcactgatgacgtcttgaaggacttcctcgatcatcgacgagagaaggccactcaacagttgttgatcttgaacatactagctagcatactccggattagggacatctgcggcacctgcaattgtcgatgtggcaatataattattaggggcaacattgaatccatcaaagtatcgagaagcttaaatctccttagatacagaaggagctgagcacgccaaaggagaaaaatggatttagtcagtcaaattatgacgacgtgatgtatagggatcggtggcatggtggaagaagtggcatccgacatgagaggaggaagagaaggggaagcacgatgcgtggtggagaattagaagaaattccttctctctggtaccatgtcaaattggtg

SEQ ID NO: 68298 - DNA, 1208 bp, Zea Mays
ccaatgggcaatgctccccgaagccgaagcggaacgaaacggtccacacgctggctagcccccgtcccgactccgaaatccgaatccatggccgtcctccgcgcgtcgccgccgccctttctcccccatccgctctcgcgcccctctcagtgcaagcggcgccccacctgccgcgtggtcgcagccacagccagacccagtcctgctccttccaggcccaggagcggcggcgtccatggaggccgccccaagagggggcttcttgcggcaaggagaaggccggcggaggggcgggtgccctgcttgcgggccacggaggcgggggtcggtgcggcaggcgtcgcgaaggaggaagacgagtacctggcgcgggaggccgggtggggcgtgcggcggatggcacgggttggggaggagatgcggcgggtggcgcaggtccaggccgaggccttccacgtccccgtcgcgctcttcaacgacttcttcttcgacttcttcaagccgaggtgctgtcggcgctcatctacagagtgaggaactcgccgcctgacagatacgcttgtttggtggctgaagaagctgaggcagccgaccagccgtcaaaggcaccatatgagaagatcgtcggggttgtggattgcacggtgcaggacgaagacggcatcctaaagcaccttcgaggcgcggatgaatacctctacgtgtcaggaattgcagtcttgccaccattcaggaggaggaaggtagggaccgcactgctgaaggcctgcgaggcactggggctccaatggaggcacgtgttcatggttctgagggcgtacgaggatgacgacggcgctcgaggcctctactccaaggcagggtacagggtcgtgtcaagggatccagactgggtctcctgggtggggaggaggaggcgagttgtcatggtaaaggagctgccggttcacgatgatcaatgacgccggcacggttttgttgaatatgtgtgtgtgtgtcaccagctaatttgtactgtttcttgtccatattcgcggcatcatgcatgtctttttggacaatagaggagagacagttgcctatcttcccaccaaacacaaaatgaaaattgagaagttacagttgacaagttccgtttcagagtctgccaccggcaagtgtacagtatcagctgtattttgcgacattacacaagcactcgtaagcac

SEQ ID NO: 68299 - DNA, 1214 bp, Zea Mays
ccaatgggcaatgctccccgaagccgaagcggaacgaaacggtccacacgctggctagcccccgtcccgactccgaaatccgaatccatggccgtcctccgcgcgtcgccgccgccctttctcccccatccgctctcgcgcccctctcagtgcaagcggcgccccacctgccgcgtggtcgcagccacagccagacccagtcctgctccttccaggcccaggagcggcggcgtccatggaggccgccccaagagggggcttcttgcggcaaggagaaggccggcggaggggcgggtgccctgcttgcgggccacggaggcgggggtcggtgcggcaggcgtcgcgaaggaggaagacgagtacctggcgcgggaggccgggtggggcgtgcggcggatggcacgggttggggaggagatgcggcgggtggcgcaggtccaggccgaggccttccacgtccccgtcgcgctcttcaacgacttcttcttcgacttcttcaaaattaggccgaggtgctgtcggcgctcatctacagagtgaggaactcgccgcctgacagatacgcttgtttggtggctgaagaagctgaggcagccgaccagccgtcaaaggcaccatatgagaagatcgtcggggttgtggattgcacggtgcaggacgaagacggcatcctaaagcaccttcgaggcgcggatgaatacctctacgtgtcaggaattgcagtcttgccaccattcaggaggaggaaggtagggaccgcactgctgaaggcctgcgaggcactggggctccaatggaggcacgtgttcatggttctgagggcgtacgaggatgacgacggcgctcgaggcctctactccaaggcagggtacagggtcgtgtcaagggatccagactgggtctcctgggtggggaggaggaggcgagttgtcatggtaaaggagctgccggttcacgatgatcaatgacgccggcacggttttgttgaatatgtgtgtgtgtgtcaccagctaatttgtactgtttcttgtccatattcgcggcatcatgcatgtctttttggacaatagaggagagacagttgcctatcttcccaccaaacacaaaatgaaaattgagaagttacagttgacaagttccgtttcagagtctgccaccggcaagtgtacagtatcagctgtattttgcgacattacacaagcactcgtaagcac

SEQ ID NO: 68300 - DNA, 1759 bp, Zea Mays
ccaatgggcaatgctccccgaagccgaagcggaacgaaacggtccacacgctggctagcccccgtcccgactccgaaatccgaatccatggccgtcctccgcgcgtcgccgccgccctttctcccccatccgctctcgcgcccctctcagtgcaagcggcgccccacctgccgcgtggtcgcagccacagccagacccagtcctgctccttccaggcccaggagcggcggcgtccatggaggccgccccaagagggggcttcttgcggcaaggagaaggccggcggaggggcgggtgccctgcttgcgggccacggaggcgggggtcggtgcggcaggcgtcgcgaaggaggaagacgagtacctggcgcgggaggccgggtggggcgtgcggcggatggcacgggttggggaggagatgcggcgggtggcgcaggtccaggccgaggccttccacgtccccgtcgcgctcttcaacgacttcttcttcgacttcttcaaagccgaggtgctgtcggcgctcatctacagagtgaggaactcgccgcctgacaggtgcgatcaatgctcttgattgctgtgctacttcataacgctggtagcaatgccaaatagtacttgtactggattttgattagaaagtttaatttgtctagagcaacgtggtggtgtttttggtaggagttcttattcgaatgaacaagttaatgtaatgttcaaatttacatgttctctgatcatatattttacacctgaaatgcattcttgttgctctcaatctgtgctccgaaggcggcaaacatctatgtttttgggtttttttttgtaccagtatatcatcaatcttagttcggtagtgttatgtttgtcaaagacagtaatttaaatcaattgacatttgccatttagtatcgaaataatcccaggcatctgatttactggcaagttattacgttgtgcctcatgacccttctgctaaaattgcaattgacatgtgttggcctgcaggcttcgttaaatccacgcgttaggactagtcgatgcctgaaccttatttagttcgctaacaatgccgcctacaccaactgaactctgttctccttagatacgcttgtttggtggctgaagaagctgaggcagccgaccagccgtcaaaggcaccatatgagaagatcgtcggggttgtggattgcacggtgcaggacgaagacggcatcctaaagcaccttcgaggcgcggatgaatacctctacgtgtcaggaattgcagtcttgccaccattcaggaggaggaaggtagggaccgcactgctgaaggcctgcgaggcactggggctccaatggaggcacgtgttcatggttctgagggcgtacgaggatgacgacggcgctcgaggcctctactccaaggcagggtacagggtcgtgtcaagggatccagactgggtctcctgggtggggaggaggaggcgagttgtcatggtaaaggagctgccggttcacgatgatcaatgacgccggcacggttttgttgaatatgtgtgtgtgtgtcaccagctaatttgtactgtttcttgtccatattcgcggcatcatgcatgtctttttggacaatagaggagagacagttgcctatcttcccaccaaacacaaaatgaaaattgagaagttacagttgacaagttccgtttcagagtctgccaccggcaagtgtacagtatcagctgtattttgcgacattacacaagcactcgtaagcac

SEQ ID NO: 68301 - DNA, 3040 bp, Zea Mays
aaaacattgccaccacctccggccgctccgctctttcctttcaaccggagcgacgagagtcgagagacacgaggtgccgcaagagaaaggggaaatcgcagttatcatcggggaatccgaccccaagcatcgaactgctttcgtgccgtcggctcgttcccggcatgtagctgctacttgtcagctttcaaaggtttctgcatctgcatgacgcctaatctacattgttaaaggttttctgatggatggtgataaggtgaaggaatcagctccggattgtgcgtccggtgcagcagagccaaccaagaagcaggataagaggaaacgtgcctatgctgaatttgatgtggtggacaagaaatctgtatctgctgaatggcagcaagaaatggatgcactgtataaatactacaaggaggtttctggtcatcagctgaacccagaggagctttcatgcaccacaaatgactctattatagcatgcttgctggaggagagcagtctttcttgtgccaagttaacagatggaatctacaagaggatgaagctgcaatatggtgtcactgagtcttcagtgcgcacctcagtactcaacattggtaggagatcttcatatgggatttctgctatggatgtcaatggtctggaggatgagtcggattcaagcctttggtgttgggagacagaagatttggcattattacccttgcatctacgtagtagtttgagcattcgacgcacagctcggaaattaatccataaaaggattctggttctttcgggcaagctggctaccaaagatgccagtaatgcttgtagcaaccagaacagccttatggaaaatgctggggaagcgctagatctagatgagattcgctctatcattgagtcaaaacacaagaatgatgatgacattaaaacggaggcacaagatttccaagccatcaggaaagccgtgaagaaacagcaaatgatggtggggcatattcaaactgagaaaaataagaaagaacgggaacttaggcatatctatgagaaaactgagagagaagcaaaacgcatcgagagagaaaataagcggctaaagaagcatcaggaagaagaagagagggcaaagaaaaagaaggagaaggaagaggctgagttgaaaaggaaggcttcgattcaaaagcaagcaaacctcatggaacgtttttttaaaagaaaggcggatagcaacataggaagttcagatagtcaccacatggagaggactacatgctcaaaatcaacaggaaacattgaagaacttgctgttgcagctacgtcagcaatggattgtacattatgtaaagaaaatcatttgagcatggaggaactccggatgatacatgttgcaaaatggaggacactctttcaacataacagattgcgccattggggtgttaggagaagtcctaagattcagttgtttcttgagctaaggctacaaaagccctctacgcctatagcttctgatagtatgtcaactccaacaaaagaacagtcatccctagagagcacaggaaaccttgatatcaccaagcttctggatgaacttgagataccatctcgttctcagaatagcacatcgtcttcagttttgcttgtgaagaagcttctgcagtttgataatagctctaggccagcatactacggtacctggagaaagaagagttctacagttagcgcaaggcaaccctttcagagggatgaagaactcaattatgatgttgagagtgatgaagaatgggaagaggtggatcctggtgatcctggtgaaagactctctgattatgaggaagatgatgagaaaaccatgaatgaacatgatgccatgattgatgcagaaaaggaaactgagaacagtttcatagtgcctaatgactatctttcagatgatgagggcatgcaatgtgagtctgtatgtgtcagatttgatggaatcagtagcctgctgagcatccctggggttacagttgaggaacttaatgctctactgcaaaggcagaaagctcttcatatcatcacggagcatgctctcaaaatagacagacctctagtcatatgtaacctggatcataggaaacttggcctgctgaatgctgaaggtatcactggaatgctgaagatggagaaaatctgtttgcaagctctttgtatgaagaaataccctggcagccccatcattgatgtgcctgtggttaatacgaccattgaggatggattttgccgatcaaacaaaaagagccctagaacacccgtatcatccaaagccatttcagaatcagacatgcctgaatttggagagtcaaactggtggagttgttacatgagacatttccatatgtctccaaggcacgacttaagaacaaagttggggagattgctgagtttaccaaaaaccggtggcaggttaagcaggatatcttggatcggtacaatttatctctttctccagataaaggtgaaggcctgaaatgtgcagcatcgtgctgctcccagcagtgccagccacccaatgagtcaggtaatacaggcgaatcttcttctccccagtgctccctgaaatccgaaatggtcaggcaacaactcggcgcacaagggtcatcacatggcagcgcacggcacccgagcaccaagatggcaggcgggcagtaagacttgtagcactgcgcatgtacatttgcctgttaggttataaaatgtactatagtatagtaatgtagtttcagtatgtagaagcctagaaaccagcaagcagcaggggccgaagcctgtttttgtgtagctcaggcagtttgtgatgaatggttcccccctgcctcccatgtaaattcacactgcttcctggtgttgttacacacctcatatgcgtttatgtgcttgtatagcagtgcactgtgcacgaggtgttcgcgctactgcagtcatctaaaaccttcgtagatattattgctgtcacttccagaatactaatttgggcctaactcttagagagcaatctatggtcttagagttt

SEQ ID NO: 68302 - DNA, 3079 bp, Zea Mays
aaaacattgccaccacctccggccgctccgctctttcctttcaaccggagcgacgagagtcgagagacacgaggtgccgcaagagaaaggggaaatcgcagttatcatcggggaatccgaccccaagcatcgaactgctttcgtgccgtcggctcgttcccggcatgtagctgctacttgtcagctttcaaaggtttctgcatctgcatgacgcctaatctacattgttaaaggttttctgatggatggtgataaggtgaaggaatcagctccggattgtgcgtccggtgcagcagagccaaccaagaagcaggataagaggaaacgtgcctatgctgaatttgatgtggtggacaagaaatctgtatctgctgaatggcagcaagaaatggatgcactgtataaatactacaaggaggtttctggtcatcagctgaacccagaggagctttcatgcaccacaaatgactctattatagcatgcttgctggaggagagcagtctttcttgtgccaagttaacagatggaatctacaagaggatgaagctgcaatatggtgtcactgagtcttcagtgcgcacctcagtactcaacattggtaggagatcttcatatgggatttctgctatggatgtcaatggtctggaggatgagtcggattcaagcctttggtgttgggagacagaagatttggcattattacccttgcatctacgtagtagtttgagcattcgacgcacagctcggaaattaatccataaaaggattctggttctttcgggcaagctggctaccaaagatgccagtaatgcttgtagcaaccagaacagccttatggaaaatgctggggaagcgctagatctagatgagattcgctctatcattgagtcaaaacacaagaatgatgatgacattaaaacggaggcacaagatttccaagccatcaggaaagccgtgaagaaacagcaaatgatggtggggcatattcaaactgagaaaaataagaaagaacgggaacttaggcatatctatgagaaaactgagagagaagcaaaacgcatcgagagagaaaataagcggctaaagaagcatcaggaagaagaagagagggcaaagaaaaagaaggagaaggaagaggctgagttgaaaaggaaggcttcgattcaaaagcaagcaaacctcatggaacgtttttttaaaagaaaggcggatagcaacataggaagttcagatagtcaccacatggagaggactacatgctcaaaatcaacaggaaacattgaagaacttgctgttgcagctacgtcagcaatggattgtacattatgtaaagaaaatcatttgagcatggaggaactccggatgatacatgttgcaaaatggaggacactctttcaacataacagattgcgccattggggtgttaggagaagtcctaagattcagttgtttcttgagctaaggctacaaaagccctctacgcctatagcttctgatagtatgtcaactccaacaaaagaacagtcatccctagagagcacaggaaaccttgatatcaccaagcttctggatgaacttgagataccatctcgttctcagaatagcacatcgtcttcagttttgcttgtgaagaagcttctgcagtttgataatagctctaggccagcatactacggtacctggagaaagaagagttctacagttagcgcaaggcaaccctttcagagggatgaagaactcaattatgatgttgagagtgatgaagaatgggaagagtcttgatgcaggtggatcctggtgatcctggtgaaagactctctgattatgaggaagatgatgagaaaaccatgaatgaacatgatgccatgattgatgcagaaaaggaaactgagaacagtttcatagtgcctaatgactatctttcagatgatgagggcatgcaatgtgagtctgtatgtgtcagatttgatggaatcagtagcctgctgagcatccctggggttacagttgaggaacttaatgctctactgcaaaggcagaaagctcttcatatcatcacggagcatgctctcaaaatagacagacctctagtcatatgtaacctggatcataggaaacttggcctgctgaatgctgaaggtatcactggaatgctgaagatggagaaaatctgtttgcaagctctttgtatgaagaaataccctggcagccccatcattgatgtgcctgtggttaatacgaccattgaggatggattttgccgatcaaacaaaaagagccctagaacacccgtatcatccaaagccatttcagaatcagacatgcctgaatttgccaaacttgttgcatcatgccctcaagggagagtcaaactggtggagttgttacatgagacatttccatatgtctccaaggcacgacttaagaacaaagttggggagattgctgagtttaccaaaaaccggtggcaggttaagcaggatatcttggatcggtacaatttatctctttctccagataaaggtgaaggcctgaaatgtgcagcatcgtgctgctcccagcagtgccagccacccaatgagtcaggtaatacaggcgaatcttcttctccccagtgctccctgaaatccgaaatggtcaggcaacaactcggcgcacaagggtcatcacatggcagcgcacggcacccgagcaccaagatggcaggcgggcagtaagacttgtagcactgcgcatgtacatttgcctgttaggttataaaatgtactatagtatagtaatgtagtttcagtatgtagaagcctagaaaccagcaagcagcaggggccgaagcctgtttttgtgtagctcaggcagtttgtgatgaatggttcccccctgcctcccatgtaaattcacactgcttcctggtgttgttacacacctcatatgcgtttatgtgcttgtatagcagtgcactgtgcacgaggtgttcgcgctactgcagtcatctaaaaccttcgtagatattattgctgtcacttccagaatactaatttgggcctaactcttagagagcaatctatggtcttagagttt

SEQ ID NO: 68303 - DNA, 3552 bp, Zea Mays
aaaacattgccaccacctccggccgctccgctctttcctttcaaccggagcgacgagagtcgagagacacgaggtgccgcaagagaaaggggaaatcgcagttatcatcggggaatccgaccccaagcatcgaactgctttcgtgccgtcggctcgttcccggcatgtagctgctacttgtcagctttcaaaggtttctgcatctgcatgacgcctaatctacattgttaaaggttttctgatggatggtgataaggtgaaggaatcagctccggattgtgcgtccggtgcagcagagccaaccaagaagcaggataagaggaaacgtgcctatgctgaatttgatgtggtggacaagaaatctgtatctgctgaatggcagcaagaaatggatgcactgtataaatactacaaggaggtttctggtcatcagctgaacccagaggagctttcatgcaccacaaatgactctattatagcatgcttgctggaggagagcagtctttcttgtgccaagttaacagatggaatctacaagaggatgaagctgcaatatggtgtcactgagtcttcagtgcgcacctcagtactcaacattggtaggagatcttcatatgggatttctgctatggatgtcaatggtctggaggatgagtcggattcaagcctttggtgttgggagacagaagatttggcattattacccttgcatctacgtagtagtttgagcattcgacgcacagctcggaaattaatccataaaaggattctggttctttcgggcaagctggctaccaaagatgccagtaatgcttgtagcaaccagaacagccttatggaaaatgctggggaagcgctagatctagatgagattcgctctatcattgagtcaaaacacaagaatgatgatgacattaaaacggaggcacaagatttccaagccatcaggaaagccgtgaagaaacagcaaatgatggtggggcatattcaaactgagaaaaataagaaagaacgggaacttaggcatatctatgagaaaactgagagagaagcaaaacgcatcgagagagaaaataagcggctaaagaagcatcaggaagaagaagagagggcaaagaaaaagaaggagaaggaagaggctgagttgaaaaggaaggcttcgattcaaaagcaagcaaacctcatggaacgtttttttaaaagaaaggcggatagcaacataggaagttcagatagtcaccacatggagaggactacatgctcaaaatcaacaggaaacattgaagaacttgctgttgcagctacgtcagcaatggattgtacattatgtaaagaaaatcatttgagcatggaggaactccggatgatacatgttgcaaaatggaggacactctttcaacataacagattgcgccattggggtgttaggagaagtcctaagattcagttgtttcttgagctaaggctacaaaagccctctacgcctatagcttctgatagtatgtcaactccaacaaaagaacagtcatccctagagagcacaggaaaccttgatatcaccaagcttctggatgaacttgagataccatctcgttctcagaatagcacatcgtcttcagttttgcttgtgaagaagcttctgcagtttgataatagctctaggccagcatactacggtacctggagaaagaagagttagcgcaaggcaaccctttcagagggatgaagaactcaattatgatgttgagagtgatgaagaatgggaagaggtggatcctggtgatcctggtgaaagactctctgattatgaggaagatgatgagaaaaccatgaatgaacatgatgccatgattgatgcagaaaaggaaactgagaacagtttcatagtgcctaatgactatctttcagatgatgaggttataccataatatgtattcctaatatcaacccctgaatatgaaaaatgaaaagaaaatttaagtgacaagtcaatgcaattgctgcagatcatttaaagcatgggttattacttttaatactgaattttatttttccatgtatacaaggatcctcttaatgtgttgtaggtaggggtggtaatgggatgtagattttacactacaaactttaaggattgaatcggattaggatcggcccctattcctattcattttttaactaatttttttttagggccctaactttttgtgaaggggcatttggatcgtgatccattaccagtttaccacccctagttgtaggatgttcttcagaacagttttaatctggccaatgctaactactgattgcacctcaataaatctttgatgaaatcacctcaagtcatgttgctcttgattccttcatggcatgattggttctgcagaaccttcttttattttatgtagggcatgcaatgtgagtctgtatgtgtcagatttgatggaatcagtagcctgctgagcatccctggggttacagttgaggaacttaatgctctactgcaaaggcagaaagctcttcatatcatcacggagcatgctctcaaaatagacagacctctagtcatatgtaacctggatcataggaaacttggcctgctgaatgctgaaggtatcactggaatgctgaagatggagaaaatctgtttgcaagctctttgtatgaagaaataccctggcagccccatcattgatgtgcctgtggttaatacgaccattgaggatggattttgccgatcaaacaaaaagagccctagaacacccgtatcatccaaagccatttcagaatcagacatgcctgaatttgccaaacttgttgcatcatgccctcaagggagagtcaaactggtggagttgttacatgagacatttccatatgtctccaaggcacgacttaagaacaaagttggggagattgctgagtttaccaaaaaccggtggcaggttaagcaggatatcttggatcggtacaatttatctctttctccagataaaggtgaaggcctgaaatgtgcagcatcgtgctgctcccagcagtgccagccacccaatgagtcaggtaatacaggcgaatcttcttctccccagtgctccctgaaatccgaaatggtcaggcaacaactcggcgcacaagggtcatcacatggcagcgcacggcacccgagcaccaagatggcaggcgggcagtaagacttgtagcactgcgcatgtacatttgcctgttaggttataaaatgtactatagtatagtaatgtagtttcagtatgtagaagcctagaaaccagcaagcagcaggggccgaagcctgtttttgtgtagctcaggcagtttgtgatgaatggttcccccctgcctcccatgtaaattcacactgcttcctggtgttgttacacacctcatatgcgtttatgtgcttgtatagcagtgcactgtgcacgaggtgttcgcgctactgcagtcatctaaaaccttcgtagatattattgctgtcacttccagaatactaatttgggcctaactcttagagagcaatctatggtcttagagttt

SEQ ID NO: 68304 - DNA, 3333 bp, Zea Mays
aaaacattgccaccacctccggccgctccgctctttcctttcaaccggagcgacgagagtcgagagacacgaggtgccgcaagagaaaggggaaatcgcagttatcatcggggaatccgaccccaagcatcgaactgctttcgtgccgtcggctcgttcccggcatgtagctgctacttgtcagctttcaaaggtttctgcatctgcatgacgcctaatctacattgttaaaggttttctgatggatggtgataaggtgaaggaatcagctccggattgtgcgtccggtgcagcagagccaaccaagaagcaggataagaggaaacgtgcctatgctgaatttgatgtggtggacaagaaatctgtatctgctgaatggcagcaagaaatggatgcactgtataaatactacaaggaggtttctggtcatcagctgaacccagaggagctttcatgcaccacaaatgactctattatagcatgcttgctggaggagagcagtctttcttgtgccaagttaacagatggaatctacaagaggatgaagctgcaatatggtgtcactgagtcttcagtgcgcacctcagtactcaacattggtaggagatcttcatatgggatttctgctatggatgtcaatggtctggaggatgagtcggattcaagcctttggtgttgggagacagaagatttggcattattacccttgcatctacgtagtagtttgagcattcgacgcacagctcggaaattaatccataaaaggattctggttctttcgggaacgggaacttaggcatatctatgagaaaactgagagagaagcaaaacgcatcgagagagaaaataagcggctaaagaagcatcaggaagaagaagagagggcaaagaaaaagaaggagaaggaagaggctgagttgaaaaggaaggcttcgattcaaaagcaagcaaacctcatggaacgtttttttaaaagaaaggcggatagcaacataggaagttcagatagtcaccacatggagaggactacatgctcaaaatcaacaggaaacattgaagaacttgctgttgcagctacgtcagcaatggattgtacattatgtaaagaaaatcatttgagcatggaggaactccggatgatacatgttgcaaaatggaggacactctttcaacataacagattgcgccattggggtgttaggagaagtcctaagattcagttgtttcttgagctaaggctacaaaagccctctacgcctatagcttctgatagtatgtcaactccaacaaaagaacagtcatccctagagagcacaggaaaccttgatatcaccaagcttctggatgaacttgagataccatctcgttctcagaatagcacatcgtcttcagttttgcttgtgaagaagcttctgcagtttgataatagctctaggccagcatactacggtacctggagaaagaagagttctacagttagcgcaaggcaaccctttcagagggatgaagaactcaattatgatgttgagagtgatgaagaatgggaagaggtggatcctggtgatcctggtgaaagactctctgattatgaggaagatgatgagaaaaccatgaatgaacatgatgccatgattgatgcagaaaaggaaactgagaacagtttcatagtgcctaatgactatctttcagatgatgaggttataccataatatgtattcctaatatcaacccctgaatatgaaaaatgaaaagaaaatttaagtgacaagtcaatgcaattgctgcagatcatttaaagcatgggttattacttttaatactgaattttatttttccatgtatacaaggatcctcttaatgtgttgtaggtaggggtggtaatgggatgtagattttacactacaaactttaaggattgaatcggattaggatcggcccctattcctattcattttttaactaatttttttttagggccctaactttttgtgaaggggcatttggatcgtgatccattaccagtttaccacccctagttgtaggatgttcttcagaacagttttaatctggccaatgctaactactgattgcacctcaataaatctttgatgaaatcacctcaagtcatgttgctcttgattccttcatggcatgattggttctgcagaaccttcttttattttatgtagggcatgcaatgtgagtctgtatgtgtcagatttgatggaatcagtagcctgctgagcatccctggggttacagttgaggaacttaatgctctactgcaaaggcagaaagctcttcatatcatcacggagcatgctctcaaaatagacagacctctagtcatatgtaacctggatcataggaaacttggcctgctgaatgctgaaggtatcactggaatgctgaagatggagaaaatctgtttgcaagctctttgtatgaagaaataccctggcagccccatcattgatgtgcctgtggttaatacgaccattgaggatggattttgccgatcaaacaaaaagagccctagaacacccgtatcatccaaagccatttcagaatcagacatgcctgaatttgccaaacttgttgcatcatgccctcaagggagagtcaaactggtggagttgttacatgagacatttccatatgtctccaaggcacgacttaagaacaaagttggggagattgctgagtttaccaaaaaccggtggcaggttaagcaggatatcttggatcggtacaatttatctctttctccagataaaggtgaaggcctgaaatgtgcagcatcgtgctgctcccagcagtgccagccacccaatgagtcaggtaatacaggcgaatcttcttctccccagtgctccctgaaatccgaaatggtcaggcaacaactcggcgcacaagggtcatcacatggcagcgcacggcacccgagcaccaagatggcaggcgggcagtaagacttgtagcactgcgcatgtacatttgcctgttaggttataaaatgtactatagtatagtaatgtagtttcagtatgtagaagcctagaaaccagcaagcagcaggggccgaagcctgtttttgtgtagctcaggcagtttgtgatgaatggttcccccctgcctcccatgtaaattcacactgcttcctggtgttgttacacacctcatatgcgtttatgtgcttgtatagcagtgcactgtgcacgaggtgttcgcgctactgcagtcatctaaaaccttcgtagatattattgctgtcacttccagaatactaatttgggcctaactcttagagagcaatctatggtcttagagttt

SEQ ID NO: 68305 - DNA, 3305 bp, Zea Mays
aaaacattgccaccacctccggccgctccgctctttcctttcaaccggagcgacgagagtcgagagacacgaggtgccgcaagagaaaggggaaatcgcagttatcatcggggaatccgaccccaagcatcgaactgctttcgtgccgtcggctcgttcccggcatgtagctgctacttgtcagctttcaaaggtttctgcatctgcatgacgcctaatctacattgttaaaggttttctgatggatggtgataaggtgaaggaatcagctccggattgtgcgtccggtgcagcagagccaaccaagaagcaggataagaggaaacgtgcctatgctgaatttgatgtggtggacaagaaatctgtatctgctgaatggcagcaagaaatggatgcactgtataaatactacaaggaggtttctggtcatcagctgaacccagaggagctttcatgcaccacaaatgactctattatagcatgcttgctggaggagagcagtctttcttgtgccaagttaacagatggaatctacaagaggatgaagctgcaatatggtgtcactgagtcttcagtgcgcacctcagtactcaacattggtaggagatcttcatatgggatttctgctatggatgtcaatggtctggaggatgagtcggattcaagcctttggtgttgggagacagaagatttggcattattacccttgcatctacgtagtagtttgagcattcgacgcacagctcggaaattaatccataaaaggattctggttctttcgggaacgggaacttaggcatatctatgagaaaactgagagagaagcaaaacgcatcgagagagaaaataagcggctaaagaagcatcaggaagaagaagagagggcaaagaaaaagaaggagaaggaagaggctgagttgaaaaggaaggcttcgattcaaaagcaagcaaacctcatggaacgtttttttaaaagaaaggcggatagcaacataggaagttcagatagtcaccacatggagaggactacatgctcaaaatcaacaggaaacattgaagaacttgctgttgcagctacgtcagcaatggattgtacattatgtaaagaaaatcatttgagcatggaggaactccggatgatacatgttgcaaaatggaggacactctttcaacataacagattgcgccattggggtgttaggagaagtcctaagattcagttgtttcttgagctaaggctacaaaagccctctacgcctatagcttctgatagtatgtcaactccaacaaaagaacagtcatccctagagagcacaggaaaccttgatatcaccaagcttctggatgaacttgagataccatctcgttctcagaatagcacatcgtcttcagttttgcttgtgaagaagcttctgcagtttgataatagctctaggccagcatactacggtacctggagaaagaagagttctacagttagcgcaaggcaaccctttcagagggatgaagaactcaattatgatgttgagagtgatgaagaatgggaagaggtggatcctggtgatcctggtgaaagactctctgattatgaggaagatgatgagaaaaccatgaatgaacatgatgccatgattgatgcagaaaaggaaactgagaacagtttcatagtgcctaatgactatctttcagatgatgaggttataccataatatgtattcctaatatcaacccctgaatatgaaaaatgaaaagaaaatttaagtgacaagtcaatgcaattgctgcagatcatttaaagcatgggttattacttttaatactgaattttatttttccatgtatacaaggatcctcttaatgtgttgtaggtaggggtggtaatgggatgtagattttacactacaaactttaaggattgaatcggattaggatcggcccctattcctattcattttttaactaatttttttttagggccctaactttttgtgaaggggcatttggatcgtgatccattaccagtttaccacccctagttgtaggatgttcttcagaacagttttaatctggccaatgctaactactgattgcacctcaataaatctttgatgaaatcacctcaagtcatgttgctcttgattccttcatggcatgattggttctgcagaaccttcttttattttatgtagggcatgcaatgtgagtctgtatgtgtcagatttgatggaatcagtagcctgctgagcatccctggggttacagttgaggaacttaatgctctactgcaaaggcagaaagctcttcatatcatcacggagcatgctctcaaaatagacagacctctagtcatatgtaacctggatcataggaaacttggcctgctgaatgctgaaggtatcactggaatgctgaagatggagaaaatctgtttgcaagctctttgtatgaagaaataccctggcagccccatcattgatgtgcctgtggttaatacgaccattgaggatggattttgccgatcaaacaaaaagagccctagaacacccgtatcatccaaagccatttcagaatcagacatgcctgaatttggagagtcaaactggtggagttgttacatgagacatttccatatgtctccaaggcacgacttaagaacaaagttggggagattgctgagtttaccaaaaaccggtggcaggttaagcaggatatcttggatcggtacaatttatctctttctccagataaaggtgaaggcctgaaatgtgcagcatcgtgctgctcccagcagtgccagccacccaatgagtcaggtaatacaggcgaatcttcttctccccagtgctccctgaaatccgaaatggtcaggcaacaactcggcgcacaagggtcatcacatggcagcgcacggcacccgagcaccaagatggcaggcgggcagtaagacttgtagcactgcgcatgtacatttgcctgttaggttataaaatgtactatagtatagtaatgtagtttcagtatgtagaagcctagaaaccagcaagcagcaggggccgaagcctgtttttgtgtagctcaggcagtttgtgatgaatggttcccccctgcctcccatgtaaattcacactgcttcctggtgttgttacacacctcatatgcgtttatgtgcttgtatagcagtgcactgtgcacgaggtgttcgcgctactgcagtcatctaaaaccttcgtagatattattgctgtcacttccagaatactaatttgggcctaactcttagagagcaatctatggtcttagagttt

SEQ ID NO: 68306 - DNA, 2770 bp, Zea Mays
aaaacattgccaccacctccggccgctccgctctttcctttcaaccggagcgacgagagtcgagagacacgaggtgccgcaagagaaaggggaaatcgcagttatcatcggggaatccgaccccaagcatcgaactgctttcgtgccgtcggctcgttcccggttttctgatggatggtgataaggtgaaggaatcagctccggattgtgcgtccggtgcagcagagccaaccaagaagcaggataagaggaaacgtgcctatgctgaatttgatgtggtggacaagaaatctgtatctgctgaatggcagcaagaaatggatgcactgtataaatactacaaggaggtttctggtcatcagctgaacccagaggagctttcatgcaccacaaatgactctattatagcatgcttgctggaggagagcagtctttcttgtgccaagttaacagatggaatctacaagaggatgaagctgcaatatggtgtcactgagtcttcagtgcgcacctcagtactcaacattggtaggagatcttcatatgggatttctgctatggatgtcaatggtctggaggatgagtcggattcaagcctttggtgttgggagacagaagatttggcattattacccttgcatctacgtagtagtttgagcattcgacgcacagctcggaaattaatccataaaaggattctggttctttcgggaacgggaacttaggcatatctatgagaaaactgagagagaagcaaaacgcatcgagagagaaaataagcggctaaagaagcatcaggaagaagaagagagggcaaagaaaaagaaggagaaggaagaggctgagttgaaaaggaaggcttcgattcaaaagcaagcaaacctcatggaacgtttttttaaaagaaaggcggatagcaacataggaagttcagatagtcaccacatggagaggactacatgctcaaaatcaacaggaaacattgaagaacttgctgttgcagctacgtcagcaatggattgtacattatgtaaagaaaatcatttgagcatggaggaactccggatgatacatgttgcaaaatggaggacactctttcaacataacagattgcgccattggggtgttaggagaagtcctaagattcagttgtttcttgagctaaggctacaaaagccctctacgcctatagcttctgatagtatgtcaactccaacaaaagaacagtcatccctagagagcacaggaaaccttgatatcaccaagcttctggatgaacttgagataccatctcgttctcagaatagcacatcgtcttcagttttgcttgtgaagaagcttctgcagtttgataatagctctaggccagcatactacggtacctggagaaagaagagttctacagttagcgcaaggcaaccctttcagagggatgaagaactcaattatgatgttgagagtgatgaagaatgggaagaggtggatcctggtgatcctggtgaaagactctctgattatgaggaagatgatgagaaaaccatgaatgaacatgatgccatgattgatgcagaaaaggaaactgagaacagtttcatagtgcctaatgactatctttcagatgatgagggcatgcaatgtgagtctgtatgtgtcagatttgatggaatcagtagcctgctgagcatccctggggttacagttgaggaacttaatgctctactgcaaaggcagaaagctcttcatatcatcacggagcatgctctcaaaatagacagacctctagtcatatgtaacctggatcataggaaacttggcctgctgaatgctgaaggtatcactggaatgctgaagatggagaaaatctgtttgcaagctctttgtatgaagaaataccctggcagccccatcattgatgtgcctgtggttaatacgaccattgaggatggattttgccgatcaaacaaaaagagccctagaacacccgtatcatccaaagccatttcagaatcagacatgcctgaatttgccaaacttgttgcatcatgccctcaagggagagtcaaactggtggagttgttacatgagacatttccatatgtctccaaggcacgacttaagaacaaagttggggagattgctgagtttaccaaaaaccggtggcaggttaagcaggatatcttggatcggtacaatttatctctttctccagataaaggtgaaggcctgaaatgtgcagcatcgtgctgctcccagcagtgccagccacccaatgagtcaggtaatacaggcgaatcttcttctccccagtgctccctgaaatccgaaatggtcaggcaacaactcggcgcacaagggtcatcacatggcagcgcacggcacccgagcaccaagatggcaggcgggcagtaagacttgtagcactgcgcatgtacatttgcctgttaggttataaaatgtactatagtatagtaatgtagtttcagtatgtagaagcctagaaaccagcaagcagcaggggccgaagcctgtttttgtgtagctcaggcagtttgtgatgaatggttcccccctgcctcccatgtaaattcacactgcttcctggtgttgttacacacctcatatgcgtttatgtgcttgtatagcagtgcactgtgcacgaggtgttcgcgctactgcagtcatctaaaaccttcgtagatattattgctgtcacttccagaatactaatttgggcctaactcttagagagcaatctatggtcttagagttt

SEQ ID NO: 68307 - DNA, 3262 bp, Zea Mays
aaaacattgccaccacctccggccgctccgctctttcctttcaaccggagcgacgagagtcgagagacacgaggtgccgcaagagaaaggggaaatcgcagttatcatcggggaatccgaccccaagcatcgaactgctttcgtgccgtcggctcgttcccggttttctgatggatggtgataaggtgaaggaatcagctccggattgtgcgtccggtgcagcagagccaaccaagaagcaggataagaggaaacgtgcctatgctgaatttgatgtggtggacaagaaatctgtatctgctgaatggcagcaagaaatggatgcactgtataaatactacaaggaggtttctggtcatcagctgaacccagaggagctttcatgcaccacaaatgactctattatagcatgcttgctggaggagagcagtctttcttgtgccaagttaacagatggaatctacaagaggatgaagctgcaatatggtgtcactgagtcttcagtgcgcacctcagtactcaacattggtaggagatcttcatatgggatttctgctatggatgtcaatggtctggaggatgagtcggattcaagcctttggtgttgggagacagaagatttggcattattacccttgcatctacgtagtagtttgagcattcgacgcacagctcggaaattaatccataaaaggattctggttctttcgggaacgggaacttaggcatatctatgagaaaactgagagagaagcaaaacgcatcgagagagaaaataagcggctaaagaagcatcaggaagaagaagagagggcaaagaaaaagaaggagaaggaagaggctgagttgaaaaggaaggcttcgattcaaaagcaagcaaacctcatggaacgtttttttaaaagaaaggcggatagcaacataggaagttcagatagtcaccacatggagaggactacatgctcaaaatcaacaggaaacattgaagaacttgctgttgcagctacgtcagcaatggattgtacattatgtaaagaaaatcatttgagcatggaggaactccggatgatacatgttgcaaaatggaggacactctttcaacataacagattgcgccattggggtgttaggagaagtcctaagattcagttgtttcttgagctaaggctacaaaagccctctacgcctatagcttctgatagtatgtcaactccaacaaaagaacagtcatccctagagagcacaggaaaccttgatatcaccaagcttctggatgaacttgagataccatctcgttctcagaatagcacatcgtcttcagttttgcttgtgaagaagcttctgcagtttgataatagctctaggccagcatactacggtacctggagaaagaagagttctacagttagcgcaaggcaaccctttcagagggatgaagaactcaattatgatgttgagagtgatgaagaatgggaagaggtggatcctggtgatcctggtgaaagactctctgattatgaggaagatgatgagaaaaccatgaatgaacatgatgccatgattgatgcagaaaaggaaactgagaacagtttcatagtgcctaatgactatctttcagatgatgaggttataccataatatgtattcctaatatcaacccctgaatatgaaaaatgaaaagaaaatttaagtgacaagtcaatgcaattgctgcagatcatttaaagcatgggttattacttttaatactgaattttatttttccatgtatacaaggatcctcttaatgtgttgtaggtaggggtggtaatgggatgtagattttacactacaaactttaaggattgaatcggattaggatcggcccctattcctattcattttttaactaatttttttttagggccctaactttttgtgaaggggcatttggatcgtgatccattaccagtttaccacccctagttgtaggatgttcttcagaacagttttaatctggccaatgctaactactgattgcacctcaataaatctttgatgaaatcacctcaagtcatgttgctcttgattccttcatggcatgattggttctgcagaaccttcttttattttatgtagggcatgcaatgtgagtctgtatgtgtcagatttgatggaatcagtagcctgctgagcatccctggggttacagttgaggaacttaatgctctactgcaaaggcagaaagctcttcatatcatcacggagcatgctctcaaaatagacagacctctagtcatatgtaacctggatcataggaaacttggcctgctgaatgctgaaggtatcactggaatgctgaagatggagaaaatctgtttgcaagctctttgtatgaagaaataccctggcagccccatcattgatgtgcctgtggttaatacgaccattgaggatggattttgccgatcaaacaaaaagagccctagaacacccgtatcatccaaagccatttcagaatcagacatgcctgaatttgccaaacttgttgcatcatgccctcaagggagagtcaaactggtggagttgttacatgagacatttccatatgtctccaaggcacgacttaagaacaaagttggggagattgctgagtttaccaaaaaccggtggcaggttaagcaggatatcttggatcggtacaatttatctctttctccagataaaggtgaaggcctgaaatgtgcagcatcgtgctgctcccagcagtgccagccacccaatgagtcaggtaatacaggcgaatcttcttctccccagtgctccctgaaatccgaaatggtcaggcaacaactcggcgcacaagggtcatcacatggcagcgcacggcacccgagcaccaagatggcaggcgggcagtaagacttgtagcactgcgcatgtacatttgcctgttaggttataaaatgtactatagtatagtaatgtagtttcagtatgtagaagcctagaaaccagcaagcagcaggggccgaagcctgtttttgtgtagctcaggcagtttgtgatgaatggttcccccctgcctcccatgtaaattcacactgcttcctggtgttgttacacacctcatatgcgtttatgtgcttgtatagcagtgcactgtgcacgaggtgttcgcgctactgcagtcatctaaaaccttcgtagatattattgctgtcacttccagaatactaatttgggcctaactcttagagagcaatctatggtcttagagttt

SEQ ID NO: 68308 - DNA, 3060 bp, Zea Mays
aaaacattgccaccacctccggccgctccgctctttcctttcaaccggagcgacgagagtcgagagacacgaggtgccgcaagagaaaggggaaatcgcagttatcatcggggaatccgaccccaagcatcgaactgctttcgtgccgtcggctcgttcccggcatgtagctgctacttgtcagctttcaaaggtttctgcatctgcatgacgcctaatctacattgttaaaggttttctgatggatggtgataaggtgaaggaatcagctccggattgtgcgtccggtgcagcagagccaaccaagaagcaggataagaggaaacgtgcctatgctgaatttgatgtggtggacaagaaatctgtatctgctgaatggcagcaagaaatggatgcactgtataaatactacaaggaggtttctggtcatcagctgaacccagaggagctttcatgcaccacaaatgactctattatagcatgcttgctggaggagagcagtctttcttgtgccaagttaacagatggaatctacaagaggatgaagctgcaatatggtgtcactgagtcttcagtgcgcacctcagtactcaacattggtaggagatcttcatatgggatttctgctatggatgtcaatggtctggaggatgagtcggattcaagcctttggtgttgggagacagaagatttggcattattacccttgcatctacgtagtagtttgagcattcgacgcacagctcggaaattaatccataaaaggattctggttctttcgggcaagctggctaccaaagatgccagtaatgcttgtagcaaccagaacagccttatggaaaatgctggggaagcgctagatctagatgagattcgctctatcattgagtcaaaacacaagaatgatgatgacattaaaacggaggcacaagatttccaagccatcaggaaagccgtgaagaaacagcaaatgatggtggggcatattcaaactgagaaaaataagaaagaacgggaacttaggcatatctatgagaaaactgagagagaagcaaaacgcatcgagagagaaaataagcggctaaagaagcatcaggaagaagaagagagggcaaagaaaaagaaggagaaggaagaggctgagttgaaaaggaaggcttcgattcaaaagcaagcaaacctcatggaacgtttttttaaaagaaaggcggatagcaacataggaagttcagatagtcaccacatggagaggactacatgctcaaaatcaacaggaaacattgaagaacttgctgttgcagctacgtcagcaatggattgtacattatgtaaagaaaatcatttgagcatggaggaactccggatgatacatgttgcaaaatggaggacactctttcaacataacagattgcgccattggggtgttaggagaagtcctaagattcagttgtttcttgagctaaggctacaaaagccctctacgcctatagcttctgatagtatgtcaactccaacaaaagaacagtcatccctagagagcacaggaaaccttgatatcaccaagcttctggatgaacttgagataccatctcgttctcagaatagcacatcgtcttcagttttgcttgtgaagaagcttctgcagtttgataatagctctaggccagcatactacggtacctggagaaagaagagttagcgcaaggcaaccctttcagagggatgaagaactcaattatgatgttgagagtgatgaagaatgggaagaggtggatcctggtgatcctggtgaaagactctctgattatgaggaagatgatgagaaaaccatgaatgaacatgatgccatgattgatgcagaaaaggaaactgagaacagtttcatagtgcctaatgactatctttcagatgatgagggcatgcaatgtgagtctgtatgtgtcagatttgatggaatcagtagcctgctgagcatccctggggttacagttgaggaacttaatgctctactgcaaaggcagaaagctcttcatatcatcacggagcatgctctcaaaatagacagacctctagtcatatgtaacctggatcataggaaacttggcctgctgaatgctgaaggtatcactggaatgctgaagatggagaaaatctgtttgcaagctctttgtatgaagaaataccctggcagccccatcattgatgtgcctgtggttaatacgaccattgaggatggattttgccgatcaaacaaaaagagccctagaacacccgtatcatccaaagccatttcagaatcagacatgcctgaatttgccaaacttgttgcatcatgccctcaagggagagtcaaactggtggagttgttacatgagacatttccatatgtctccaaggcacgacttaagaacaaagttggggagattgctgagtttaccaaaaaccggtggcaggttaagcaggatatcttggatcggtacaatttatctctttctccagataaaggtgaaggcctgaaatgtgcagcatcgtgctgctcccagcagtgccagccacccaatgagtcaggtaatacaggcgaatcttcttctccccagtgctccctgaaatccgaaatggtcaggcaacaactcggcgcacaagggtcatcacatggcagcgcacggcacccgagcaccaagatggcaggcgggcagtaagacttgtagcactgcgcatgtacatttgcctgttaggttataaaatgtactatagtatagtaatgtagtttcagtatgtagaagcctagaaaccagcaagcagcaggggccgaagcctgtttttgtgtagctcaggcagtttgtgatgaatggttcccccctgcctcccatgtaaattcacactgcttcctggtgttgttacacacctcatatgcgtttatgtgcttgtatagcagtgcactgtgcacgaggtgttcgcgctactgcagtcatctaaaaccttcgtagatattattgctgtcacttccagaatactaatttgggcctaactcttagagagcaatctatggtcttagagttt

SEQ ID NO: 68309 - DNA, 3257 bp, Zea Mays
gaaaacattgccaccacctccggccgctccgctctttcctttcaaccggagcgacgagagtcgagagacacgaggtgccgcaagagaaaggggaaatcgcagttatcatcggggaatccgaccccaagcatcgaactgctttcgtgccgtcggctcgttcccggttttctgatggatggtgataaggtgaaggaatcagctccggattgtgcgtccggtgcagcagagccaaccaagaagcaggataagaggaaacgtgcctatgctgaatttgatgtggtggacaagaaatctgtatctgctgaatggcagcaagaaatggatgcactgtataaatactacaaggaggtttctggtcatcagctgaacccagaggagctttcatgcaccacaaatgactctattatagcatgcttgctggaggagagcagtctttcttgtgccaagttaacagatggaatctacaagaggatgaagctgcaatatggtgtcactgagtcttcagtgcgcacctcagtactcaacattggtaggagatcttcatatgggatttctgctatggatgtcaatggtctggaggatgagtcggattcaagcctttggtgttgggagacagaagatttggcattattacccttgcatctacgtagtagtttgagcattcgacgcacagctcggaaattaatccataaaaggattctggttctttcgggaacgggaacttaggcatatctatgagaaaactgagagagaagcaaaacgcatcgagagagaaaataagcggctaaagaagcatcaggaagaagaagagagggcaaagaaaaagaaggagaaggaagaggctgagttgaaaaggaaggcttcgattcaaaagcaagcaaacctcatggaacgtttttttaaaagaaaggcggatagcaacataggaagttcagatagtcaccacatggagaggactacatgctcaaaatcaacaggaaacattgaagaacttgctgttgcagctacgtcagcaatggattgtacattatgtaaagaaaatcatttgagcatggaggaactccggatgatacatgttgcaaaatggaggacactctttcaacataacagattgcgccattggggtgttaggagaagtcctaagattcagttgtttcttgagctaaggctacaaaagccctctacgcctatagcttctgatagtatgtcaactccaacaaaagaacagtcatccctagagagcacaggaaaccttgatatcaccaagcttctggatgaacttgagataccatctcgttctcagaatagcacatcgtcttcagttttgcttgtgaagaagcttctgcagtttgataatagctctaggccagcatactacggtacctggagaaagaagagttctacagttagcgcaaggcaaccctttcagagggatgaagaactcaattatgatgttgagagtgatgaagaatgggaagaggtggatcctggtgatcctggtgaaagactctctgattatgaggaagatgatgagaaaaccatgaatgaacatgatgccatgattgatgcagaaaaggaaactgagaacagtttcatagtgcctaatgactatctttcagatgatgaggttataccataatatgtattcctaatatcaacccctgaatatgaaaaatgaaaagaaaatttaagtgacaagtcaatgcaattgctgcagatcatttaaagcatgggttattacttttaatactgaattttatttttccatgtatacaaggatcctcttaatgtgttgtaggtaggggtggtaatgggatgtagattttacactacaaactttaaggattgaatcggattaggatcggcccctattcctattcattttttaactaatttttttttagggccctaactttttgtgaaggggcatttggatcgtgatccattaccagtttaccacccctagttgtaggatgttcttcagaacagttttaatctggccaatgctaactactgattgcacctcaataaatctttgatgaaatcacctcaagtcatgttgctcttgattccttcatggcatgattggttctgcagaaccttcttttattttatgtagggcatgcaatgtgagtctgtatgtgtcagatttgatggaatcagtagcctgctgagcatccctggggttacagttgaggaacttaatgctctactgcaaaggcagaaagctcttcatatcatcacggagcatgctctcaaaatagacagacctctagtcatatgtaacctggatcataggaaacttggcctgctgaatgctgaaggtatcactggaatgctgaagatggagaaaatctgtttgcaagctctttgtatgaagaaataccctggcagccccatcattgatgtgcctgtggttaatacgaccattgaggatggattttgccgatcaaacaaaaagagccctagaacacccgtatcatccaaagccatttcagaatcagacatgcctgaatttgccaaacttgttgcatcatgccctcaagggagagtcaaactggtggagttgttacatgagacatttccatatgtctccaaggcacgacttaagaacaaagttggggagattgctgagtttaccaaaaaccggtggcagcaggatatcttggatcggtacaatttatctctttctccagataaaggtgaaggcctgaaatgtgcagcatcgtgctgctcccagcagtgccagccacccaatgagtcaggtaatacaggcgaatcttcttctccccagtgctccctgaaatccgaaatggtcaggcaacaactcggcgcacaagggtcatcacatggcagcgcacggcacccgagcaccaagatggcaggcgggcagtaagacttgtagcactgcgcatgtacatttgcctgttaggttataaaatgtactatagtatagtaatgtagtttcagtatgtagaagcctagaaaccagcaagcagcaggggccgaagcctgtttttgtgtagctcaggcagtttgtgatgaatggttcccccctgcctcccatgtaaattcacactgcttcctggtgttgttacacacctcatatgcgtttatgtgcttgtatagcagtgcactgtgcacgaggtgttcgcgctactgcagtcatctaaaaccttcgtagatattattgctgtcacttccagaatactaatttgggcctaactcttagagagcaatctatggtcttagagttt

SEQ ID NO: 68310 - DNA, 3491 bp, Zea Mays
agaaaacattgccaccacctccggccgctccgctctttcctttcaaccggagcgacgagagtcgagagacacgaggtgccgcaagagaaaggggaaatcgcagttatcatcggggaatccgaccccaagcatcgaactgctttcgtgccgtcggctcgttcccggttttctgatggatggtgataaggtgaaggaatcagctccggattgtgcgtccggtgcagcagagccaaccaagaagcaggataagaggaaacgtgcctatgctgaatttgatgtggtggacaagaaatctgtatctgctgaatggcagcaagaaatggatgcactgtataaatactacaaggaggtttctggtcatcagctgaacccagaggagctttcatgcaccacaaatgactctattatagcatgcttgctggaggagagcagtctttcttgtgccaagttaacagatggaatctacaagaggatgaagctgcaatatggtgtcactgagtcttcagtgcgcacctcagtactcaacattggtaggagatcttcatatgggatttctgctatggatgtcaatggtctggaggatgagtcggattcaagcctttggtgttgggagacagaagatttggcattattacccttgcatctacgtagtagtttgagcattcgacgcacagctcggaaattaatccataaaaggattctggttctttcgggcaagctggctaccaaagatgccagtaatgcttgtagcaaccagaacagccttatggaaaatgctggggaagcgctagatctagatgagattcgctctatcattgagtcaaaacacaagaatgatgatgacattaaaacggaggcacaagatttccaagccatcaggaaagccgtgaagaaacagcaaatgatggtggggcatattcaaactgagaaaaataagaaagaacgggaacttaggcatatctatgagaaaactgagagagaagcaaaacgcatcgagagagaaaataagcggctaaagaagcatcaggaagaagaagagagggcaaagaaaaagaaggagaaggaagaggctgagttgaaaaggaaggcttcgattcaaaagcaagcaaacctcatggaacgtttttttaaaagaaaggcggatagcaacataggaagttcagatagtcaccacatggagaggactacatgctcaaaatcaacaggaaacattgaagaacttgctgttgcagctacgtcagcaatggattgtacattatgtaaagaaaatcatttgagcatggaggaactccggatgatacatgttgcaaaatggaggacactctttcaacataacagattgcgccattggggtgttaggagaagtcctaagattcagttgtttcttgagctaaggctacaaaagccctctacgcctatagcttctgatagtatgtcaactccaacaaaagaacagtcatccctagagagcacaggaaaccttgatatcaccaagcttctggatgaacttgagataccatctcgttctcagaatagcacatcgtcttcagttttgcttgtgaagaagcttctgcagtttgataatagctctaggccagcatactacggtacctggagaaagaagagttctacagttagcgcaaggcaaccctttcagagggatgaagaactcaattatgatgttgagagtgatgaagaatgggaagaggtggatcctggtgatcctggtgaaagactctctgattatgaggaagatgatgagaaaaccatgaatgaacatgatgccatgattgatgcagaaaaggaaactgagaacagtttcatagtgcctaatgactatctttcagatgatgaggttataccataatatgtattcctaatatcaacccctgaatatgaaaaatgaaaagaaaatttaagtgacaagtcaatgcaattgctgcagatcatttaaagcatgggttattacttttaatactgaattttatttttccatgtatacaaggatcctcttaatgtgttgtaggtaggggtggtaatgggatgtagattttacactacaaactttaaggattgaatcggattaggatcggcccctattcctattcattttttaactaatttttttttagggccctaactttttgtgaaggggcatttggatcgtgatccattaccagtttaccacccctagttgtaggatgttcttcagaacagttttaatctggccaatgctaactactgattgcacctcaataaatctttgatgaaatcacctcaagtcatgttgctcttgattccttcatggcatgattggttctgcagaaccttcttttattttatgtagggcatgcaatgtgagtctgtatgtgtcagatttgatggaatcagtagcctgctgagcatccctggggttacagttgaggaacttaatgctctactgcaaaggcagaaagctcttcatatcatcacggagcatgctctcaaaatagacagacctctagtcatatgtaacctggatcataggaaacttggcctgctgaatgctgaaggtatcactggaatgctgaagatggagaaaatctgtttgcaagctctttgtatgaagaaataccctggcagccccatcattgatgtgcctgtggttaatacgaccattgaggatggattttgccgatcaaacaaaaagagccctagaacacccgtatcatccaaagccatttcagaatcagacatgcctgaatttgccaaacttgttgcatcatgccctcaagggagagtcaaactggtggagttgttacatgagacatttccatatgtctccaaggcacgacttaagaacaaagttggggagattgctgagtttaccaaaaaccggtggcaggttaagcaggatatcttggatcggtacaatttatctctttctccagataaaggtgaaggcctgaaatgtgcagcatcgtgctgctcccagcagtgccagccacccaatgagtcaggtaatacaggcgaatcttcttctccccagtgctccctgaaatccgaaatggtcaggcaacaactcggcgcacaagggtcatcacatggcagcgcacggcacccgagcaccaagatggcaggcgggcagtaagacttgtagcactgcgcatgtacatttgcctgttaggttataaaatgtactatagtatagtaatgtagtttcagtatgtagaagcctagaaaccagcaagcagcaggggccgaagcctgtttttgtgtagctcaggcagtttgtgatgaatggttcccccctgcctcccatgtaaattcacactgcttcctggtgttgttacacacctcatatgcgtttatgtgcttgtatagcagtgcactgtgcacgaggtgttcgcgctactgcagtcatctaaaaccttcgtagatattattgctgtcacttccagaatactaatttgggcctaactcttagagagcaatctatggtcttagagttt

SEQ ID NO: 68311 - DNA, 2864 bp, Zea Mays
agaaaacattgccaccacctccggccgctccgctctttcctttcaaccggagcgacgagagtcgagagacacgaggtgccgcaagagaaaggggaaatcgcagttatcatcggggaatccgaccccaagcatcgaactgctttcgtgccgtcggctcgttcccggcatgtagctgctacttgtcagctttcaaaggtttctgcatctgcatgacgcctaatctacattgttaaaggttttctgatggatggtgataaggtgaaggaatcagctccggattgtgcgtccggtgcagcagagccaaccaagaagcaggataagaggaaacgtgcctatgctgaatttgatgtggtggacaagaaatctgtatctgctgaatggcagcaagaaatggatgcactgtataaatactacaaggaggtttctggtcatcagctgaacccagaggagctttcatgcaccacaaatgactctattatagcatgcttgctggaggagagcagtctttcttgtgccaagttaacagatggaatctacaagaggatgaagctgcaatatggtgtcactgagtcttcagtgcgcacctcagtactcaacattggtaggagatcttcatatgggatttctgctatggatgtcaatggtctggaggatgagtcggattcaagcctttggtgttgggagacagaagatttggcattattacccttgcatctacgtagtagtttgagcattcgacgcacagctcggaaattaatccataaaaggattctggttctttcgggaacgggaacttaggcatatctatgagaaaactgagagagaagcaaaacgcatcgagagagaaaataagcggctaaagaagcatcaggaagaagaagagagggcaaagaaaaagaaggagaaggaagaggctgagttgaaaaggaaggcttcgattcaaaagcaagcaaacctcatggaacgtttttttaaaagaaaggcggatagcaacataggaagttcagatagtcaccacatggagaggactacatgctcaaaatcaacaggaaacattgaagaacttgctgttgcagctacgtcagcaatggattgtacattatgtaaagaaaatcatttgagcatggaggaactccggatgatacatgttgcaaaatggaggacactctttcaacataacagattgcgccattggggtgttaggagaagtcctaagattcagttgtttcttgagctaaggctacaaaagccctctacgcctatagcttctgatagtatgtcaactccaacaaaagaacagtcatccctagagagcacaggaaaccttgatatcaccaagcttctggatgaacttgagataccatctcgttctcagaatagcacatcgtcttcagttttgcttgtgaagaagcttctgcagtttgataatagctctaggccagcatactacggtacctggagaaagaagagttctacagttagcgcaaggcaaccctttcagagggatgaagaactcaattatgatgttgagagtgatgaagaatgggaagaggtggatcctggtgatcctggtgaaagactctctgattatgaggaagatgatgagaaaaccatgaatgaacatgatgccatgattgatgcagaaaaggaaactgagaacagtttcatagtgcctaatgactatctttcagatgatgagggcatgcaatgtgagtctgtatgtgtcagatttgatggaatcagtagcctgctgagcatccctggggttacagttgaggaacttaatgctctactgcaaaggcagaaagctcttcatatcatcacggagcatgctctcaaaatagacagacctctagtcatatgtaacctggatcataggaaacttggcctgctgaatgctgaaggtatcactggaatgctgaagatggagaaaatctgtttgcaagctctttgtatgaagaaataccctggcagccccatcattgatgtgcctgtggttaatacgaccattgaggatggattttgccgatcaaacaaaaagagccctagaacacccgtatcatccaaagccatttcagaatcaaacatgcccttagtattcagtcttgatattctgcaggccaaacttgttgcatcatgccctcaagggagagtcaaactggtggagttgttacatgagacatttccatatgtctccaaggcacgacttaagaacaaagttggggagattgctgagtttaccaaaaaccggtggcaggttaagcaggatatcttggatcggtacaatttatctctttctccagataaaggtgaaggcctgaaatgtgcagcatcgtgctgctcccagcagtgccagccacccaatgagtcaggtaatacaggcgaatcttcttctccccagtgctccctgaaatccgaaatggtcaggcaacaactcggcgcacaagggtcatcacatggcagcgcacggcacccgagcaccaagatggcaggcgggcagtaagacttgtagcactgcgcatgtacatttgcctgttaggttataaaatgtactatagtatagtaatgtagtttcagtatgtagaagcctagaaaccagcaagcagcaggggccgaagcctgtttttgtgtagctcaggcagtttgtgatgaatggttcccccctgcctcccatgtaaattcacactgcttcctggtgttgttacacacctcatatgcgtttatgtgcttgtatagcagtgcactgtgcacgaggtgttcgcgctactgcagtcatctaaaaccttcgtagatattattgctgtcacttccagaatactaatttgggcctaactcttagagagcaatctatggtcttagagttt

SEQ ID NO: 68312 - DNA, 3538 bp, Zea Mays
gggaagaaaacattgccaccacctccggccgctccgctctttcctttcaaccggagcgacgagagtcgagagacacgaggtgccgcaagagaaaggggaaatcgcagttatcatcggggaatccgaccccaagcatcgaactgctttcgtgccgtcggctcgttcccggcatgtagctgctacttgtcagctttcaaaggtttctgcatctgcatgacgcctaatctacattgttaaaggttttctgatggatggtgataaggtgaaggaatcagctccggattgtgcgtccggtgcagcagagccaaccaagaagcaggataagaggaaacgtgcctatgctgaatttgatgtggtggacaagaaatctgtatctgctgaatggcagcaagaaatggatgcactgtataaatactacaaggaggtttctggtcatcagctgaacccagaggagctttcatgcaccacaaatgactctattatagcatgcttgctggaggagagcagtctttcttgtgccaagttaacagatggaatctacaagaggatgaagctgcaatatggtgtcactgagtcttcagtgcgcacctcagtactcaacattggtaggagatcttcatatgggatttctgctatggatgtcaatggtctggaggatgagtcggattcaagcctttggtgttgggagacagaagatttggcattattacccttgcatctacgtagtagtttgagcattcgacgcacagctcggaaattaatccataaaaggattctggttctttcgggcaagctggctaccaaagatgccagtaatgcttgtagcaaccagaacagccttatggaaaatgctggggaagcgctagatctagatgagattcgctctatcattgagtcaaaacacaagaatgatgatgacattaaaacggaggcacaagatttccaagccatcaggaaagccgtgaagaaacagcaaatgatggtggggcatattcaaactgagaaaaataagaaagaacgggaacttaggcatatctatgagaaaactgagagagaagcaaaacgcatcgagagagaaaataagcggctaaagaagcatcaggaagaagaagagagggcaaagaaaaagaaggagaaggaagaggctgagttgaaaaggaaggcttcgattcaaaagcaagcaaacctcatggaacgtttttttaaaagaaaggcggatagcaacataggaagttcagatagtcaccacatggagaggactacatgctcaaaatcaacaggaaacattgaagaacttgctgttgcagctacgtcagcaatggattgtacattatgtaaagaaaatcatttgagcatggaggaactccggatgatacatgttgcaaaatggaggacactctttcaacataacagattgcgccattggggtgttaggagaagtcctaagattcagttgtttcttgagctaaggctacaaaagccctctacgcctatagcttctgatagtatgtcaactccaacaaaagaacagtcatccctagagagcacaggaaaccttgatatcaccaagcttctggatgaacttgagataccatctcgttctcagaatagcacatcgtcttcagttttgcttgtgaagaagcttctgcagtttgataatagctctaggccagcatactacggtacctggagaaagaagagttctacagttagcgcaaggcaaccctttcagagggatgaagaactcaattatgatgttgagagtgatgaagaatgggaagaggtggatcctggtgatcctggtgaaagactctctgattatgaggaagatgatgagaaaaccatgaatgaacatgatgccatgattgatgcagaaaaggaaactgagaacagtttcatagtgcctaatgactatctttcagatgatgaggttataccataatatgtattcctaatatcaacccctgaatatgaaaaatgaaaagaaaatttaagtgacaagtcaatgcaattgctgcagatcatttaaagcatgggttattacttttaatactgaattttatttttccatgtatacaaggatcctcttaatgtgttgtaggtaggggtggtaatgggatgtagattttacactacaaactttaaggattgaatcggattaggatcggcccctattcctattcattttttaactaatttttttttagggccctaactttttgtgaaggggcatttggatcgtgatccattaccagtttaccacccctagttgtaggatgttcttcagaacagttttaatctggccaatgctaactactgattgcacctcaataaatctttgatgaaatcacctcaagtcatgttgctcttgattccttcatggcatgattggttctgcagaaccttcttttattttatgtagggcatgcaatgtgagtctgtatgtgtcagatttgatggaatcagtagcctgctgagcatccctggggttacagttgaggaacttaatgctctactgcaaaggcagaaagctcttcatatcatcacggagcatgctctcaaaatagacagacctctagtcatatgtaacctggatcataggaaacttggcctgctgaatgctgaaggtatcactggaatgctgaagatggagaaaatctgtttgcaagctctttgtatgaagaaataccctggcagccccatcattgatgtgcctgtggttaatacgaccattgaggatggattttgccgatcaaacaaaaagagccctagaacacccgtatcatccaaagccatttcagaatcagacatgcctgaatttggagagtcaaactggtggagttgttacatgagacatttccatatgtctccaaggcacgacttaagaacaaagttggggagattgctgagtttaccaaaaaccggtggcaggttaagcaggatatcttggatcggtacaatttatctctttctccagataaaggtgaaggcctgaaatgtgcagcatcgtgctgctcccagcagtgccagccacccaatgagtcaggtaatacaggcgaatcttcttctccccagtgctccctgaaatccgaaatggtcaggcaacaactcggcgcacaagggtcatcacatggcagcgcacggcacccgagcaccaagatggcaggcgggcagtaagacttgtagcactgcgcatgtacatttgcctgttaggttataaaatgtactatagtatagtaatgtagtttcagtatgtagaagcctagaaaccagcaagcagcaggggccgaagcctgtttttgtgtagctcaggcagtttgtgatgaatggttcccccctgcctcccatgtaaattcacactgcttcctggtgttgttacacacctcatatgcgtttatgtgcttgtatagcagtgcactgtgcacgaggtgttcgcgctactgcagtcatctaaaaccttcgtagatattattgctgtcacttccagaatactaatttgggcctaactcttagagagcaatctatggtcttagagttt

SEQ ID NO: 68313 - DNA, 3566 bp, Zea Mays
gggaagaaaacattgccaccacctccggccgctccgctctttcctttcaaccggagcgacgagagtcgagagacacgaggtgccgcaagagaaaggggaaatcgcagttatcatcggggaatccgaccccaagcatcgaactgctttcgtgccgtcggctcgttcccggcatgtagctgctacttgtcagctttcaaaggtttctgcatctgcatgacgcctaatctacattgttaaaggttttctgatggatggtgataaggtgaaggaatcagctccggattgtgcgtccggtgcagcagagccaaccaagaagcaggataagaggaaacgtgcctatgctgaatttgatgtggtggacaagaaatctgtatctgctgaatggcagcaagaaatggatgcactgtataaatactacaaggaggtttctggtcatcagctgaacccagaggagctttcatgcaccacaaatgactctattatagcatgcttgctggaggagagcagtctttcttgtgccaagttaacagatggaatctacaagaggatgaagctgcaatatggtgtcactgagtcttcagtgcgcacctcagtactcaacattggtaggagatcttcatatgggatttctgctatggatgtcaatggtctggaggatgagtcggattcaagcctttggtgttgggagacagaagatttggcattattacccttgcatctacgtagtagtttgagcattcgacgcacagctcggaaattaatccataaaaggattctggttctttcgggcaagctggctaccaaagatgccagtaatgcttgtagcaaccagaacagccttatggaaaatgctggggaagcgctagatctagatgagattcgctctatcattgagtcaaaacacaagaatgatgatgacattaaaacggaggcacaagatttccaagccatcaggaaagccgtgaagaaacagcaaatgatggtggggcatattcaaactgagaaaaataagaaagaacgggaacttaggcatatctatgagaaaactgagagagaagcaaaacgcatcgagagagaaaataagcggctaaagaagcatcaggaagaagaagagagggcaaagaaaaagaaggagaaggaagaggctgagttgaaaaggaaggcttcgattcaaaagcaagcaaacctcatggaacgtttttttaaaagaaaggcggatagcaacataggaagttcagatagtcaccacatggagaggactacatgctcaaaatcaacaggaaacattgaagaacttgctgttgcagctacgtcagcaatggattgtacattatgtaaagaaaatcatttgagcatggaggaactccggatgatacatgttgcaaaatggaggacactctttcaacataacagattgcgccattggggtgttaggagaagtcctaagattcagttgtttcttgagctaaggctacaaaagccctctacgcctatagcttctgatagtatgtcaactccaacaaaagaacagtcatccctagagagcacaggaaaccttgatatcaccaagcttctggatgaacttgagataccatctcgttctcagaatagcacatcgtcttcagttttgcttgtgaagaagcttctgcagtttgataatagctctaggccagcatactacggtacctggagaaagaagagttctacagttagcgcaaggcaaccctttcagagggatgaagaactcaattatgatgttgagagtgatgaagaatgggaagaggtggatcctggtgatcctggtgaaagactctctgattatgaggaagatgatgagaaaaccatgaatgaacatgatgccatgattgatgcagaaaaggaaactgagaacagtttcatagtgcctaatgactatctttcagatgatgaggttataccataatatgtattcctaatatcaacccctgaatatgaaaaatgaaaagaaaatttaagtgacaagtcaatgcaattgctgcagatcatttaaagcatgggttattacttttaatactgaattttatttttccatgtatacaaggatcctcttaatgtgttgtaggtaggggtggtaatgggatgtagattttacactacaaactttaaggattgaatcggattaggatcggcccctattcctattcattttttaactaatttttttttagggccctaactttttgtgaaggggcatttggatcgtgatccattaccagtttaccacccctagttgtaggatgttcttcagaacagttttaatctggccaatgctaactactgattgcacctcaataaatctttgatgaaatcacctcaagtcatgttgctcttgattccttcatggcatgattggttctgcagaaccttcttttattttatgtagggcatgcaatgtgagtctgtatgtgtcagatttgatggaatcagtagcctgctgagcatccctggggttacagttgaggaacttaatgctctactgcaaaggcagaaagctcttcatatcatcacggagcatgctctcaaaatagacagacctctagtcatatgtaacctggatcataggaaacttggcctgctgaatgctgaaggtatcactggaatgctgaagatggagaaaatctgtttgcaagctctttgtatgaagaaataccctggcagccccatcattgatgtgcctgtggttaatacgaccattgaggatggattttgccgatcaaacaaaaagagccctagaacacccgtatcatccaaagccatttcagaatcagacatgcctgaatttgccaaacttgttgcatcatgccctcaagggagagtcaaactggtggagttgttacatgagacatttccatatgtctccaaggcacgacttaagaacaaagttggggagattgctgagtttaccaaaaaccggtggcaggttaagcaggatatcttggatcggtacaatttatctctttctccagataaaggtgaaggcctgaaatgtgcagcatcgtgctgctcccagcagtgccagccacccaatgagtcaggtaatacaggcgaatcttcttctccccagtgctccctgaaatccgaaatggtcaggcaacaactcggcgcacaagggtcatcacatggcagcgcacggcacccgagcaccaagatggcaggcgggcagtaagacttgtagcactgcgcatgtacatttgcctgttaggttataaaatgtactatagtatagtaatgtagtttcagtatgtagaagcctagaaaccagcaagcagcaggggccgaagcctgtttttgtgtagctcaggcagtttgtgatgaatggttcccccctgcctcccatgtaaattcacactgcttcctggtgttgttacacacctcatatgcgtttatgtgcttgtatagcagtgcactgtgcacgaggtgttcgcgctactgcagtcatctaaaaccttcgtagatattattgctgtcacttccagaatactaatttgggcctaactcttagagagcaatctatggtcttagagttt

SEQ ID NO: 68314 - DNA, 2847 bp, Zea Mays
gggaagaaaacattgccaccacctccggccgctccgctctttcctttcaaccggagcgacgagagtcgagagacacgaggtgccgcaagagaaaggggaaatcgcagttatcatcggggaatccgaccccaagcatcgaactgctttcgtgccgtcggctcgttcccggcatgtagctgctacttgtcagctttcaaaggtttctgcatctgcatgacgcctaatctacattgttaaaggttttctgatggatggtgataaggtgaaggaatcagctccggattgtgcgtccggtgcagcagagccaaccaagaagcaggataagaggaaacgtgcctatgctgaatttgatgtggtggacaagaaatctgtatctgctgaatggcagcaagaaatggatgcactgtataaatactacaaggaggtttctggtcatcagctgaacccagaggagctttcatgcaccacaaatgactctattatagcatgcttgctggaggagagcagtctttcttgtgccaagttaacagatggaatctacaagaggatgaagctgcaatatggtgtcactgagtcttcagtgcgcacctcagtactcaacattggtaggagatcttcatatgggatttctgctatggatgtcaatggtctggaggatgagtcggattcaagcctttggtgttgggagacagaagatttggcattattacccttgcatctacgtagtagtttgagcattcgacgcacagctcggaaattaatccataaaaggattctggttctttcgggaacgggaacttaggcatatctatgagaaaactgagagagaagcaaaacgcatcgagagagaaaataagcggctaaagaagcatcaggaagaagaagagagggcaaagaaaaagaaggagaaggaagaggctgagttgaaaaggaaggcttcgattcaaaagcaagcaaacctcatggaacgtttttttaaaagaaaggcggatagcaacataggaagttcagatagtcaccacatggagaggactacatgctcaaaatcaacaggaaacattgaagaacttgctgttgcagctacgtcagcaatggattgtacattatgtaaagaaaatcatttgagcatggaggaactccggatgatacatgttgcaaaatggaggacactctttcaacataacagattgcgccattggggtgttaggagaagtcctaagattcagttgtttcttgagctaaggctacaaaagccctctacgcctatagcttctgatagtatgtcaactccaacaaaagaacagtcatccctagagagcacaggaaaccttgatatcaccaagcttctggatgaacttgagataccatctcgttctcagaatagcacatcgtcttcagttttgcttgtgaagaagcttctgcagtttgataatagctctaggccagcatactacggtacctggagaaagaagagttctacagttagcgcaaggcaaccctttcagagggatgaagaactcaattatgatgttgagagtgatgaagaatgggaagaggtggatcctggtgatcctggtgaaagactctctgattatgaggaagatgatgagaaaaccatgaatgaacatgatgccatgattgatgcagaaaaggaaactgagaacagtttcatagtgcctaatgactatctttcagatgatgagggcatgcaatgtgagtctgtatgtgtcagatttgatggaatcagtagcctgctgagcatccctggggttacagttgaggaacttaatgctctactgcaaaggcagaaagctcttcatatcatcacggagcatgctctcaaaatagacagacctctagtcatatgtaacctggatcataggaaacttggcctgctgaatgctgaaggtatcactggaatgctgaagatggagaaaatctgtttgcaagctctttgtatgaagaaataccctggcagccccatcattgatgtgcctgtggttaatacgaccattgaggatggattttgccgatcaaacaaaaagagccctagaacacccgtatcatccaaagccatttcagaatcagacatgcctgaatttgccaaacttgttgcatcatgccctcaagggagagtcaaactggtggagttgttacatgagacatttccatatgtctccaaggcacgacttaagaacaaagttggggagattgctgagtttaccaaaaaccggtggcaggttaagcaggatatcttggatcggtacaatttatctctttctccagataaaggtgaaggcctgaaatgtgcagcatcgtgctgctcccagcagtgccagccacccaatgagtcaggtaatacaggcgaatcttcttctccccagtgctccctgaaatccgaaatggtcaggcaacaactcggcgcacaagggtcatcacatggcagcgcacggcacccgagcaccaagatggcaggcgggcagtaagacttgtagcactgcgcatgtacatttgcctgttaggttataaaatgtactatagtatagtaatgtagtttcagtatgtagaagcctagaaaccagcaagcagcaggggccgaagcctgtttttgtgtagctcaggcagtttgtgatgaatggttcccccctgcctcccatgtaaattcacactgcttcctggtgttgttacacacctcatatgcgtttatgtgcttgtatagcagtgcactgtgcacgaggtgttcgcgctactgcagtcatctaaaaccttcgtagatattattgctgtcacttccagaatactaatttgggcctaactcttagagagcaatctatggtcttagagttt

SEQ ID NO: 68315 - DNA, 3093 bp, Zea Mays
cacgaatctccacgcgcccgggaagaaaacattgccaccacctccggccgctccgctctttcctttcaaccggagcgacgagagtcgagagacacgaggtgccgcaagagaaaggggaaatcgcagttatcatcggggaatccgaccccaagcatcgaactgctttcgtgccgtcggctcgttcccggcatgtagctgctacttgtcagctttcaaaggtttctgcatctgcatgacgcctaatctacattgttaaaggttttctgatggatggtgataaggtgaaggaatcagctccggattgtgcgtccggtgcagcagagccaaccaagaagcaggataagaggaaacgtgcctatgctgaatttgatgtggtggacaagaaatctgtatctgctgaatggcagcaagaaatggatgcactgtataaatactacaaggaggtttctggtcatcagctgaacccagaggagctttcatgcaccacaaatgactctattatagcatgcttgctggaggagagcagtctttcttgtgccaagttaacagatggaatctacaagaggatgaagctgcaatatggtgtcactgagtcttcagtgcgcacctcagtactcaacattggtaggagatcttcatatgggatttctgctatggatgtcaatggtctggaggatgagtcggattcaagcctttggtgttgggagacagaagatttggcattattacccttgcatctacgtagtagtttgagcattcgacgcacagctcggaaattaatccataaaaggattctggttctttcgggcaagctggctaccaaagatgccagtaatgcttgtagcaaccagaacagccttatggaaaatgctggggaagcgctagatctagatgagattcgctctatcattgagtcaaaacacaagaatgatgatgacattaaaacggaggcacaagatttccaagccatcaggaaagccgtgaagaaacagcaaatgatggtggggcatattcaaactgagaaaaataagaaagaacgggaacttaggcatatctatgagaaaactgagagagaagcaaaacgcatcgagagagaaaataagcggctaaagaagcatcaggaagaagaagagagggcaaagaaaaagaaggagaaggaagaggctgagttgaaaaggaaggcttcgattcaaaagcaagcaaacctcatggaacgtttttttaaaagaaaggcggatagcaacataggaagttcagatagtcaccacatggagaggactacatgctcaaaatcaacaggaaacattgaagaacttgctgttgcagctacgtcagcaatggattgtacattatgtaaagaaaatcatttgagcatggaggaactccggatgatacatgttgcaaaatggaggacactctttcaacataacagattgcgccattggggtgttaggagaagtcctaagattcagttgtttcttgagctaaggctacaaaagccctctacgcctatagcttctgatagtatgtcaactccaacaaaagaacagtcatccctagagagcacaggaaaccttgatatcaccaagcttctggatgaacttgagataccatctcgttctcagaatagcacatcgtcttcagttttgcttgtgaagaagcttctgcagtttgataatagctctaggccagcatactacggtacctggagaaagaagagttctacagttagcgcaaggcaaccctttcagagggatgaagaactcaattatgatgttgagagtgatgaagaatgggaagaggtggatcctggtgatcctggtgaaagactctctgattatgaggaagatgatgagaaaaccatgaatgaacatgatgccatgattgatgcagaaaaggaaactgagaacagtttcatagtgcctaatgactatctttcagatgatgagggcatgcaatgtgagtctgtatgtgtcagatttgatggaatcagtagcctgctgagcatccctggggttacagttgaggaacttaatgctctactgcaaaggcagaaagctcttcatatcatcacggagcatgctctcaaaatagacagacctctagtcatatgtaacctggatcataggaaacttggcctgctgaatgctgaaggtatcactggaatgctgaagatggagaaaatctgtttgcaagctctttgtatgaagaaataccctggcagccccatcattgatgtgcctgtggttaatacgaccattgaggatggattttgccgatcaaacaaaaagagccctagaacacccgtatcatccaaagccatttcagaatcagacatgcctgaatttgccaaacttgttgcatcatgccctcaagggagagtcaaactggtggagttgttacatgagacatttccatatgtctccaaggcacgacttaagaacaaagttggggagattgctgagtttaccaaaaaccggtggcaggttaagcaggatatcttggatcggtacaatttatctctttctccagataaaggtgaaggcctgaaatgtgcagcatcgtgctgctcccagcagtgccagccacccaatgagtcaggtaatacaggcgaatcttcttctccccagtgctccctgaaatccgaaatggtcaggcaacaactcggcgcacaagggtcatcacatggcagcgcacggcacccgagcaccaagatggcaggcgggcagtaagacttgtagcactgcgcatgtacatttgcctgttaggttataaaatgtactatagtatagtaatgtagtttcagtatgtagaagcctagaaaccagcaagcagcaggggccgaagcctgtttttgtgtagctcaggcagtttgtgatgaatggttcccccctgcctcccatgtaaattcacactgcttcctggtgttgttacacacctcatatgcgtttatgtgcttgtatagcagtgcactgtgcacgaggtgttcgcgctactgcagtcatctaaaaccttcgtagatattattgctgtcacttccagaatactaatttgggcctaactcttagagagcaatctatggtcttagagttt

SEQ ID NO: 68316 - DNA, 3033 bp, Zea Mays
ttcctcggccacacgaatctccacgcgcccgggaagaaaacattgccaccacctccggccgctccgctctttcctttcaaccggagcgacgagagtcgagagacacgaggtgccgcaagagaaaggggaaatcgcagttatcatcggggaatccgaccccaagcatcgaactgctttcgtgccgtcggctcgttcccggttttctgatggatggtgataaggtgaaggaatcagctccggattgtgcgtccggtgcagcagagccaaccaagaagcaggataagaggaaacgtgcctatgctgaatttgatgtggtggacaagaaatctgtatctgctgaatggcagcaagaaatggatgcactgtataaatactacaaggaggtttctggtcatcagctgaacccagaggagctttcatgcaccacaaatgactctattatagcatgcttgctggaggagagcagtctttcttgtgccaagttaacagatggaatctacaagaggatgaagctgcaatatggtgtcactgagtcttcagtgcgcacctcagtactcaacattggtaggagatcttcatatgggatttctgctatggatgtcaatggtctggaggatgagtcggattcaagcctttggtgttgggagacagaagatttggcattattacccttgcatctacgtagtagtttgagcattcgacgcacagctcggaaattaatccataaaaggattctggttctttcgggcaagctggctaccaaagatgccagtaatgcttgtagcaaccagaacagccttatggaaaatgctggggaagcgctagatctagatgagattcgctctatcattgagtcaaaacacaagaatgatgatgacattaaaacggaggcacaagatttccaagccatcaggaaagccgtgaagaaacagcaaatgatggtggggcatattcaaactgagaaaaataagaaagaacgggaacttaggcatatctatgagaaaactgagagagaagcaaaacgcatcgagagagaaaataagcggctaaagaagcatcaggaagaagaagagagggcaaagaaaaagaaggagaaggaagaggctgagttgaaaaggaaggcttcgattcaaaagcaagcaaacctcatggaacgtttttttaaaagaaaggcggatagcaacataggaagttcagatagtcaccacatggagaggactacatgctcaaaatcaacaggaaacattgaagaacttgctgttgcagctacgtcagcaatggattgtacattatgtaaagaaaatcatttgagcatggaggaactccggatgatacatgttgcaaaatggaggacactctttcaacataacagattgcgccattggggtgttaggagaagtcctaagattcagttgtttcttgagctaaggctacaaaagccctctacgcctatagcttctgatagtatgtcaactccaacaaaagaacagtcatccctagagagcacaggaaaccttgatatcaccaagcttctggatgaacttgagataccatctcgttctcagaatagcacatcgtcttcagttttgcttgtgaagaagcttctgcagtttgataatagctctaggccagcatactacggtacctggagaaagaagagttctacagttagcgcaaggcaaccctttcagagggatgaagaactcaattatgatgttgagagtgatgaagaatgggaagaggtggatcctggtgatcctggtgaaagactctctgattatgaggaagatgatgagaaaaccatgaatgaacatgatgccatgattgatgcagaaaaggaaactgagaacagtttcatagtgcctaatgactatctttcagatgatgagggcatgcaatgtgagtctgtatgtgtcagatttgatggaatcagtagcctgctgagcatccctggggttacagttgaggaacttaatgctctactgcaaaggcagaaagctcttcatatcatcacggagcatgctctcaaaatagacagacctctagtcatatgtaacctggatcataggaaacttggcctgctgaatgctgaaggtatcactggaatgctgaagatggagaaaatctgtttgcaagctctttgtatgaagaaataccctggcagccccatcattgatgtgcctgtggttaatacgaccattgaggatggattttgccgatcaaacaaaaagagccctagaacacccgtatcatccaaagccatttcagaatcagacatgcctgaatttgccaaacttgttgcatcatgccctcaagggagagtcaaactggtggagttgttacatgagacatttccatatgtctccaaggcacgacttaagaacaaagttggggagattgctgagtttaccaaaaaccggtggcaggttaagcaggatatcttggatcggtacaatttatctctttctccagataaaggtgaaggcctgaaatgtgcagcatcgtgctgctcccagcagtgccagccacccaatgagtcaggtaatacaggcgaatcttcttctccccagtgctccctgaaatccgaaatggtcaggcaacaactcggcgcacaagggtcatcacatggcagcgcacggcacccgagcaccaagatggcaggcgggcagtaagacttgtagcactgcgcatgtacatttgcctgttaggttataaaatgtactatagtatagtaatgtagtttcagtatgtagaagcctagaaaccagcaagcagcaggggccgaagcctgtttttgtgtagctcaggcagtttgtgatgaatggttcccccctgcctcccatgtaaattcacactgcttcctggtgttgttacacacctcatatgcgtttatgtgcttgtatagcagtgcactgtgcacgaggtgttcgcgctactgcagtcatctaaaaccttcgtagatattattgctgtcacttccagaatactaatttgggcctaactcttagagagcaatctatggtcttagagttt

SEQ ID NO: 68317 - DNA, 1384 bp, Zea Mays
acggtggccgccagcgtgaggctctggaaggttgctgtggcgcccgggagggggagacagggcaatgacgcctggggaaggggcgtgggggaggcgaagcacgggccataaattgtgtgtcttactcaagcatttttaagattatataattgaactagtactcaagcattttaaaattataattaggcacttcttattcagagccaactccaagagtctttatatcattctttattgttagaaatacaaattttagtgcaatagtgctctcaaacagcttcttcaattatatcttcaaatattgtcgccatctatttcggatttctcacaaactaaagatggagagctgagttggctatctagattgctcacaggaaatagagaaattattgaagggtggaaatatagagagagctatttctattcaaatggctctataaatgatatgatttagagagtgtgtttaaaaaaagaatcttggagatcctctttataagcataagttgtgttttactaattgtaaaatatgaagtacttccagcaaaatatgaagtactggtcctagattaccagcaggtgaattcgtcatttcttaatctgtattaccatccgaataggtaaatatttctgtgtatgattataggacctctgaggaaatctgtaatattttcagttatcttataatgtaaattttcaggtcttactgcacatgcatttggagaaagtcgacaggatgcagcgcaacaaagattttgcagccgaacagcaatgatcccaacacattgtttgtcatgtacatctcaaagcacaaccatggattctccaatgaaccacaccttgaatcgtctagtccacctggaacaggtcgtaaacgaaaggaatatgatgtgtccagtgttgaaaacacatctaaaaagcaactgcatgactctttggagtgagttgtcaggccccagttttacagcagtttcatgcatggaggacatacaccaatcagctcctagttgcattgatgacatccttgcactgcaaccctatgaatgaaaagacacatcaggtcaataggggaggtctgaagatcagtttttggaattctctgtggcagtccatatctagttgaaatgcaacagcctagtattgaaaacttgaaaaagaattctgattgggaatacctgattaagcagatcaatgattaccgtctaggattctatgcaccataggaacaggaagcttcaagaactaaaatgtcaccttccgcaatgcacgtatatgagatttcctttttagctggtcacagtaccgtattttcagctttggttctgaagtgaacttgggcaacagcttcagtttgctgcatctgacgatgctgaaatatttaagattg

SEQ ID NO: 68318 - DNA, 3017 bp, Zea Mays
agcaaacaaaatgtgaagatttatgcacatatacttataactggtaataagcctatagtcgagacaccaccgtcttctcctccctccgtctgaaagctcgaaattcctcttcttttttttctctctctctctctcactggctttctttcatggcttccaagaaggcgtccgatctactactactactcaatgctgccaccactggttctatccgtacggtcgtgcgccagctgttctcccggctggtcttttcgctgcagatggagtgctccctgtccatggagatagtttccttctggctgtggctggaaggcaatggccaccccgatttcctcgcgagggtagagtcgcttgacaaccaccgtctccgggggatcgccttcgccgggaagatgttcatcgaaggtctgcgccgtaggtccagcggcggccacttgaacagccgcggatctgtggaggaggaggaggaggaagaagaaggctatttccaggaagaagccatggaaggtatcgtcttctacctcaacaacttctgctacgaggctctggaagacattctagagatagcggaggccaaggaacgtgtcgtctaccaccgtgcccgtggcaaccaagttcagcagcagcagcagcagagcagcaagggtaaagctcccatgatgatgagcacgaaggatctcttgtctaagatcaaggcctcctttactactgctgctcggagcagccatgaagaaggctcgacgagttctagaagcatgccatcgcccaagaaacaggtcctcagagacatagagaacccaatcgaccagtgcctgtcaacgacgacgtaccctttggcgacccttttcgattccctgaagctgagggacgatgatccagaagccgatccagctatcatcaaggtgccgcgacgacgacagcccagtattgtaccacgtgacgagagaactctcttcgtgactttctccaacggataccccttcaccgcggatgaactgaactttggaggtgttgaagtcatatgcgtggaggatccaatcgaacccagaccaccgctctatgcgcacatcacatttttcacgcaggagacgatcctccacatcctccgtgggagcgcaagggtgaagttcgtgatacgagggaagcatctgtgggctcgccagttcgttccaaagcggaagaaagttcggaactgatctagctagtacgtgtctgcctgtatgttggatcggagctcatgcaaatgcaaataaaaataagatattggaataaaaccaccatccccagctacctctttctccttataatataataacccctacatatatggaagcttacccggccggcatggttaataatgtttgtgtgatgatgtgagagcatcgacgacaatgttgtcttatgtaatgctacctggtggtatacacatgcctggtggtatacacatgtacctgactatacctgaggatgtttaacttcaaaccatttctgttgtgtgcatgctccattatattgattttgccactcaactgcatgagaggttcagttttcacccatttgatcatatttctgtacgtggacggcatatatacatatttttaactgattaatgatcttcaaggtgctatacagctatacttgccaagaagtaaactaatgtgtttcagctctctatatatatgttattggctcattaattatgtgccaatgggttttcccccctactagaagcttttgttgctgtcctgttgcatataagaggatgaactaattaaacatcagatgttgtttcatatatacattgggtctcgagttgtttaggtcatcccaagtggttgttataaacttttgtagtatttctcctacattttcttgttgtcctcaagttagatataataattctcgtgtcacgaaaagtgttgttttagacattggtactgaatttttttgataaagcttgtgcatcgactcatgttttgtaaatgttcaacggcgttaaaaagtttgtgaatcaactctgattctatgaaaatgtagttgagatctcccatattttttgggcaacaatatggatataacaaaaataacttatttgactccagcaaatttagattgatatttttttgggggagaggggggtttaggggagggggactgtacaaagtgttttaaaaatcttttagccattctccaagaacggtaagttagatttgtgcaaagtcgacactaacatatatcatttaagtctaattcttcataaaagcaaagcacttttatgtaatataatgcaattgcagagagtggggaggaaatatatttgccgtcatttctatgaaaaacaaacccttcaagtattagtttataatgcctattttagaccatgaccattacaactccatagtctatttgttgtctcttaacctatacctaataacacagagaagttttaagatataagctttgcaatatgtgttttatattattaggtatgtacttatgtagttatctttagataacccacatattttttaagacagatgtttaagccaagggacaaacaactcatgcacttagaattttgctaatgtattgtccaaacaaatgacgaaggattattactgtgcatgtgtcacactcatttttacaactaaattattgtgctagtagacttgactctgttataaaactacataagtctaagttcattatttatcccacctgtgatgttcatatatttatttaccaattttgctcccaatgtatccatcatttttctattgaccaaatgcaatgtgatgtaaagcacttaagatctttgtcaagaagatgatgaaagaaatgggcagcttgtccggccaatggcttaccagctttttgtcttatctgtcgaatggcatgtgtcatatctaatagcagattgaccgccaccaatatagcaagctatgagccagcacgcaatcaatagaaatatcagtatgaagaggatggaaaagcttactgaatactgaaaggacaac

SEQ ID NO: 68319 - DNA, 3071 bp, Zea Mays
ggccatgtctagccaatgcaggcaagggagattggaagcaaacaaaatgtgaagatttatgcacatatacttataactggtaataagcctatagtcgagacaccaccgtcttctcctccctccgtctgaaagctcgaaattcctcttcttttttttctctctctctctctcactggctttctttcatggcttccaagaaggcgtccgatctactactactactcaatgctgccaccactggttctatccgtacggtcgtgcgccagctgttctcccggctggtcttttcgctgcagatggagtgctccctgtccatggagatagtttccttctggctgtggctggaaggcaatggccaccccgatttcctcgcgagggtagagtcgcttgacaaccaccgtctccgggggatcgccttcgccgggaagatgttcatcgaaggtctgcgccgtaggtccagcggcggccacttgaacagccgcggatctgtggaggaggaggaggaggaagaagaaggctatttccaggaagaagccatggaaggtatcgtcttctacctcaacaacttctgctacgaggctctggaagacattctagagatagcggaggccaaggaacgtgtcgtctaccaccgtgcccgtggcaaccaagttcagcagcagcagcagcagagcagcaagggtaaagctcccatgatgatgagcacgaaggatctcttgtctaagatcaaggcctcctttactactgctgctcggagcagccatgaagaaggctcgacgagttctagaagcatgccatcgcccaagaaacaggtcctcagagacatagagaacccaatcgaccagtgcctgtcaacgacgacgtaccctttggcgacccttttcgattccctgaagctgagggacgatgatccagaagccgatccagctatcatcaaggtgccgcgacgacgacagcccagtattgtaccacgtgacgagagaactctcttcgtgactttctccaacggataccccttcaccgcggatgaactgtacgaattctttatggggaactttggaggtgttgaagtcatatgcgtggaggatccaatcgaacccagaccaccgctctatgcgcacatcacatttttcacgcaggagacgatcctccacatcctccgtgggagcgcaagggtgaagttcgtgatacgagggaagcatctgtgggctcgccagttcgttccaaagcggaagaaagttcggaactgatctagctagtacgtgtctgcctgtatgttggatcggagctcatgcaaatgcaaataaaaataagatattggaataaaaccaccatccccagctacctctttctccttataatataataacccctacatatatggaagcttacccggccggcatggttaataatgtttgtgtgatgatgtgagagcatcgacgacaatgttgtcttatgtaatgctacctggtggtatacacatgcctggtggtatacacatgtacctgactatacctgaggatgtttaacttcaaaccatttctgttgtgtgcatgctccattatattgattttgccactcaactgcatgagaggttcagttttcacccatttgatcatatttctgtacgtggacggcatatatacatatttttaactgattaatgatcttcaaggtgctatacagctatacttgccaagaagtaaactaatgtgtttcagctctctatatatatgttattggctcattaattatgtgccaatgggttttcccccctactagaagcttttgttgctgtcctgttgcatataagaggatgaactaattaaacatcagatgttgtttcatatatacattgggtctcgagttgtttaggtcatcccaagtggttgttataaacttttgtagtatttctcctacattttcttgttgtcctcaagttagatataataattctcgtgtcacgaaaagtgttgttttagacattggtactgaatttttttgataaagcttgtgcatcgactcatgttttgtaaatgttcaacggcgttaaaaagtttgtgaatcaactctgattctatgaaaatgtagttgagatctcccatattttttgggcaacaatatggatataacaaaaataacttatttgactccagcaaatttagattgatatttttttgggggagaggggggtttaggggagggggactgtacaaagtgttttaaaaatcttttagccattctccaagaacggtaagttagatttgtgcaaagtcgacactaacatatatcatttaagtctaattcttcataaaagcaaagcacttttatgtaatataatgcaattgcagagagtggggaggaaatatatttgccgtcatttctatgaaaaacaaacccttcaagtattagtttataatgcctattttagaccatgaccattacaactccatagtctatttgttgtctcttaacctatacctaataacacagagaagttttaagatataagctttgcaatatgtgttttatattattaggtatgtacttatgtagttatctttagataacccacatattttttaagacagatgtttaagccaagggacaaacaactcatgcacttagaattttgctaatgtattgtccaaacaaatgacgaaggattattactgtgcatgtgtcacactcatttttacaactaaattattgtgctagtagacttgactctgttataaaactacataagtctaagttcattatttatcccacctgtgatgttcatatatttatttaccaattttgctcccaatgtatccatcatttttctattgaccaaatgcaatgtgatgtaaagcacttaagatctttgtcaagaagatgatgaaagaaatgggcagcttgtccggccaatggcttaccagctttttgtcttatctgtcgaatggcatgtgtcatatctaatagcagattgaccgccaccaatatagcaagctatgagccagcacgcaatcaatagaaatatcagtatgaagaggatggaaaagcttactgaatactgaaaggacaac

SEQ ID NO: 68320 - DNA, 1296 bp, Zea Mays
atgccaactccacaagaatgtagcagccgtcgcaatagcgtaggagcagctcctgctgatgctggtagctctagagatcccactccatctaatgcagcaacccaagggacaaggaatgatattgttgaaatagatgatgctacacaggttgggtgtaagaggaagttgaagtctaaagtatggaaggattttgttagagttagtgtatctggtaaatggaaagctaagtgcaatgggtggagcaaactattgacagccaaaagtaaaaatggtaccagccatttacaaagccacataaatacatgttagtcatgacaagctagataaggcctaaaatagtcctccttgaaattttcacaaaatccagatgatagtttttgtctagagaagtatgcatttgatcaagatgttgctaggaaagaacttgcattaatgatatgtgtgcatgattacccgctgtctatggttgaccatgtaggctttagaaagttttgtgcttcccagcaactgttgtttaaattagtgccaagaaacaccattagaaaggatattctggatatgtatgaagttcaaaagctctctatggtgacaatgttccaacaacaacaatctcgtattgcggtcaccatagatatgtggacaacaaaccatcaaaagaagcgttacatggtattgactgtacactatattgatgaaaattggagtctaaaaagctatgttttaaggtttatgtatgtgctacacccacatacagctgaagtcataagtgatgtacttcatgatgtactcatggattgggggattgacaaaggtgtccactgtaactcttgacaactgtagcaccaatgacaatgttatgaaggaaatgcaatataaggtcatggatctcatgtactaaatgcactcatgacttgtctttatgatgaagatgatgcaacggatggcatgcaatatgaaatcattgatccatgatattgatgttggggcttgcttgctgctgctgcaatctatcaatttgttggggcttgccggctggctgctgctactatgaagttgctggctgcctgctactacatgaacatcatggacttgttgtcactgtgttgttgcttatatttgtgttgtgtgaactgtcattctgtcaagtgtcaactgccagtaactattgaactatgtggacctgtagtcctggtctcctggacgtgtcaattatcatgactcatgaactgtactatgatttgtaaatttgtgatgttgctttgcttatcaatttcacatgttgtgatgatgttcttc

SEQ ID NO: 68321 - DNA, 1335 bp, Zea Mays
atgccaactccacaagaatgtagcagccgtcgcaatagcgtaggagcagctcctgctgatgctggtagctctagagatcccactccatctaatgcagcaacccaagggacaaggaatgatattgttgaaatagatgatgctacacaggttgggtgtaagaggaagttgaagtctaaagtatggaaggattttgttagagttagtgtatctggtaaatggaaagctaagtgcaatgggtggagcaaactattgacagccaaaagtaaaaatggtaccagccatttacaaagccacataaatacatgttagtcatgacaagctagataaggcctaaaatagtcctccttgaaattttcacaaaatccagatgatagtttttgtctagagaagtatgcatttgatcaagatgttgctaggaaagaacttgcattaatgatatgtgtgcatgattacccgctgtctatggttgaccatgtaggctttagaaagttttgtgcttcccagcaactgttgtttaaattagtgccaagaaacaccattagaaaggatattctggatatgtatgaagttcaaaagctctctatggtgacaatgttccaacaacaacaatctcgtattgcggtcaccatagatatgtggacaacaaaccatcaaaagaagcgttacatggtattgactgtacactatattgatgaaaattggagtctaaaaagctatgttttaaggtaatataagcttctttgttgttttttctgctgtcatgcatgtatactagtagttatagtggacaccttcttgttattctattttgtaggtttatgtatgtgctacacccacatacagctgaagtcataagtgatgtacttcatgatgtactcatggattgggggattgacaaaggtgtccactgtaactcttgacaactgtagcaccaatgacaatgttatgaaggaaatgcaatataagggtatgttattaagcaaggcgttgaaaatgcagcaggatattaaagacaaaagaaacgaaattattattgaaggcttagaagataagattaagaaacttgaagattctttaaaagaaaaagacaacctgctgcaatcagccgaaggttctctcgtagaagcaaggtctcagaatgataagctgagcgaagagctaatcgaagctcgagcaaccttgaatgaaaggtcagagcgcttcgaccatgaaacgaaggaactcaaagcaaaggtcgaagccgaagctgaaaggaaggcgaagctaagtgaaactattaagaatcttcgggacaaatgctccgactttgccgcccaatgcattaatcgattgaag

SEQ ID NO: 68322 - DNA, 1147 bp, Zea Mays
atgccaactccacaagaatgtagcagccgtcgcaatagcgtaggagcagctcctgctgatgctggtagctctagagatcccactccatctaatgcagcaacccaagggacaaggaatgatattgttgaaatagatgatgctacacaggttgggtgtaagaggaagttgaagtctaaagtatggaaggattttgttagagttagtgtatctggtaaatggaaagctaagtgcaatgggtggagcaaactattgacagccaaaagtaaaaatggtaccagccatttacaaagccacataaatacatgttagtcatgacaagctagataaggcctaaaatagtcctccttgaaattttcacaaaatccagatgatagtttttgtctagagaagtatgcatttgatcaagatgttgctaggaaagaacttgcattaatgatatgtgtgcatgattacccgctgtctatggttgaccatgtaggctttagaaagttttgtgcttcccagcaactgttgtttaaattagtgccaagaaacaccattagaaaggatattctggatatgtatgaagttcaaaagctctctatggtgacaatgttccaacaacaacaatctcgtattgcggtcaccatagatatgtggacaacaaaccatcaaaagaagcgttacatggtattgactgtacactatattgatgaaaattggagtctaaaaagctatgttttaaggtttatgtatgtgctacacccacatacagctgaagtcataagtgatgtacttcatgatgtactcatggattgggggattgacaaaggtgtccactgtaactcttgacaactgtagcaccaatgacaatgttatgaaggaaatgcaatataagataccgggcttcggcattccgcattgttacttctatgcaggatcttcgtcttgaggaccttcggcagagtagaagacacccaatagtagccccttcacggtgctagaccgttcttttcataacgagttcgatctgcgaaaagcacaaaggattcggaatgtcgaaggtccgaaaaacaccttccctgagctcgttatcaaagaacgattaaaatattccgagcgctgagcggtctactgctcaactggtgtgggtggtctagcggtttgc

SEQ ID NO: 68323 - DNA, 299 bp, Zea Mays
caggaacccacccagtgatccttacttcgccaacaaccatattgagcagccgtgattagcagtactgcatcccccaaaccatactctggacaagccctgtttccccgatcaaaccaccgcgtgtgtccggtgaccacctcgacaacacctcggcttcacgtgggcagacgattgtgaaaacgaagaggaagtagaggttgaagaggcaatggcttcatcatcaccaccacctgaggaacatcaagcaggcaactgtttctattttgatatctgcggaaccgagcctgattcaccagtaa

SEQ ID NO: 68324 - DNA, 1561 bp, Zea Mays
tctttctcaacttcaattttcgtttcatcacaggcttatgtacatgctccatggttgctgctaaatctttgcagtttctgttgcatttggcttaatcactcttgcctaactaaaagttaccagtttctcagatcatatttcactcaaacaacatttgtcttagattatttggctaaaacaacaattggcccaggcaacatgacatttattttggggctattgcaaccgctgggcataaacctaggagaaaatcccttcaatgccatccaaaacgataacaattccttcaatgccatcgaaaaatacgcgttctctctaatatcatcagttttaattggtttttggacaacatggcatctaaggttctaaaaattaaaactgatggcattgaagggaacacacatttttcgatggtattgaagggattgttatagttttgaatggcattgaagggtgtgaatgttgcatttagggaaattcagagatatcacactatctactatgggttcagatttacaaatccagattccactaggtcaagtaaaatgtaagactacaaagaaaattaaatctgcatagtgaacatcaaccaggttaaaattctaaatgaaactgaaacttaaaatacattcacataacagttgctttgctcagacaacgaatttactttatttttcagtgtagatattccatacatgattcttcatagccaaaccaaaattgaaattaagtcttcctacattgtagtataaaagaagatactgtcatggtaaatctacctggcaactataagtattattcttgtttgataatgataataagaccattaatcatcgttcttgttttttgacatcatgtcactgttgccagaatgtgaagtcatgaagacttaacacgatgtcctggcatggcaactatacccaatcagataggcatcacaaggatacagaagtgctggaagctatgataaacagaatcccatcgagtgccttgagcgtcatcttaaaatggtagcattagatggatatgacggcatgggaccacatgtcaagtttgcccaattctttgttcgaaatgcccagttgctagagttaatgaagttcagaatctttagaaactaccactgtgaacctgggaaaaccaaggcatggattgaggatcagcaaaggcaactgcaagtcaggagcatgacttcccgacctgtgaagtttaagtttgtacatgattctagatataatcaggatgtttactgtggtgaggatatcagtgacctgtcagagcacatccacgatgacccatttgatcaatggtttgaatcagagaaggaagccccccggcatgctgaaggaaaagaagatgctatagtttggaactccagccaaaggcttgattcatttgatcaaagctgaataagaacctcgtcctgaacttttatttaattcgttatgtttgtgtgctttcagttgataacatcacattttctgttttgatgcttcagtaccacatcatattgttcacttaatatctctcattaaacagctgtctttccacaaacttcata

SEQ ID NO: 68325 - DNA, 4531 bp, Zea Mays
gcacaaacacaacgctttgatgcttttcgtcgaatagcttccagtcagtcagtctccagtctagccgtcgacgcatgcagagaccaccatgcatgtgccttgcttcgccgatgcgcggcggcaagggacttccctatccatggcgaacgagttgggtcgccgcagaatgctgcctcgatatgagctcacttcggacagaataggcggtagagatgccgccagcatcgagctccttcagtgcgttcggtcttggtggtgcactttgcatccatcagtgacaccagggtggttgtggggcttgtgttgtccttatagcaaaatataacccaaagacggatgaagtgactgaatttacagcaagttcatgcctgacacttctttacactataaatttctgttcggttatcactactgagggtctgggtgatagccaatatggctttcatgctgttcaggaaaggatgtctgggtttcatgcctctcagtgtggcttctgcactcctggaatgtgcatgtctattttcacttcccttatcaaagctgacaaatccaagaggcctgaaccaccaaagggcttctcaaaactaaaagtatcagaagcaggaaaggctttctctggcaacttgtgcagatgcactggttatcgtccaattgttgatgcctgcaaaagttttgcatcagatgttgacttggaggatttgggccttaatatattctggaagaaaggtgataggaacccagatgttagtgaattgccaagttacacccttggtggtggagtctgcaccttcccagactttctaaaaactgagttaaaatcctcgcttgatcatctgaataatccttgtattgcagcctccggggagggttggtatcatccgaaaagtatcaaagaatattacgagttaataaattcttgtttatttagtgactcagtcaaagtggttgttggaaatactagcagtggtgtacctggatacaaggatcaagacatctacagtaagtatattgacataggaggcattccagaactttcaaatattgtaaggatggggtctggaattgaaattggagtagctacatcaatctctaggaccattgagatacttgaggaagaatgtgaatctatatcctctccaaacggaagtgtagttttcagaaaacttgcgaaccacatgagcaaagttgctacaccttttgttcgtaacacggctagtattggaggaaacatagttttggcacaaaaattcccatttccatcggacattgcaaccatactccttggtgctggtgcaactgtttgtcttcaggttgttgcagaacggagacaaattactttggaagagttcctagagcagcctcctatagatgctactactttactcctgagcatatttattccaaattggatttcagattccggggcaaatataagtttgctatttgaaacttacagagcagcgcctcgtcctcttggcaatgctgtttcatatgtaaattgtgctttcctgggacatgcttctttggatgaacaatcagatactcttgtattgagtaatctgcggttggcttttggtgcatatggaacagaacatgctattagagcaacgagggtggaggaattccttactggtaaatcactcactgcatcagttgtacttggtgcaattcaattacttagagaaacggttgtaccaatggagggaacatcacatcctgaatatagagtcagtgcagctgttggatttctctttagtttcctatctccattttctaaatgcatcccagagcctggaaagtctctggccagcagttctactgattcagcagatacagatgatgttcgtaatctgccattatcaacacgtcgagaaacattttctagtgacgaatataaaccagttggtgaaccaattaagaagtatggtgttgaacttcaagcatctggggaggcagtatatgtggatgatattcctgctccaaagaattgcctctatggagaatttatttacagcacacaaccccttgcttatgtcaaaagtataaaattcaaatcctctttagcatcagagaagatcatctcttttgtttccgcaaaggatattccaagtggaggactaaatattggatcatcctctacgtttggtgacgaaccactatttggtgatccaattgctgagtatgctggtcaagctcttggcattgtgattgcagaaacacaaaggtatgctgacatggcagccaagcaggttgttattgaatatgacacagaagatttgagcccaccgatcataactgtggagcaagcagtggaaaaaagtagctattttgatgttcccccagaattctatcctaaagaagttggtgatgtttccaagggcatggcagaagctgatcacaagatcccatcaacagaagtaaaacttgcctcagagtactacttctacatggaaacacagacagcactagcagttccagatgaagataacactttggtagtctacagttcgtcacagtaccctgaacttgcacaaagtgtcatagcaaggtgcttaggtattccattcagcaacgtgcgtgtcattacaagaagggttggaggaggcttcggtggaaaggcattcagatcattccaagttgcaacggcagctgcactttgtgcgtacaagttacggcgtcctgttcgaatgtaccttaatcgcaacaccgatatggtcatggttggtggtaggcacccagtgaaagctcattatactgtcggattcaagaacgatgggaacgttacggccttgcatctagatttattgattaacgctgggatatctccagatgcgagccccataataccaggcactattatatctagtgtgaagaagtacaactggggcgctctgtcatttgacatcaagctctgcagaacgaacaactcatctaaatccgtaatgcgtgctcctggagatacacaaggctctctaatcgcagatgctgtaatcgagcatgtggcgtctgtcctgtcactggatgccaacagcgtgagggaaaagaatttccacacctacggtactcttcagtcgttctaccctgacagcgcgggcgaagcttctacgtacacgttgcattctatttttgataggctggtctcaacttcaagctacctggatcgagccgaatccataaaggagttcaacagcaacagcaagtggcggaaacggggcatctcttgcgtgcccctcattttcaaagtggagccaagggcggccccaggaagggtttccgtgctcaaggacggctccgtagtggtggaggttggaggaatcgaaatcgggcaaggtctgtggaccaaagtgcagcagatgaccgccttcgctctgggaagactgtggcccgatgctgatggcggcggcgaatgtcttcttgggagagtgcgcgttctacaggctgacaccttgaacttggtacaaggtggactcactgctggcagcaccgcttctgaatctagctgcgcagcgaccctccaggcatgcaatacgctgtacgataggttaaagctagtcttggacaggctgcagcagcgatcagagaatgtctcgtgggataccttggtttcgcaggcctatgaagacgatgtcgatttgtccgcgagtgcgtactgggtacctggtcaagcttctaacaagtaccttaactacggagctggtataagcgaggtggagattgatcttcttacgggagcaatcactataataaggggcgatcttgtgtacgactgtgggaagagcttgaaccctgcagtggacttaggacagatcgaaggctcgtttgtacagggaatcggtttcttcgtatacgaagagtacaccacgaacagcgacggcctgatgatcagcaacagcacgtgggactacaagatcccaagcgtggacatcatcccgaggcagttcaacgccgaggtgctgaacaccggataccacaagaaccgtgtgctctcttcaaaagcttccggtgaacctgccttggtccttgcctcgtccgtccactgcgcgctgcgggaagccatccgagcggcgagggtggagtttgcggacagcaccgtgtcatctggacactcgccgctggagttccagatgggtgtccctgcaccgatgacactggtgaaagaactctgcggtctagatattgtggacaggtacttggaaggtctgtctacctgtgaacgtgcggctggtggggcgtagtcttcttctaatctaaactcatgttatctcatacaagggagtggtatcagcctattgtttgcttgtttgtacgtgtatatacaataaaacgtgctcgcggcgtggtggtgtgtgtgtcattgtgtgtgtgagtgtgagcacaatatctatctgaatgctgtcaaccatgtgtccttattaaaactgctggagtggtcatgtttcagtaatctattgttactacttattggcctcgtgcgtctctacgcacatctaaaacttaaacgtaataatttctattctttcttttctatata

SEQ ID NO: 68326 - DNA, 4347 bp, Zea Mays
ggtcgtcgtcgagcgcggcggcggcaggcggcggcagcagcagcagctccgtcgtcgtccatggcggcgattgatcgggtggtgttcgcgttgaacgggcagcggtacgaggtgggcggagtggacccgtccacgaggctgctggagttcatccgcacccagacgcccttcacaggccccaagctcggctgcggcgaaggtggttgtggggcttgtgttgtccttatagcaaaatataacccaaagacggatgaagtgactgaatttacagcaagttcatgcctgacacttctttacactataaatttctgttcggttatcactactgagggtctgggtgatagccaatatggctttcatgctgttcaggaaaggatgtctgggtttcatgcctctcagtgtggcttctgcactcctggaatgtgcatgtctattttcacttcccttatcaaagctgacaaatccaagaggcctgaaccaccaaagggcttctcaaaactaaaagtatcagaagcaggaaaggctttctctggcaacttgtgcagatgcactggttatcgtccaattgttgatgcctgcaaaagttttgcatcagatgttgacttggaggatttgggccttaatatattctggaagaaaggtgataggaacccagatgttagtgaattgccaagttacacccttggtggtggagtctgcaccttcccagactttctaaaaactgagttaaaatcctcgcttgatcatctgaataatccttgtattgcagcctccggggagggttggtatcatccgaaaagtatcaaagaatattacgagttaataaattcttgtttatttagtgactcagtcaaagtggttgttggaaatactagcagtggtgtacctggatacaaggatcaagacatctacagtaagtatattgacataggaggcattccagaactttcaaatattgtaaggatggggtctggaattgaaattggagtagctacatcaatctctaggaccattgagatacttgaggaagaatgtgaatctatatcctctccaaacggaagtgtagttttcagaaaacttgcgaaccacatgagcaaagttgctacaccttttgttcgtaacacggctagtattggaggaaacatagttttggcacaaaaattcccatttccatcggacattgcaaccatactccttggtgctggtgcaactgtttgtcttcaggttgttgcagaacggagacaaattactttggaagagttcctagagcagcctcctatagatgctactactttactcctgagcatatttattccaaattggatttcagattccggggcaaatataagtttgctatttgaaacttacagagcagcgcctcgtcctcttggcaatgctgtttcatatgtaaattgtgctttcctgggacatgcttctttggatgaacaatcagatactcttgtattgagtaatctgcggttggcttttggtgcatatggaacagaacatgctattagagcaacgagggtggaggaattccttactggtaaatcactcactgcatcagttgtacttggtgcaattcaattacttagagaaacggttgtaccaatggagggaacatcacatcctgaatatagagtcagtgcagctgttggatttctctttagtttcctatctccattttctaaatgcatcccagagcctggaaagtctctggccagcagttctactgattcagcagatacagatgatgttcgtaatctgccattatcaacacgtcgagaaacattttctagtgacgaatataaaccagttggtgaaccaattaagaagtatggtgttgaacttcaagcatctggggaggcagtatatgtggatgatattcctgctccaaagaattgcctctatggagaatttatttacagcacacaaccccttgcttatgtcaaaagtataaaattcaaatcctctttagcatcagagaagatcatctcttttgtttccgcaaaggatattccaagtggaggactaaatattggatcatcctctacgtttggtgacgaaccactatttggtgatccaattgctgagtatgctggtcaagctcttggcattgtgattgcagaaacacaaaggtatgctgacatggcagccaagcaggttgttattgaatatgacacagaagatttgagcccaccgatcataactgtggagcaagcagtggaaaaaagtaaaacttgcctcagagtactacttctacatggaaacacagacagcactagcagttccagatgaagataacactttggtagtctacagttcgtcacagtaccctgaacttgcacaaagtgtcatagcaaggtgcttaggtattccattcagcaacgtgcgtgtcattacaagaagggttggaggaggcttcggtggaaaggcattcagatcattccaagttgcaacggcagctgcactttgtgcgtacaagttacggcgtcctgttcgaatgtaccttaatcgcaacaccgatatggtcatggttggtggtaggcacccagtgaaagctcattatactgtcggattcaagaacgatgggaacgttacggccttgcatctagatttattgattaacgctgggatatctccagatgcgagccccataataccaggcactattatatctagtgtgaagaagtacaactggggcgctctgtcatttgacatcaagctctgcagaacgaacaactcatctaaatccgtaatgcgtgctcctggagatacacaaggctctctaatcgcagatgctgtaatcgagcatgtggcgtctgtcctgtcactggatgccaacagcgtgagggaaaagaatttccacacctacggtactcttcagtcgttctaccctgacagcgcgggcgaagcttctacgtacacgttgcattctatttttgataggctggtctcaacttcaagctacctggatcgagccgaatccataaaggagttcaacagcaacagcaagtggcggaaacggggcatctcttgcgtgcccctcattttcaaagtggagccaagggcggccccaggaagggtttccgtgctcaaggacggctccgtagtggtggaggttggaggaatcgaaatcgggcaaggtctgtggaccaaagtgcagcagatgaccgccttcgctctgggaagactgtggcccgatgctgatggcggcggcgaatgtcttcttgggagagtgcgcgttctacaggctgacaccttgaacttggtacaaggtggactcactgctggcagcaccgcttctgaatctagctgcgcagcgaccctccaggcatgcaatacgctgtacgataggttaaagctagtcttggacaggctgcagcagcgatcagagaatgtctcgtgggataccttggtttcgcaggcctatgaagacgatgtcgatttgtccgcgagtgcgtactgggtacctggtcaagcttctaacaagtaccttaactacggagctggtataagcgaggtggagattgatcttcttacgggagcaatcactataataaggggcgatcttgtgtacgactgtgggaagagcttgaaccctgcagtggacttaggacagatcgaaggctcgtttgtacagggaatcggtttcttcgtatacgaagagtacaccacgaacagcgacggcctgatgatcagcaacagcacgtgggactacaagatcccaagcgtggacatcatcccgaggcagttcaacgccgaggtgctgaacaccggataccacaagaaccgtgtgctctcttcaaaagcttccggtgaacctgccttggtccttgcctcgtccgtccactgcgcgctgcgggaagccatccgagcggcgagggtggagtttgcggacagcaccgtgtcatctggacactcgccgctggagttccagatgggtgtccctgcaccgatgacactggtgaaagaactctgcggtctagatattgtggacaggtacttggaaggtctgtctacctgtgaacgtgcggctggtggggcgtagtcttcttctaatctaaactcatgttatctcatacaagggagtggtatcagcctattgtttgcttgtttgtacgtgtatatacaataaaacgtgctcgcggcgtggtggtgtgtgtgtcattgtgtgtgtgagtgtgagcacaatatctatctgaatgctgtcaaccatgtgtccttattaaaactgctggagtggtcatgtttcagtaatctattgttactacttattggcctcgtgcgtctctacgcacatctaaaacttaaacgtaataatttctattctttcttttctatata

SEQ ID NO: 68327 - DNA, 4815 bp, Zea Mays
ttttgtccaaggaaaaaaagaaagaaagaagagtgtgatagggtggcgtgacagatctatgcatgaggtaattggcgcgcatcgatcgcacgtgcgcttgcaccgacaaatcgaagtcgacagacaccgcgcgcgcgtttgtattattgtttctttatgatcagagagcggtggcccatatccatcctcctcctatatatgatgatcctcgcctcgccacaccggccaacgacgcgcctgcactgcacctgcactgcacacacgacgccgactcccacacacacacacaacgagctaagcttattagcttgcaagcatacgttgtcgatctgatcgacgtactagctagcgcgtagccaacagctagcaaggtcgtcgtcgagcgcggcggcggcaggcggcggcagcagcagcagctccgtcgtcgtccatggcggcgattgatcgggtggtgttcgcgttgaacgggcagcggtacgaggtgggcggagtggacccgtccacgaggctgctggagttcatccgcacccagacgcccttcacaggccccaagctcggctgcggcgaaggtggttgtggggcttgtgttgtccttatagcaaaatataacccaaagacggatgaagtgactgaatttacagcaagttcatgcctgacacttctttacactataaatttctgttcggttatcactactgagggtctgggtgatagccaatatggctttcatgctgttcaggaaaggatgtctgggtttcatgcctctcagtgtggcttctgcactcctggaatgtgcatgtctattttcacttcccttatcaaagctgacaaatccaagaggcctgaaccaccaaagggcttctcaaaactaaaagtatcagaagcaggaaaggctttctctggcaacttgtgcagatgcactggttatcgtccaattgttgatgcctgcaaaagttttgcatcagatgttgacttggaggatttgggccttaatatattctggaagaaaggtgataggaacccagatgttagtgaattgccaagttacacccttggtggtggagtctgcaccttcccagactttctaaaaactgagttaaaatcctcgcttgatcatctgaataatccttgtattgcagcctccggggagggttggtatcatccgaaaagtatcaaagaatattacgagttaataaattcttgtttatttagtgactcagtcaaagtggttgttggaaatactagcagtggtgtacctggatacaaggatcaagacatctacagtaagtatattgacataggaggcattccagaactttcaaatattgtaaggatggggtctggaattgaaattggagtagctacatcaatctctaggaccattgagatacttgaggaagaatgtgaatctatatcctctccaaacggaagtgtagttttcagaaaacttgcgaaccacatgagcaaagttgctacaccttttgttcgtaacacggctagtattggaggaaacatagttttggcacaaaaattcccatttccatcggacattgcaaccatactccttggtgctggtgcaactgtttgtcttcaggttgttgcagaacggagacaaattactttggaagagttcctagagcagcctcctatagatgctactactttactcctgagcatatttattccaaattggatttcagattccggggcaaatataagtttgctatttgaaacttacagagcagcgcctcgtcctcttggcaatgctgtttcatatgtaaattgtgctttcctgggacatgcttctttggatgaacaatcagatactcttgtattgagtaatctgcggttggcttttggtgcatatggaacagaacatgctattagagcaacgagggtggaggaattccttactggtaaatcactcactgcatcagttgtacttggtgcaattcaattacttagagaaacggttgtaccaatggagggaacatcacatcctgaatatagagtcagtgcagctgttggatttctctttagtttcctatctccattttctaaatgcatcccagagcctggaaagtctctggccagcagttctactgattcagcagatacagatgatgttcgtaatctgccattatcaacacgtcgagaaacattttctagtgacgaatataaaccagttggtgaaccaattaagaagtatggtgttgaacttcaagcatctggggaggcagtatatgtggatgatattcctgctccaaagaattgcctctatggagaatttatttacagcacacaaccccttgcttatgtcaaaagtataaaattcaaatcctctttagcatcagagaagatcatctcttttgtttccgcaaaggatattccaagtggaggactaaatattggatcatcctctacgtttggtgacgaaccactatttggtgatccaattgctgagtatgctggtcaagctcttggcattgtgattgcagaaacacaaaggtatgctgacatggcagccaagcaggttgttattgaatatgacacagaagatttgagcccaccgatcataactgtggagcaagcagtggaaaaaagtagctattttgatgttcccccagaattctatcctaaagaagttggtgatgtttccaagggcatggcagaagctgatcacaagatcccatcaacagaagtaaaacttgcctcagagtactacttctacatggaaacacagacagcactagcagttccagatgaagataacactttggtagtctacagttcgtcacagtaccctgaacttgcacaaagtgtcatagcaaggtgcttaggtattccattcagcaacgtgcgtgtcattacaagaagggttggaggaggcttcggtggaaaggcattcagatcattccaagttgcaacggcagctgcactttgtgcgtacaagttacggcgtcctgttcgaatgtaccttaatcgcaacaccgatatggtcatggttggtggtaggcacccagtgaaagctcattatactgtcggattcaagaacgatgggaacgttacggccttgcatctagatttattgattaacgctgggatatctccagatgcgagccccataataccaggcactattatatctagtgtgaagaagtacaactggggcgctctgtcatttgacatcaagctctgcagaacgaacaactcatctaaatccgtaatgcgtgctcctggagatacacaaggctctctaatcgcagatgctgtaatcgagcatgtggcgtctgtcctgtcactggatgccaacagcgtgagggaaaagaatttccacacctacggtactcttcagtcgttctaccctgacagcgcgggcgaagcttctacgtacacgttgcattctatttttgataggctggtctcaacttcaagctacctggatcgagccgaatccataaaggagttcaacagcaacagcaagtggcggaaacggggcatctcttgcgtgcccctcattttcaaagtggagccaagggcggccccaggaagggtttccgtgctcaaggacggctccgtagtggtggaggttggaggaatcgaaatcgggcaaggtctgtggaccaaagtgcagcagatgaccgccttcgctctgggaagactgtggcccgatgctgatggcggcggcgaatgtcttcttgggagagtgcgcgttctacaggctgacaccttgaacttggtacaaggtggactcactgctggcagcaccgcttctgaatctagctgcgcagcgaccctccaggcatgcaatacgctgtacgataggttaaagctagtcttggacaggctgcagcagcgatcagagaatgtctcgtgggataccttggtttcgcaggcctatgaagacgatgtcgatttgtccgcgagtgcgtactgggtacctggtcaagcttctaacaagtaccttaactacggagctggtataagcgaggtggagattgatcttcttacgggagcaatcactataataaggggcgatcttgtgtacgactgtgggaagagcttgaaccctgcagtggacttaggacagatcgaaggctcgtttgtacagggaatcggtttcttcgtatacgaagagtacaccacgaacagcgacggcctgatgatcagcaacagcacgtgggactacaagatcccaagcgtggacatcatcccgaggcagttcaacgccgaggtgctgaacaccggataccacaagaaccgtgtgctctcttcaaaagcttccggtgaacctgccttggtccttgcctcgtccgtccactgcgcgctgcgggaagccatccgagcggcgagggtggagtttgcggacagcaccgtgtcatctggacactcgccgctggagttccagatgggtgtccctgcaccgatgacactggtgaaagaactctgcggtctagatattgtggacaggtacttggaaggtctgtctacctgtgaacgtgcggctggtggggcgtagtcttcttctaatctaaactcatgttatctcatacaagggagtggtatcagcctattgtttgcttgtttgtacgtgtatatacaataaaacgtgctcgcggcgtggtggtgtgtgtgtcattgtgtgtgtgagtgtgagcacaatatctatctgaatgctgtcaaccatgtgtccttattaaaactgctggagtggtcatgtttcagtaatctattgttactacttattggcctcgtgcgtctctacgcacatctaaaacttaaacgtaataatttctattctttcttttctatata

SEQ ID NO: 68328 - DNA, 732 bp, Zea Mays
cttgtatctgatgtcctcatacagccccagcacggttcctactaacacttctgcaggcttagacaatcgctgattcaggatgaacgttaccttattttggcacatattgacaaaaatattataatcttaaaatcataaacattaggcagtaagttctaattttgcgcataaacactagcaggtaaagcaaggtttaacaataagataccaaatttcatagcatgtttgaagaaacttttatgtgcttctttttgaacactaatgtatgagtgcacattgttaaagataaggaaaatcattagggcttgttcgtttcggctggattggtgggtcggaacgattcctgaccggattgcttctctaatttatataaattttgattagttggaacgattccgggtgcaatccgacggaaacgaacaaggccttatagtaaggtaaaaccagcactagttatcaaattcatcagaattctcgacatgcagcggcttgacaatagatatattctgaagtgctaaactggtaactataaatgcaggttaaatattaggagataaccaaggacgtactagagtgtaacatttcaatgcatgagcatattccttatcccagaatacagcatcaccatcagcaaaagccctatgttctccaaggaggggtacctatagctcctagcagaacaatctggtccttggcgttgaggcccttgggcatgaagaactggcacatgtt

SEQ ID NO: 68329 - DNA, 9073 bp, Zea Mays
cttgtatctgatgtcctcatacagccccagcacggttcctactaacacttctgcaggcttagacaatcgctgattcaggatgaacgttaccttattttggcacatattgacaaaaatattataatcttaaaatcataaacattaggcagtaagttctaattttgcgcataaacactagcaggtaaagcaaggtttaacaataagataccaaatttcatagcatgtttgaagaaacttttatgtgcttctttttgaacactaatgtatgagtgcacattgttaaagataaggaaaatcattagggcttgttcgtttcggctggattggtgggtcggaacgattcctgaccggattgcttctctaatttatataaattttgattagttggaacgattccgggtgcaatccgacggaaacgaacaaggccttatagtaaggtaaaaccagcactagttatcaaattcatcagaattctcgacatgcagcggcttgacaatagatatattctgaagtgctaaactggtaactataaatgcaggttaaatattaggagataaccaaggacgtactagagtgtaacatttcaatgcatgagcatattccttatcccagaatacagcatcaccatcagcaaaagccctatgttctccaaggaggggtacctatagctcatgcacagccgaaagataaacacaaaacatatcataagatcagtagcacatagaaatatatatcgcagtattcataacagttagtcagttaccaacatcaatctaaccatcgtatacagtagtaaaataaaaatcatttcgaatttatttttcaagaactcacggttgtctcaaatcttagacttgtccagatattgtagacttcaatatacttaaacgaagcgcaaaattctagtaacaaactcgcttgcccttactaaatttggttgaggaaggacccttaatggcctctgggtaagtgttgacttttggggcagcacctcacttttgattgagttagttctgactctcatagataagagaatatcttttgtgaccatctttcgctccaatgaaacaacattcatagagctccggattctctgaacactcaactgatctttcatcttctcagtaaactttctgaaacttcatcgtgtgcatgtgctctatccgcatcatcctcgtcaccctctacttcctctttagtctcttcctccactgggtctgcttctttttcttctttattatctgtttgctccttaattttttcatctttttcgatttctttgccttctttatctacttcaggatatcaatcatctgataggtaagtaaaaaaagatgagggtcttcatctcctcccctctctgcaaattcatataatttgttacattgacccattctcccttgtctttttttttatcgcttgcttcctgctttaaacacttcagagaatttcattctattataatagtcgtctagattctcaaccattggaggcttctcctcatcaacatctttagtacaaacatctcgtagaatgatcttgatctctctaaaaactaatattgatgttcttacgttagcaccttcaagatcttctacacatgaagaagctaaccttacaagtctgttttttatatctttcatattctttttaccacaatactcatattcccgaatgagttttcgattgtggcaactaatgtaggctggtcagaagtcaaaaatgatctgcacacggccttgtagacacattggatacgtactgcctcagaaatatgaactgtgaagattccaatagcacgtttgatatccctgtacttttttccttagcacttgtatagactctcgaacgaatctcttagagcatcaggtctcatcctagtttgcccaacgttcgtatctggactgagaaacatatagtcctctgcaatatataacagtgacatctcgtagcatgtacctttcatttgacactgctatttcaaatgttccatacattccactcctttaacccttaaaatacaggtttcttcccgccagtaacaaagtaatatattgttgcttatactcaatggtaagataaaatgtaccaccggatagagtggtatatatcatgcgatcagaaccacaaattcatgatatatcaaaacgtaagccatatttcaggcgccatgcacagatggtccaatctcacactcaacattttttagagactgatttttagtttcatcatcagatttatctaagcatatgatggttttattactcgcttccatattctttatcttaatcggtcgcacctgaaacaaaagaccatctaacagatcaaatatttttcaggttttctaagcaaaagacatattgactatattcatcttttagaaaacctggaaaataactgatctgttagatggtcttttgtttgaggtgcgatcgattcagatcatcaaggatatagaagtgagtaaaaaagccaccatatacttagataaatctgatgatggaactgaaaatcattctctaaaaaatgttgggtgtgggattgaggtcatccgtgcatgatggctaaaatatggcttacattttgacatatcaaaaatttgtgatcctgatcgcatgatctataccactccagcgggtggaacattttttcttaccattgagtataagcagcgatatattactttgttactggcgggaagaaacctgtattttaagggttggaggggtggaatgtatggaacatttgaaatagaaagttaaatgctataagatgtcattgttatatatatatatatatatatatatatattgcagagaactataggtttctcaatccagatacggacgttgggcaaactaggatgggccctgatgctctaagagattcgtttgagagtctatacaattgccaagaaaaaagtccagggatatcaaacgtgctattggaatcttcgtagttcatatttctgagacagcacgtatccaatgtgtctacaatgcagtttgcagatcatttttgacttctgaccagcctacattggatgtcatagtcgaaaactcatccgggtcagttctaaatagaaaaaactcattctgggtccgagaatatgggtattattgaaaaaaagagcatgaaaaatataaaaacatacttgctgggttagctactccatggatagaagatcttgaaggtgttaacgtaagaacatcaatagcagttttcagagagatcaggattattctacgagatgcttgtactaaaggtgtagatgaggagaatcctccaatgattgaggattcagacgactgttataatagaatgaaattctctgaaaggcttaaagcaggcagcaagcggtcgagaaaacgataagggagaagggagcaatgtaagaaattgcatgaatttgcagagaggggaggagatgaaggctctcatctttttttacttacctatcagaggattgatatcctgaagtagataaagaagacagagaaatcgaagaagatgaagaaatcaaggagcgaacagataataaagaaaaagaagcagacccagtggagaaagaggccaaagaggaagtagatggtgacgaggatgatgcggatggagcacatgcacacgatgaagtttaagaagtttattgagaagatgaaagatcagttgaatgttcagagaatccggagctctatggatgttatgaatgttgtttcattggcgcaaaagatgccacaaaagacattctcttatctttgagagccaagactacctcaatcaaaagtgaggtgttgccccaaaagtcaacccttacctagaggccattaaggatccttctccaaccaaatttagtaagggcacgtcagcttgttactagaattttgcgcttcctttaagtacattgaagtctacaatatttgaacaagcataagatttaagacaaccgtgagttcttgagacataaattcgaaatgatttcaaacgtttcttaaacttttttttggcaaatcccttctgatgttatggggtagtttacgtgttcgttgattcacgcattttctagtttgcttggttttttttatggtttccttcgcctcacggccttggtcaaacggcatatcgtgacttttggcagaagccttagtcactttctagagttggcaatggtgtgggttcgagtcaggtgcagcgtccgcagacccgcccccaaaactcgaattaaagacccgacgaaaacatgaattatattactgggaaagccctagacccagactcgaacccgaggagacccgaaacacgacagggccacagacctggacattttgccgaactttttacaagttggcccttttctgaaacaaattcacgtttggacccctgaacgacttaatgtcgtttttagaccatttgccggcgccataggtcatggcgtcgaggtaacacgtcacgacaccatgacttatggcgccaagatactgaatgccctggaccccttatgctttgctggcgcctacatgtccgagctcggcgccgtagatcatggcgccgagctccctgccaacacttcaaacgcttgactcgcacacacacaacagccaaccggttaattcaggtccccgcgtccaacagactaagtgcatctgcatgtgcacagccatacacacaccattgaccattctctctcatgagtcatgaccaaaagcatcaagcatctgcatgcatgcaatgatggttggttccactttttgtcgcagccgcagagcaatccaatccagccacacaatgacacaatggtattttattgttgaatattaaatgttttctatccgtcagttgttcaagccagttatacggaaagaatgttatttaaaataaggaaatacttactattcagtgtgtggcatattaacccgtagtggttttaacttcattaaataataagttattcttcgtcaagtagtatgactgaagaagcagatattacacataatcattgtttactacaaatatgattgccttttcgactcatcagctacaacggatagccgattttttttactcaggaacatggtcacgatctaaatgaagttgtgaatgcttattttaatgagggagataggaccatgtatgctttcgtttctcttagggcttgtttggaagcaagagtaatggaggggattgagggagctagaatcccctactattcaattttaaatagtgagggattctagtcacctcaattctcttcattccacttactcccaaacaaagccttaacttctatgcatttgttaacgtgatattttttcccgttccatttgatgtgacccaaagtctcaaatggatgttttcagcacgagaatcaataatcttgtacctgccaatgccagttatgcttacacggcggaagccatctcttagctcgacgccacgatctgtggcgccgagctaggccacatcagcgtgctaggccaccatctgagtcgccagcgcactagatacctcggcaccataggccatggcgccgagatgtgttacctcagcgccatgagccatgacgccgagtaaagggtccaaaaatgacattaagttattcaggggtccaaacatgaaattgtttcgaaaaaagagccaaattgcaaaaaaaaaatgagacgttttgcttccatttttcagcacagacagatatatatatataaccagcagacaatcaaaaatattacatttgcatacaagcaggggcggagggcccattatggcccaagccataccaaaaaaaattagcaggtccgccggcccagcctaagcggctccaagtcccagccaatccatcgctaaccctcactccctcaggtctccagaacacagtcgccgcctgaagcctcacctgctcacccacgttaagccgcgacgccgctgtgcctggtcggctggccgtgaggccatctgcggtctgcccgagccccgagtcccgacccccgagccacggccgccaagcttctgtcggcgtcgagtgtcatctgcctgttccgtcgttcgccccgtccctgtcccgcgcgacgcgtcgagctccacctgccagcccgtcggccaccggactgcgtccctccgtccaccggagtccgacctgacgcccccaccggattccaccccgctggacaccagccaccagacagtagtcggcacacggcagacgcccacgcctgtaattgtaagtggtaagcaaacaattgcttgtctgttggataatttgattgtttgaatgttgatgtttgtcacaaacttgcagatgataatgatgccaaatcaaagggaaagaggacgaagtcgcgaatttgtagatttgaagagctattttagtcgggcttctagtagtacaaacccaagtactcatgtgagtggagttggccaagaggtggacaatccaccaatagtgaagggagctattggatctcaattagaggacaatgaagaggtccaatatgaacaagatgtcagaggaacaggtagtacagtcaatgagtttcatatggatcatattatctctgatcccggtattcgcattccaattgaccaatttgctcctaatattagaagtgaagataggagggcattcataaaaaaaggtccaacacaacccattggtcataattttcccaaagcacatgataaaaggtcatttcaggaacattggtttaagcaacacaattggttggaatatagtttggtgaaggatagtgcttattgctattattgctatctttttagagatgattgcaaagatgagaaattatgtcatgacacttccacaaaaacgggcttcaagcaatggaagaatggcctgttgatatttagaaaacatgttggggggtccgagtagtttgcacaatcgggcaagatcgacttttgaggattttgataatcaaagatcaagtttaaaacataaagtcataactcatagcaaagatgcacttgtgaagtatgaaactcgattggaaacttctttgggtattgtaagtctacttgcattgcaaggtgaaccatttcgtggccatgatgaaacgattacttcactaaataaagggaattttcttgagactcttgagtggtacaaaattagaaatgaggaagtgagaaaggcatttgatgagctttgtcctaagaatgcaaaaatgacttcgggaacaattcaaaaagaacttgcaagttgttgcgccgaggcaatatcgagggcaataaaagaagacatgagtgattgtttgttctctattcttgttgatgagtctcgtgatatatcggtcaaagagcaaatggccatagttatcaggtatgtcaacaaaaaaggacaagtgattgaaaggtttctaggtgtgaagcatgtcaaagatactacatctgaggcaataaagaaaggagtggttgaggtgcttagtgaccacggtttagctattgcaagaatacgagggcaaggttatgacagagcttcaaatatgagaggtgaattcaatggtgttcaaaagctaactcgtgatgacaacccctatgctttctatgtccattgttttgctcaccaattgcagttggttgttgtttctgtcgtaagatgttgcccagctattgaggatttttttgaatgtcaccttgattgtgaacaatgtctgtggatcttgcaagaggatggatgtattgcttgataaacatcgtaaaattctagtggataaattgaatgatggtgagatttcatctggaagaggacaaaaccaagaaacttcattggctagacctggagatacaagatggggatctcactacaagactttgcttcgtattgaaacaatgtgggagtcaataatagaagttctaggaattgtgaatcaaggacagcgaaatccatcaaggggtggaggtttggttgctaatatggagtcattttgttttgtgttaatcatgaagatgatgttgcaaatccttcgcatcacaaataagttgtcacttctgttgcaaaagaaggatcaaaatattgttcaggccatgtttttagttgatgtgagaattcgtttgaatgatttgggaagtgaaggttgggatccattgtttgaagaagtcaaagctttttgtgtggaagctggtattgatataccagatatggatggtccaataccaagatttggtcagtcaagaagaggaagaaataatatcactcaagatcatttttatcgtgttgacatcttctattctgctattgactctcttatagcagagttggatcatcgattcaatgaggtatcctccgaattgcttactcgttttgcttgtcttgatccaagagattcattcagcaagtttgatgtgaataagcttgctcgtcttacggagatatatttggaggatttctcttttgatgatcgcaagttaatcaaagatcagttactgacatttattgttcatgtgcgaagagttgatgaattcaaagcttgtcatgatcttgcaagcctagcaaaaacaatggttgaaattggcagggatattgtatttcctttggtctatcggctcattgagttagcattgttactcccagtagcaatggccacggttgaaagggttttttctgccacgaaaattatcaaaactgagttgcgcaacaaaatgggtgattattggcttaacgatttaatggtgatctacattgagagggaactgttcaaagggcttgatcttcaaaatattaagaaggcatttcaaaagaataaggataggcaaatgcaattgcctaggtctccaagacatatatagcaaaatcagaagtatgacagttacatgttttgtagcaatttagtctcattttagacaatgttctatttctttatatatatcgcgaattgttctacaagttgattggttgtgtgctaaatattatacaacccagttgtgtagagccatacctaaaaaaattcgtcctctgccactgcattcaagaaccgggcgagatccagcagtatcaatcatgcatcgggacaggtgcatgccttgcatttttcaactaatataaagacatagtagagagaaatttcag

SEQ ID NO: 68330 - DNA, 255 bp, Zea Mays
atggggctcctatccgctggcaccgcgtggcctcgtctccgcgcctgtctctgtgttgctcgtgcggtcctgccctggcagcgtgctcctctctgctccacgcccacgttcctgcacctgacctccagctatgtgacgtggatctacgccatgctgatcctgacgagacttgagccgcacgttcctctacgtgtcgttctggtgcttcttgtggctctggctctgtctttttgccaggactctggcttcgtctag

SEQ ID NO: 68331 - DNA, 814 bp, Zea Mays
ctgcacaccacaagctgatcgatatggttgcacatataaaatctcacgccccgatcagtccacgactcgacccaagacactatccgttgacaatcatacatcatcaacccaaattacaatggacaaatctaccttgtgttcacaaaacttgtacctcctgtcaacctctcgagtcttgagccctcctactaagcatcagatctttgtcactattctacggcacgtccacaagtaaatgtgtctatatagtcgacatattaaatctaatcaccatgattatataacgggatttttatactggtacctcagtttcgctacaatactcatttctacccttagtttaagttcatactcagtattgcccattcattgtctcctttggtcagcaatacacccgcacgccgtttccgtcagcacagacccactcaaatctttccacattcttctacagcttcctccacgtcgtctagcacgtgttgctaggccgcattccttctccctccccgaagcacctcttctcctccagctccacggcacgggagagattctgagcaaaaaacaggtttgtataattaccattagaaccacatttcatagactcagctgaactcacaatttatagacagtgataattataacaggaagacaatattgtaagcggcaaaaatccaattatctcacggcacggtggcctgctggctctctccgagcgggctgatctccagcggacgcgggctgcttgttctctggcgtggcgtgcgcggcctgctgcgcctccgacgaatgcatgagctggagcagccttcgtgcgccc

SEQ ID NO: 68332 - DNA, 179 bp, Zea Mays
gttccaacacatcgaaataattttttatataatggactaaacacgtatatcaaaatgtttaactgagcattgttcccaggcaaagcatacatgtttcatttctgctgttctaaagcaataaaagggctgctggcggcttccgcgtgagcgaggtctgagcaaggaataacccagggcaa

SEQ ID NO: 68333 - DNA, 1609 bp, Zea Mays
ctatatcacacttttacgccacgttgtcaagattccaacctctactttttcatttcccgcagcggttccctctaaatctcccccctataccccactacaaccataaaatattttttccctacttattcattacccttatcaatttttcctctactaaaacaacactgtcgtgcacggtattcaagggcagggggcggcttccacacgccagatctagcggatccgtgtagaacgcgcttgcactgtagcagttttagcgcacacaactgcgggcggtagcatgttcctgtgcgcgctaaatgaaggggagagggctggtggcgcgcatcgctgcaggcagtcttacactagactagataaggaagaagaaaaatgtctccgtattcattcagctcaatttagatgttgatatcttttaatcctagtcacttagatgtttttcaaacttactcaattagatttttagcaatccaaaaaaatataatgaatattgttgacatgtcaaaatgtctggcatgaaaattgtgcaacataactaaaagcgcgcggcgaagtgaagaagatggtgctcctgccttgccaaagtcggctaggccagccactaaacctgtccaagtcaggtctccaaatccagctaggacttcctccaaacccgacaaggcgacagagtcggtggtcggcttcctgttgtcaagccgcctacagtagtcgagcccccatgaaacccagcctcaaagtcaactaggcagacttttgctagattctgaatcgattcgtttccaaatcagtttttaatgtggggacttgcaaaatatgtattggagttatttcctactaggataaggccacctccctgtatataaatgagaggatcacgactgactgattgaggtatccaacatccaatcgttcaaaaatgcatctattatccctttttcttctccatcttactgtttgtcatgtcttactgtaaaatttgacaacattctagatggccctgtcaatcctaggataacctccacttgctcctccctgacagatcttctccagaggtgttcaggtatctacgcggcagagagtaggatcaacatcgactaaaccggtctttagattagtttgattagttaggtatgttcctcgctacattcaaggtcgtgtgtcgaccgcagcgtgctagcccttgctgttgtgtgatctagatctcttccagcgtcaacgaataccattcatttttcatataagcctctaaatcatactatatacaattatacacaacctggaaggaagaagcatatgatttatcatcaagatatttcatgatgttattttcaaagttgtacatatttgtcttttaaattgcacagtatgcaagaggcaataatattatacaactaagcagaggaaatccttttcgtgcaatcattttgtttattacatatacaacagaatgataaattttgggaacataagaacagcaagcagatagcttgtttttggtcagtcacaagtaccaccatctgttagaaaagattgtcaccttaattgcattagccacctgagatgaatcagggaggaatctaaacgccacaccatccgacttcatttggat

SEQ ID NO: 68334 - DNA, 441 bp, Zea Mays
agcaaggtcaaatccaggaggaataaatacaacatcatcccattttgaggaggagctatcctgcaatatgctttaaattttagtaggattgaagacaagtaaacagaatatggcaactaatgatttgtgtgtgtgtgtgtgtggggggggggggggggggtcaatcttgagtcacaaggtctatgctatatgtgaatcacaaaggtatgcaaaagtgtcaacaggatgcactgtgccaaggacaggtgtagaatacccaattaatttatgcaaaagttaaaaccagaatgggtcagccaatgacgataagcttggaggattatactagctataaggctagggtatccagattttaatatgcaaggatcacaaaatttcataaattctgttctagagagcttatgcataccttcatagatttaatgatatcttccaaagaag

SEQ ID NO: 68335 - DNA, 2014 bp, Zea Mays
cgggcatgaatgcatgattttataggaatcagtttaatttcacattaaaacatagaaagagaaaaaaaatctcagtttacacaaggtctgactcgttgaaattattatgctaccatccagttcaacaaggcatcaaaactcgaacccatgcatagcatctcaacatccattttgaacgagaaacgtccgcacaagaacagttaatcaatccagaaggcaccacaaatttacccaatcaagaattatcacaattttattatttccaaatggatccctatacgatttcatcacagaaggatttttcataggtgtgcaaatcaaattacagaagctgatgaacgtcatgcatgcacacaagaagatttttttttttttgacgaggtcatttcgtcacagaagaatttttcattttgaagacgttcatcagctggcatctattcagagtcaaatcagaacatcgttcacgttcatctgaactgtgaagttgccaaccgaatcctttcagatgtgttcaccagtctcactcaatcaaaagaaattacagtccaactcccaaaaggtcacgcaggatcataaacaataatggcagtaaccagttttcaaacttccaatccgcctaatatatagagcagcccttgcatcctaatctcacaacacagagcaaaacaatcaccactgcaggtagagcaaaacaatcaccacacatggcaaccggatcatcgctggtgccactgctgctgattgcagtagctgttgcacagattgttgggtcacaagctggtagcatttccatatactggggtcagaatggtggcgagggcacactggccgacacctgcgccaccggcaactacaggttcgtcaacttggcattcctggcagcctttggcaatggccagcctcctgtcctcaacctggcaggccactgtgacccgacaaacggcggctgcgcaagcctcagcggcgacatcaagtcgtgccagagcagcggtgtcaaggtcatgctctccattggcggcggtgcgggcagctactacctttcctcagccgcggacgccaaggatgttgcgacgtacttgtggaacaatttcttggggggtcagtcatcttcccgccccttgggtgatgcagtccttgatggcatagacttcgacatcgaaggcggcacaaaccagcactgggatgatcttgcaaaatacttgaaagggtacagcaactctggcaggagggtgtacctgaccgctgcacctcaatgcccgtttcctgatgcctgggttggtggtgcgctcaacaccggcctgtttgactacgtctgggtgcagttctacaacaaccctccttgccagtacagttcaggcagcaccactgatcttgctgatgcatggaagcagtggctgtcaattccggcgaagcagatctttcttggcctcccggcttcccctcaggcagctgggagtggttttataccagctgatgacctcaagtctcaggtgcttccattgatcaagagctcagggaaatatggagggatcatgctgtggtccaagtattatgatgaccaagatggctacagttcttcagtgaagagtgatgtgtaggttgttttcctgtgatgtgtcacaatatctgtgtgttacttgtgtgtatgtgagcactatgccctatgatttgtgagaaattatgtgtgactctggatagtgtaataagtattactcgagaatatgattggatcttctagcatactgttcgaatccttcagatggctcaaagaaaacgcaaaattatagaaactgttggctttcattgatggcactaaattctagttcaaaaaatgcctggtataaattcaatcaacttttgaagagcatggcactgcctagccaactctccattaacagtactttaacataacataacataaagaagtgcaatctttcgttaacagatgaaaggtattaattatcgcctcaaaaaatgtattaatttaagtggcataacaaaactgaatgctacc

SEQ ID NO: 68336 - DNA, 1100 bp, Zea Mays
ggcctagcagccctttccctggggttggatgatataaattttgaagctcggtggagtagatcgggtgagatgctaataatatcgtggattcaagctatggtttctctgtggttgattctaactcattggagttccttttcaacaatgcacctgaggccgccaaatggctgaaggataactctgagttgtcctttgaagaaaaatatcggtctgatagaagctcatggttggctttgtatcctgtcccattcttgttctctggaagtttaaaattccaggcacaaactgaagagattaaaaagtactaccagcatttccctcagttagctgttcaggagatctgggataacaatggacagcgaagggtgcatctcaaacttgcacttggttccttatcagaaatttggacctctgtgctcaatattactgggccactatcaaattggtccttcgctgataacatgctcccagctcctcaaactgtaagtggtgggccaccatcatatatttgtcgactcagtggaaagagcgatgtggattggtctttctggttggaggcaaactcttctgaaagtctgagagtcgatgtcgcagtacttgatcagtaccttgttgatagtacaaagaaactcaagagcctcttcccaagttgggcagacttgacagccttcacaacatttttctcaacgtatcatttatgaggaggtcaagtatttgatgttcaacaagtgtaaatcattttctctttgtagccctacgtttcggggctatatgtggttttgtcaccatgatcagctggacctgagccccgaggctggtgtttgtaaaatctttgtaagcgtgccttgatgtattcatgaatcacacaagattgtaagaatctcaagtcagtcataaattttttaccacttagtcattcacgattgacggtatggcatcactgatcattcgtgttctaagtttaaaaattctaaaaagaaatgttgcatcgacatagaagtactgcgtttcattttgtaatcgataccacctgaggtgaaaggttagattttttatctacagttcgcaatcccacttgaaaaaggaacacattatgcagg

SEQ ID NO: 68337 - DNA, 1132 bp, Zea Mays
tgaaagaatgtggagcacctgggcgcctcctaagtgccatttcttcatctggttggtcttacataacaagtgttggacgactgaccgactcgctaaaaaagatgctaataatatcgtggattcaagctatggtttctctgtggttgattctaactcattggagttccttttcaacaatgcacctgaggccgccaaatggctgaaggataactctgagttgtcctttgaagaaaaatatcggtctgatagaagctcatggttggctttgtatcctgtcccattcttgttctctggaagtttaaaattccaggcacaaactgaagagattaaaaagtactaccagcatttccctcagttagctgttcaggagatctgggataacaatggacagcgaagggtgcatctcaaacttgcacttggttccttatcagaaatttggacctctgtgctcaatattactgggccactatcaaattggtccttcgctgataacatgctcccagctcctcaaactgtaagtggtgggccaccatcatatatttgtcgactcagtggaaagagcgatgtggattggtctttctggttggaggcaaactcttctgaaagtctgagagtcgatgtcgcagtacttgatcagtaccttgttgatagtacaaagaaactcaagagcctcttcccaagttgggcagacttgacagccttcacaacatttttctcaacgtatcatttatgaggaggtcaagtatttgatgttcaacaagtgtaaatcattttctctttgtagccctacgtttcggggctatatgtggttttgtcaccatgatcagctggacctgagccccgaggctggtgtttgtaaaatctttgtaagcgtgccttgatgtattcatgaatcacacaagattgtaagaatctcaagtcagtcataaattttttaccacttagtcattcacgattgacggtatggcatcactgatcattcgtgttctaagtttaaaaattctaaaaagaaatgttgcatcgacatagaagtactgcgtttcattttgtaatcgataccacctgaggtgaaaggttagattttttatctacagttcgcaatcccacttgaaaaaggaacacattatgcagg

SEQ ID NO: 68338 - DNA, 1404 bp, Zea Mays
ccgtagtgcttttgctttaaaaaatggtcgttggttgcgtatgtgctgcctatgaccccatgtctcctttacggtctttactatggtggattccttatccagttcctgattgaaaagatgggcatgatgggatctcttccaaaaccatatggatattttgtgcctgatgttattgttggagctgtagttggattagtggttggttggtgttttggtcctctatcacctgttgctagtcgttggttgtcgaagacttcaattatccatggcttcctgcaaattacagtggttgctttggctatctcatcccaactgtttccttacagcactggagcaccaaaaagagttgttcttcaacatacttttgttacagatgctaataatatcgtggattcaagctatggtttctctgtggttgattctaactcattggagttccttttcaacaatgcacctgaggccgccaaatggctgaaggataactctgagttgtcctttgaagaaaaatatcggtctgatagaagctcatggttggctttgtatcctgtcccattcttgttctctggaagtttaaaattccaggcacaaactgaagagattaaaaagtactaccagcatttccctcagttagctgttcaggagatctgggataacaatggacagcgaagggtgcatctcaaacttgcacttggttccttatcagaaatttggacctctgtgctcaatattactgggccactatcaaattggtccttcgctgataacatgctcccagctcctcaaactgtaagtggtgggccaccatcatatatttgtcgactcagtggaaagagcgatgtggattggtctttctggttggaggcaaactcttctgaaagtctgagagtcgatgtcgcagtacttgatcagtaccttgttgatagtacaaagaaactcaagagcctcttcccaagttgggcagacttgacagccttcacaacatttttctcaacgtatcatttatgaggaggtcaagtatttgatgttcaacaagtgtaaatcattttctctttgtagccctacgtttcggggctatatgtggttttgtcaccatgatcagctggacctgagccccgaggctggtgtttgtaaaatctttgtaagcgtgccttgatgtattcatgaatcacacaagattgtaagaatctcaagtcagtcataaattttttaccacttagtcattcacgattgacggtatggcatcactgatcattcgtgttctaagtttaaaaattctaaaaagaaatgttgcatcgacatagaagtactgcgtttcattttgtaatcgataccacctgaggtgaaaggttagattttttatctacagttcgcaatcccacttgaaaaaggaacacattatgcagg

SEQ ID NO: 68339 - DNA, 1795 bp, Zea Mays
ttctcatcaatagacacatattttgtgaagtttatgggaagtgctcaatcccaggaaaagatgaatggtactccatacgtttggtgtaatccttgcaatatttattcctgctctggctgcagcattaagattattattcacaaagaatgcaatgaattggtttgctcacccttatttggcgttcctaatgtttgtccctacttcattgattggtctattgctgccaaggcttacatgggggctatcggagcaagcacacttttggggtgcttttgggttgtattctttaataactatggtctacacactagctgggctgagtggaggttttctaacatttttcatttccatgtccatgcttcttggacgatttgtctctagaatcattaggaagcagtggagccaacaatcacctaggtcgttggttgcgtatgtgctgcctatgaccccatgtctcctttacggtctttactatggtggattccttatccagttcctgattgaaaagatgggcatgatgggatctcttccaaaaccatatggatattttgtgcctgatgttattgttggagctgtagttggattagtggttggttggtgttttggtcctctatcacctgttgctagtcgttggttgtcgaagacttcaattatccatggcttcctgcaaattacagtggttgctttggctatctcatcccaactgtttccttacagcactggagcaccaaaaagagttgttcttcaacatacttttgttacagatgctaataatatcgtggattcaagctatggtttctctgtggttgattctaactcattggagttccttttcaacaatgcacctgaggccgccaaatggctgaaggataactctgagttgtcctttgaagaaaaatatcggtctgatagaagctcatggttggctttgtatcctgtcccattcttgttctctggaagtttaaaattccaggcacaaactgaagagattaaaaagtactaccagcatttccctcagttagctgttcaggagatctgggataacaatggacagcgaagggtgcatctcaaacttgcacttggttccttatcagaaatttggacctctgtgctcaatattactgggccactatcaaattggtccttcgctgataacatgctcccagctcctcaaactgtaagtggtgggccaccatcatatatttgtcgactcagtggaaagagcgatgtggattggtctttctggttggaggcaaactcttctgaaagtctgagagtcgatgtcgcagtacttgatcagtaccttgttgatagtacaaagaaactcaagagcctcttcccaagttgggcagacttgacagccttcacaacatttttctcaacgtatcatttatgaggaggtcaagtatttgatgttcaacaagtgtaaatcattttctctttgtagccctacgtttcggggctatatgtggttttgtcaccatgatcagctggacctgagccccgaggctggtgtttgtaaaatctttgtaagcgtgccttgatgtattcatgaatcacacaagattgtaagaatctcaagtcagtcataaattttttaccacttagtcattcacgattgacggtatggcatcactgatcattcgtgttctaagtttaaaaattctaaaaagaaatgttgcatcgacatagaagtactgcgtttcattttgtaatcgataccacctgaggtgaaaggttagattttttatctacagttcgcaatcccacttgaaaaaggaacacattatgcagg

SEQ ID NO: 68340 - DNA, 2126 bp, Zea Mays
ggctgcgacttttgtggcagcctccctctgtgcaagcctgtgatacagattatagaatatttgctgaagacattacaaacattccaggacttgatataatttttgttctcggtggttatttctatcatacttcatatgatacattggagaatctacttcctggaagtattcaagcacgtggtgaaaatttattcaaccttgtgaaggcattcacaaatcctatgttgttaaaagagaacgagatatctaataaagctgctaaggatggaattgaagatgtgggggcggtcttttttgattatttgacttggttcatggtattttattctcgtgatatatctctgattcttcacagtctaccgatagccatttttcttcttgtaccgctgttcctgaagttcccaaacattaccttgatgtcatggtttgtaactctcctaggtttcatgagaggaatggtactccatacgtttggtgtaatccttgcaatatttattcctgctctggctgcagcattaagattattattcacaaagaatgcaatgaattggtttgctcacccttatttggcgttcctaatgtttgtccctacttcattgattggtctattgctgccaaggcttacatgggtctacacactagctgggctgagtggaggttttctaacatttttcatttccatgtccatgcttcttggacgatttgtctctagaatcattaggaagcagtggagccaacaatcacctaggtcgttggttgcgtatgtgctgcctatgaccccatgtctcctttacggtctttactatggtggattccttatccagttcctgattgaaaagatgggcatgatgggatctcttccaaaaccatatggatattttgtgcctgatgttattgttggagctgtagttggattagtggttggttggtgttttggtcctctatcacctgttgctagtcgttggttgtcgaagacttcaattatccatggcttcctgcaaattacagtggttgctttggctatctcatcccaactgtttccttacagcactggagcaccaaaaagagttgttcttcaacatacttttgttacagatgctaataatatcgtggattcaagctatggtttctctgtggttgattctaactcattggagttccttttcaacaatgcacctgaggccgccaaatggctgaaggataactctgagttgtcctttgaagaaaaatatcggtctgatagaagctcatggttggctttgtatcctgtcccattcttgttctctggaagtttaaaattccaggcacaaactgaagagattaaaaagtactaccagcatttccctcagttagctgttcaggagatctgggataacaatggacagcgaagggtgcatctcaaacttgcacttggttccttatcagaaatttggacctctgtgctcaatattactgggccactatcaaattggtccttcgctgataacatgctcccagctcctcaaactgtaagtggtgggccaccatcatatatttgtcgactcagtggaaagagcgatgtggattggtctttctggttggaggcaaactcttctgaaagtctgagagtcgatgtcgcagtacttgatcagtaccttgttgatagtacaaagaaactcaagagcctcttcccaagttgggcagacttgacagccttcacaacatttttctcaacgtatcatttatgaggaggtcaagtatttgatgttcaacaagtgtaaatcattttctctttgtagccctacgtttcggggctatatgtggttttgtcaccatgatcagctggacctgagccccgaggctggtgtttgtaaaatctttgtaagcgtgccttgatgtattcatgaatcacacaagattgtaagaatctcaagtcagtcataaattttttaccacttagtcattcacgattgacggtatggcatcactgatcattcgtgttctaagtttaaaaattctaaaaagaaatgttgcatcgacatagaagtactgcgtttcattttgtaatcgataccacctgaggtgaaaggttagattttttatctacagttcgcaatcccacttgaaaaaggaacacattatgcagg

SEQ ID NO: 68341 - DNA, 2466 bp, Zea Mays
cttcagtcaagcactactactgtactagatttagtttgtcaatctggacctggatcatggccttctcgtgtttatgctcagactgcaaagtatcccatggcaaacagtgttgctcaggatatgtttggaataattccaggtgatacagattatagaatatttgctgaagacattacaaacattccaggacttgatataatttttgttctcggtggttatttctatcatacttcatatgatacattggagaatctacttcctggaagtattcaagcacgtggtgaaaatttattcaaccttgtgaaggcattcacaaatcctatgttgttaaaagagaacgagatatctaataaagctgctaaggatggaattgaagatgtgggggcggtcttttttgattatttgacttggttcatggtattttattctcgtgatatatctctgattcttcacagtctaccgatagccatttttcttcttgtaccgctgttcctgaagttcccaaacattaccttgatgtcatggtttgtaactctcctaggtttcatgagaggtttgctcacccttatttggcgttcctaatgtttgtccctacttcattgattggtctattgctgccaaggcttacatgggtctacacactagctgggctgagtggaggttttctaacatttttcatttccatgtccatgcttcttggacgatttgtctctagaatcattaggaagcagtggagccaacaatcacctaggtgagaaattcttctgtcatcaatggaggtgtttcccgtagtgcttttgctttaaaaaatggtaacttctgttgcacattgcattgcattgcatttttgacctcttatttgttctatatcaaactgtggatatctcatgttcttgtacttatttaatgttcgttttggcccctgttatgatcagagttgacgattttacatgaaaatatgtcacctatcatcctatactgtagattttttaaacagaatgcctatgctaagcccacatccaaccatgacaatatgtttactttgacatctggtttgaatatctttacttgagaccaataatgtacaggtcgttggttgcgtatgtgctgcctatgaccccatgtctcctttacggtctttactatggtggattccttatccagttcctgattgaaaagatgggcatgatgggatctcttccaaaaccatatggatattttgtgcctgatgttattgttggagctgtagttggattagtggttggttggtgttttggtcctctatcacctgttgctagtcgttggttgtcgaagacttcaattatccatggcttcctgcaaattacagtggttgctttggctatctcatcccaactgtttccttacagcactggagcaccaaaaagagttgttcttcaacatacttttgttacagatgctaataatatcgtggattcaagctatggtttctctgtggttgattctaactcattggagttccttttcaacaatgcacctgaggccgccaaatggctgaaggataactctgagttgtcctttgaagaaaaatatcggtctgatagaagctcatggttggctttgtatcctgtcccattcttgttctctggaagtttaaaattccaggcacaaactgaagagattaaaaagtactaccagcatttccctcagttagctgttcaggagatctgggataacaatggacagcgaagggtgcatctcaaacttgcacttggttccttatcagaaatttggacctctgtgctcaatattactgggccactatcaaattggtccttcgctgataacatgctcccagctcctcaaactgtaagtggtgggccaccatcatatatttgtcgactcagtggaaagagcgatgtggattggtctttctggttggaggcaaactcttctgaaagtctgagagtcgatgtcgcagtacttgatcagtaccttgttgatagtacaaagaaactcaagagcctcttcccaagttgggcagacttgacagccttcacaacatttttctcaacgtatcatttatgaggaggtcaagtatttgatgttcaacaagtgtaaatcattttctctttgtagccctacgtttcggggctatatgtggttttgtcaccatgatcagctggacctgagccccgaggctggtgtttgtaaaatctttgtaagcgtgccttgatgtattcatgaatcacacaagattgtaagaatctcaagtcagtcataaattttttaccacttagtcattcacgattgacggtatggcatcactgatcattcgtgttctaagtttaaaaattctaaaaagaaatgttgcatcgacatagaagtactgcgtttcattttgtaatcgataccacctgaggtgaaaggttagattttttatctacagttcgcaatcccacttgaaaaaggaacacattatgcagg

SEQ ID NO: 68342 - DNA, 2273 bp, Zea Mays
caacaactcacctgatcttctcaaccaagcactactactaacttgatcttcagtcaagcactactactgtactagatttagtttgtcaatctggacctggatcatggccttctcgtgtttatgctcagactgcaaagtatcccatggcaaacagtgttgctcaggatatgtttggaataattccaggtgatacagattatagaatatttgctgaagacattacaaacattccaggacttgatataatttttgttctcggtggttatttctatcatacttcatatgatacattggagaatctacttcctggaagtattcaagcacgtggtgaaaatttattcaaccttgtgaaggcattcacaaatcctatgttgttaaaagagaacgagatatctaataaagctgctaaggatggaattgaagatgtgggggcggtcttttttgattatttgacttggttcatggtattttattctcgtgatatatctctgattcttcacagtctaccgatagccatttttcttcttgtaccgctgttcctgaagttcccaaacattaccttgatgtcatggtttgtaactctcctaggtttcatgagaggaatggtactccatacgtttggtgtaatccttgcaatatttattcctgctctggctgcagcattaagattattattcacaaagaatgcaatgaattggtttgctcacccttatttggcgttcctaatgtttgtccctacttcattgattggtctattgctgccaaggcttacatgggtctacacactagctgggctgagtggaggttttctaacatttttcatttccatgtccatgcttcttggacgatttgtctctagaatcattaggaagcagtggagccaacaatcacctaggtcgttggttgcgtatgtgctgcctatgaccccatgtctcctttacggtctttactatggtggattccttatccagttcctgattgaaaagatgggcatgatgggatctcttccaaaaccatatggatattttgtgcctgatgttattgttggagctgtagttggattagtggttggttggtgttttggtcctctatcacctgttgctagtcgttggttgtcgaagacttcaattatccatggcttcctgcaaattacagtggttgctttggctatctcatcccaactgtttccttacagcactggagcaccaaaaagagttgttcttcaacatacttttgttacagatgctaataatatcgtggattcaagctatggtttctctgtggttgattctaactcattggagttccttttcaacaatgcacctgaggccgccaaatggctgaaggataactctgagttgtcctttgaagaaaaatatcggtctgatagaagctcatggttggctttgtatcctgtcccattcttgttctctggaagtttaaaattccaggcacaaactgaagagattaaaaagtactaccagcatttccctcagttagctgttcaggagatctgggataacaatggacagcgaagggtgcatctcaaacttgcacttggttccttatcagaaatttggacctctgtgctcaatattactgggccactatcaaattggtccttcgctgataacatgctcccagctcctcaaactgtaagtggtgggccaccatcatatatttgtcgactcagtggaaagagcgatgtggattggtctttctggttggaggcaaactcttctgaaagtctgagagtcgatgtcgcagtacttgatcagtaccttgttgatagtacaaagaaactcaagagcctcttcccaagttgggcagacttgacagccttcacaacatttttctcaacgtatcatttatgaggaggtcaagtatttgatgttcaacaagtgtaaatcattttctctttgtagccctacgtttcggggctatatgtggttttgtcaccatgatcagctggacctgagccccgaggctggtgtttgtaaaatctttgtaagcgtgccttgatgtattcatgaatcacacaagattgtaagaatctcaagtcagtcataaattttttaccacttagtcattcacgattgacggtatggcatcactgatcattcgtgttctaagtttaaaaattctaaaaagaaatgttgcatcgacatagaagtactgcgtttcattttgtaatcgataccacctgaggtgaaaggttagattttttatctacagttcgcaatcccacttgaaaaaggaacacattatgcagg

SEQ ID NO: 68343 - DNA, 2453 bp, Zea Mays
agaaatttcaaaatttgtcattttcttgctgaaaatagttgttgagttgtccatcctggaaatttctgtcactataaagaaacattgagggctcacatggttttattaagacacatagatggaacaggacaatccgtgctttcatcaatattgaagcttctgggagtgggggtacagatttagtttgtcaatctggacctggatcatggccttctcgtgtttatgctcagactgcaaagtatcccatggcaaacagtgttgctcaggatatgtttggaataattccaggtgatacagattatagaatatttgctgaagacattacaaacattccaggacttgatataatttttgttctcggtggttatttctatcatacttcatatgatacattggagaatctacttcctggaagtattcaagcacgtggtgaaaatttattcaaccttgtgaaggcattcacaaatcctatgttgttaaaagagaacgagatatctaataaagctgctaaggatggaattgaagatgtgggggcggtcttttttgattatttgacttggttcatggtattttattctcgtgatatatctctgattcttcacagtctaccgatagccatttttcttcttgtaccgctgttcctgaagttcccaaacattaccttgatgtcatggtttgtaactctcctaggtttcatgagaggaatggtactccatacgtttggtgtaatccttgcaatatttattcctgctctggctgcagcattaagattattattcacaaagaatgcaatgaattggtttgctcacccttatttggcgttcctaatgtttgtccctacttcattgattggtctattgctgccaaggcttacatgggtatttccttataaacatgggctatcggagcaagcacacttttggggtgcttttgggttgtattctttaataactatggtctacacactagctgggctgagtggaggttttctaacatttttcatttccatgtccatgcttcttggacgatttgtctctagaatcattaggaagcagtggagccaacaatcacctaggtcgttggttgcgtatgtgctgcctatgaccccatgtctcctttacggtctttactatggtggattccttatccagttcctgattgaaaagatgggcatgatgggatctcttccaaaaccatatggatattttgtgcctgatgttattgttggagctgtagttggattagtggttggttggtgttttggtcctctatcacctgttgctagtcgttggttgtcgaagacttcaattatccatggcttcctgcaaattacagtggttgctttggctatctcatcccaactgtttccttacagcactggagcaccaaaaagagttgttcttcaacatacttttgttacagatgctaataatatcgtggattcaagctatggtttctctgtggttgattctaactcattggagttccttttcaacaatgcacctgaggccgccaaatggctgaaggataactctgagttgtcctttgaagaaaaatatcggtctgatagaagctcatggttggctttgtatcctgtcccattcttgttctctggaagtttaaaattccaggcacaaactgaagagattaaaaagtactaccagcatttccctcagttagctgttcaggagatctgggataacaatggacagcgaagggtgcatctcaaacttgcacttggttccttatcagaaatttggacctctgtgctcaatattactgggccactatcaaattggtccttcgctgataacatgctcccagctcctcaaactgtaagtggtgggccaccatcatatatttgtcgactcagtggaaagagcgatgtggattggtctttctggttggaggcaaactcttctgaaagtctgagagtcgatgtcgcagtacttgatcagtaccttgttgatagtacaaagaaactcaagagcctcttcccaagttgggcagacttgacagccttcacaacatttttctcaacgtatcatttatgaggaggtcaagtatttgatgttcaacaagtgtaaatcattttctctttgtagccctacgtttcggggctatatgtggttttgtcaccatgatcagctggacctgagccccgaggctggtgtttgtaaaatctttgtaagcgtgccttgatgtattcatgaatcacacaagattgtaagaatctcaagtcagtcataaattttttaccacttagtcattcacgattgacggtatggcatcactgatcattcgtgttctaagtttaaaaattctaaaaagaaatgttgcatcgacatagaagtactgcgtttcattttgtaatcgataccacctgaggtgaaaggttagattttttatctacagttcgcaatcccacttgaaaaaggaacacattatgcagg

SEQ ID NO: 68344 - DNA, 2625 bp, Zea Mays
atttgaagaaactaaaactattgaaactaccatagtttgatagttcctaccctgacaacattaacttcaatggtttcatcaaatgtttcagaagatgatgatccatccttgttggtaaatggtcattttgacagcccgcttggatctcctggtgcagcagactgtggttcttgtgttgcatctatgcttgagctatcacgactcctcattgactctgggtgggtccctcctcgaccggtgattttccttttcaatggtgcagaggaactttttcttttgggctcacatggttttattaagacacatagatggaacaggacaatccgtgctttcatcaatattgaagcttctgggagtgggggtacagatttagtttgtcaatctggacctggatcatggccttctcgtgtttatgctcagactgcaaagtatcccatggcaaacagtgttgctcaggatatgtttggaataattccaggtgatacagattatagaatatttgctgaagacattacaaacattccaggacttgatataatttttgttctcggtggttatttctatcatacttcatatgatacattggagaatctacttcctggaagtattcaagcacgtggtgaaaatttattcaaccttgtgaaggcattcacaaatcctatgttgttaaaagagaacgagatatctaataaagctgctaaggatggaattgaagatgtgggggcggtcttttttgattatttgacttggttcatggtattttattctcgtgatatatctctgattcttcacagtctaccgatagccatttttcttcttgtaccgctgttcctgaagttcccaaacattaccttgatgtcatggtttgtaactctcctaggtttcatgagaggaatggtactccatacgtttggtgtaatccttgcaatatttattcctgctctggctgcagcattaagattattattcacaaagaatgcaatgaattggtttgctcacccttatttggcgttcctaatgtttgtccctacttcattgattggtctattgctgccaaggcttacatgggggctatcggagcaagcacacttttggggtgcttttgggttgtattctttaataactatggtctacacactagctgggctgagtggaggttttctaacatttttcatttccatgtccatgcttcttggacgatttgtctctagaatcattaggaagcagtggagccaacaatcacctaggtcgttggttgcgtatgtgctgcctatgaccccatgtctcctttacggtctttactatggtggattccttatccagttcctgattgaaaagatgggcatgatgggatctcttccaaaaccatatggatattttgtgcctgatgttattgttggagctgtagttggattagtggttggttggtgttttggtcctctatcacctgttgctagtcgttggttgtcgaagacttcaattatccatggcttcctgcaaattacagtggttgctttggctatctcatcccaactgtttccttacagcactggagcaccaaaaagagttgttcttcaacatacttttgttacagatgctaataatatcgtggattcaagctatggtttctctgtggttgattctaactcattggagttccttttcaacaatgcacctgaggccgccaaatggctgaaggataactctgagttgtcctttgaagaaaaatatcggtctgatagaagctcatggttggctttgtatcctgtcccattcttgttctctggaagtttaaaattccaggcacaaactgaagagattaaaaagtactaccagcatttccctcagttagctgttcaggagatctgggataacaatggacagcgaagggtgcatctcaaacttgcacttggttccttatcagaaatttggacctctgtgctcaatattactgggccactatcaaattggtccttcgctgataacatgctcccagctcctcaaactgtaagtggtgggccaccatcatatatttgtcgactcagtggaaagagcgatgtggattggtctttctggttggaggcaaactcttctgaaagtctgagagtcgatgtcgcagtacttgatcagtaccttgttgatagtacaaagaaactcaagagcctcttcccaagttgggcagacttgacagccttcacaacatttttctcaacgtatcatttatgaggaggtcaagtatttgatgttcaacaagtgtaaatcattttctctttgtagccctacgtttcggggctatatgtggttttgtcaccatgatcagctggacctgagccccgaggctggtgtttgtaaaatctttgtaagcgtgccttgatgtattcatgaatcacacaagattgtaagaatctcaagtcagtcataaattttttaccacttagtcattcacgattgacggtatggcatcactgatcattcgtgttctaagtttaaaaattctaaaaagaaatgttgcatcgacatagaagtactgcgtttcattttgtaatcgataccacctgaggtgaaaggttagattttttatctacagttcgcaatcccacttgaaaaaggaacacattatgcagg

SEQ ID NO: 68345 - DNA, 2549 bp, Zea Mays
atgaatttgaagaaactaaaactattgaaactaccatagtttgatagttcctaccctgacaacattaacttcaataagatgatgatccatccttgttggtaaatggtcattttgacagcccgcttggatctcctggtgcagcagactgtggttcttgtgttgcatctatgcttgagctatcacgactcctcattgactctgggtgggtccctcctcgaccggtgattttccttttcaatggtgcagaggaactttttcttttgggctcacatggttttattaagacacatagatggaacaggacaatccgtgctttcatcaatattgaagcttctgggagtgggggtacagatttagtttgtcaatctggacctggatcatggccttctcgtgtttatgctcagactgcaaagtatcccatggcaaacagtgttgctcaggatatgtttggaataattccaggtgatacagattatagaatatttgctgaagacattacaaacattccaggacttgatataatttttgttctcggtggttatttctatcatacttcatatgatacattggagaatctacttcctggaagtattcaagcacgtggtgaaaatttattcaaccttgtgaaggcattcacaaatcctatgttgttaaaagagaacgagatatctaataaagctgctaaggatggaattgaagatgtgggggcggtcttttttgattatttgacttggttcatggtattttattctcgtgatatatctctgattcttcacagtctaccgatagccatttttcttcttgtaccgctgttcctgaagttcccaaacattaccttgatgtcatggtttgtaactctcctaggtttcatgagaggaatggtactccatacgtttggtgtaatccttgcaatatttattcctgctctggctgcagcattaagattattattcacaaagaatgcaatgaattggtttgctcacccttatttggcgttcctaatgtttgtccctacttcattgattggtctattgctgccaaggcttacatgggtctacacactagctgggctgagtggaggttttctaacatttttcatttccatgtccatgcttcttggacgatttgtctctagaatcattaggaagcagtggagccaacaatcacctaggtcgttggttgcgtatgtgctgcctatgaccccatgtctcctttacggtctttactatggtggattccttatccagttcctgattgaaaagatgggcatgatgggatctcttccaaaaccatatggatattttgtgcctgatgttattgttggagctgtagttggattagtggttggttggtgttttggtcctctatcacctgttgctagtcgttggttgtcgaagacttcaattatccatggcttcctgcaaattacagtggttgctttggctatctcatcccaactgtttccttacagcactggagcaccaaaaagagttgttcttcaacatacttttgttacagatgctaataatatcgtggattcaagctatggtttctctgtggttgattctaactcattggagttccttttcaacaatgcacctgaggccgccaaatggctgaaggataactctgagttgtcctttgaagaaaaatatcggtctgatagaagctcatggttggctttgtatcctgtcccattcttgttctctggaagtttaaaattccaggcacaaactgaagagattaaaaagtactaccagcatttccctcagttagctgttcaggagatctgggataacaatggacagcgaagggtgcatctcaaacttgcacttggttccttatcagaaatttggacctctgtgctcaatattactgggccactatcaaattggtccttcgctgataacatgctcccagctcctcaaactgtaagtggtgggccaccatcatatatttgtcgactcagtggaaagagcgatgtggattggtctttctggttggaggcaaactcttctgaaagtctgagagtcgatgtcgcagtacttgatcagtaccttgttgatagtacaaagaaactcaagagcctcttcccaagttgggcagacttgacagccttcacaacatttttctcaacgtatcatttatgaggaggtcaagtatttgatgttcaacaagtgtaaatcattttctctttgtagccctacgtttcggggctatatgtggttttgtcaccatgatcagctggacctgagccccgaggctggtgtttgtaaaatctttgtaagcgtgccttgatgtattcatgaatcacacaagattgtaagaatctcaagtcagtcataaattttttaccacttagtcattcacgattgacggtatggcatcactgatcattcgtgttctaagtttaaaaattctaaaaagaaatgttgcatcgacatagaagtactgcgtttcattttgtaatcgataccacctgaggtgaaaggttagattttttatctacagttcgcaatcccacttgaaaaaggaacacattatgcagg

SEQ ID NO: 68346 - DNA, 2701 bp, Zea Mays
ctaccctctaggggattctaatgactttggtgttctcccttttacatcatacgacacttatagagaatagaggttgaggaaacacttgttagtggctctttcagcatgatgtttctgcgtcatagagtaacactaggctacaggaatcataaaaatattgtcatgagaagatgatgatccatccttgttggtaaatggtcattttgacagcccgcttggatctcctggtgcagcagactgtggttcttgtgttgcatctatgcttgagctatcacgactcctcattgactctgggtgggtccctcctcgaccggtgattttccttttcaatggtgcagaggaactttttcttttgggctcacatggttttattaagacacatagatggaacaggacaatccgtgctttcatcaatattgaagcttctgggagtgggggtacagatttagtttgtcaatctggacctggatcatggccttctcgtgtttatgctcagactgcaaagtatcccatggcaaacagtgttgctcaggatatgtttggaataattccaggtgatacagattatagaatatttgctgaagacattacaaacattccaggacttgatataatttttgttctcggtggttatttctatcatacttcatatgatacattggagaatctacttcctggaagtattcaagcacgtggtgaaaatttattcaaccttgtgaaggcattcacaaatcctatgttgttaaaagagaacgagatatctaataaagctgctaaggatggaattgaagatgtgggggcggtcttttttgattatttgacttggttcatggtattttattctcgtgatatatctctgattcttcacagtctaccgatagccatttttcttcttgtaccgctgttcctgaagttcccaaacattaccttgatgtcatggtttgtaactctcctaggtttcatgagaggaatggtactccatacgtttggtgtaatccttgcaatatttattcctgctctggctgcagcattaagattattattcacaaagaatgcaatgaattggtttgctcacccttatttggcgttcctaatgtttgtccctacttcattgattggtctattgctgccaaggcttacatgggggctatcggagcaagcacacttttggggtgcttttgggttgtattctttaataactatggtctacacactagctgggctgagtggaggttttctaacatttttcatttccatgtccatgcttcttggacgatttgtctctagaatcattaggaagcagtggagccaacaatcacctaggtcgttggttgcgtatgtgctgcctatgaccccatgtctcctttacggtctttactatggtggattccttatccagttcctgattgaaaagatgggcatgatgggatctcttccaaaaccatatggatattttgtgcctgatgttattgttggagctgtagttggattagtggttggttggtgttttggtcctctatcacctgttgctagtcgttggttgtcgaagacttcaattatccatggcttcctgcaaattacagtggttgctttggctatctcatcccaactgtttccttacagcactggagcaccaaaaagagttgttcttcaacatacttttgttacagatgctaataatatcgtggattcaagctatggtttctctgtggttgattctaactcattggagttccttttcaacaatgcacctgaggccgccaaatggctgaaggataactctgagttgtcctttgaagaaaaatatcggtctgatagaagctcatggttggctttgtatcctgtcccattcttgttctctggaagtttaaaattccaggcacaaactgaagagattaaaaagtactaccagcatttccctcagttagctgttcaggagatctgggataacaatggacagcgaagggtgcatctcaaacttgcacttggttccttatcagaaatttggacctctgtgctcaatattactgggccactatcaaattggtccttcgctgataacatgctcccagctcctcaaactgtaagtggtgggccaccatcatatatttgtcgactcagtggaaagagcgatgtggattggtctttctggttggaggcaaactcttctgaaagtctgagagtcgatgtcgcagtacttgatcagtaccttgttgatagtacaaagaaactcaagagcctcttcccaagttgggcagacttgacagccttcacaacatttttctcaacgtatcatttatgaggaggtcaagtatttgatgttcaacaagtgtaaatcattttctctttgtagccctacgtttcggggctatatgtggttttgtcaccatgatcagctggacctgagccccgaggctggtgtttgtaaaatctttgtaagcgtgccttgatgtattcatgaatcacacaagattgtaagaatctcaagtcagtcataaattttttaccacttagtcattcacgattgacggtatggcatcactgatcattcgtgttctaagtttaaaaattctaaaaagaaatgttgcatcgacatagaagtactgcgtttcattttgtaatcgataccacctgaggtgaaaggttagattttttatctacagttcgcaatcccacttgaaaaaggaacacattatgcagg

SEQ ID NO: 68347 - DNA, 2684 bp, Zea Mays
ctccgctagggtgccgaaggaatctaccctctaggggattctaatgactttggtgttctcccttttacatcatacgacacttatagagaatagaggttgaggaaacacttgttagtggctctttcagcatgatgtttctgcgtcatagagtaacactaggctacaggaatcataaaaatattgtcatgagggtttcatcaaatgtttcagaagatgatgatccatccttgttggtaaatggtcattttgacagcccgcttggatctcctggtgcagcagactgtggttcttgtgttgcatctatgcttgagctatcacgactcctcattgactctgggtgggtccctcctcgaccggtgattttccttttcaatggtgcagaggaactttttcttttgggctcacatggttttattaagacacatagatggaacaggacaatccgtgctttcatcaatattgaagcttctgggagtgggggtacagatttagtttgtcaatctggacctggatcatggccttctcgtgtttatgctcagactgcaaagtatcccatggcaaacagtgttgctcaggatatgtttggaataattccaggtgatacagattatagaatatttgctgaagacattacaaacattccaggacttgatataatttttgttctcggtggttatttctatcatacttcatatgatacattggagaatctacttcctggaagtattcaagcacgtggtgaaaatttattcaaccttgtgaaggcattcacaaatcctatgttgttaaaagagaacgagatatctaataaagctgctaaggatggaattgaagatgtgggggcggtcttttttgattatttgacttggttcatggtattttattctcgtgatatatctctgattcttcacagtctaccgatagccatttttcttcttgtaccgctgttcctgaagttcccaaacattaccttgatgtcatggtttgtaactctcctaggtttcatgagaggaatggtactccatacgtttggtgtaatccttgcaatatttattcctgctctggctgcagcattaagattattattcacaaagaatgcaatgaattggtttgctcacccttatttggcgttcctaatgtttgtccctacttcattgattggtctattgctgccaaggcttacatgggtctacacactagctgggctgagtggaggttttctaacatttttcatttccatgtccatgcttcttggacgatttgtctctagaatcattaggaagcagtggagccaacaatcacctaggtcgttggttgcgtatgtgctgcctatgaccccatgtctcctttacggtctttactatggtggattccttatccagttcctgattgaaaagatgggcatgatgggatctcttccaaaaccatatggatattttgtgcctgatgttattgttggagctgtagttggattagtggttggttggtgttttggtcctctatcacctgttgctagtcgttggttgtcgaagacttcaattatccatggcttcctgcaaattacagtggttgctttggctatctcatcccaactgtttccttacagcactggagcaccaaaaagagttgttcttcaacatacttttgttacagatgctaataatatcgtggattcaagctatggtttctctgtggttgattctaactcattggagttccttttcaacaatgcacctgaggccgccaaatggctgaaggataactctgagttgtcctttgaagaaaaatatcggtctgatagaagctcatggttggctttgtatcctgtcccattcttgttctctggaagtttaaaattccaggcacaaactgaagagattaaaaagtactaccagcatttccctcagttagctgttcaggagatctgggataacaatggacagcgaagggtgcatctcaaacttgcacttggttccttatcagaaatttggacctctgtgctcaatattactgggccactatcaaattggtccttcgctgataacatgctcccagctcctcaaactgtaagtggtgggccaccatcatatatttgtcgactcagtggaaagagcgatgtggattggtctttctggttggaggcaaactcttctgaaagtctgagagtcgatgtcgcagtacttgatcagtaccttgttgatagtacaaagaaactcaagagcctcttcccaagttgggcagacttgacagccttcacaacatttttctcaacgtatcatttatgaggaggtcaagtatttgatgttcaacaagtgtaaatcattttctctttgtagccctacgtttcggggctatatgtggttttgtcaccatgatcagctggacctgagccccgaggctggtgtttgtaaaatctttgtaagcgtgccttgatgtattcatgaatcacacaagattgtaagaatctcaagtcagtcataaattttttaccacttagtcattcacgattgacggtatggcatcactgatcattcgtgttctaagtttaaaaattctaaaaagaaatgttgcatcgacatagaagtactgcgtttcattttgtaatcgataccacctgaggtgaaaggttagattttttatctacagttcgcaatcccacttgaaaaaggaacacattatgcagg

SEQ ID NO: 68348 - DNA, 1984 bp, Zea Mays
cttatttcttcagtgttcttcctattacatcctacaatgcttaaatacagaatagaggttgaggaaacacttgttagtggctctttcagcatgatgtttctgcgtcatagagtaacactaggctacaggaatcataaaaatattgtcatgagaagatgatgatccatccttgttggtaaatggtcattttgacagcccgcttggatctcctggtgcagcagactgtggttcttgtgttgcatctatgcttgagctatcacgactcctcattgactctgggtgggtccctcctcgaccggtgattttccttttcaatggtgcagaggaactttttcttttgggctcacatggttttattaagacacatagatggaacaggacaatccgtgctttcatcaatattgaagcttctgggagtgggggtacagatttagtttgtcaatctggacctggatcatggccttctcgtgtttatgctcagactgcaaagtatcccatggcaaacagtgttgctcaggatatgtttggaataattccaggtgatacagattatagaatatttgctgaagacattacaaacattccaggacttgatataatttttgttctcggtggttatttctatcatacttcatatgatacattggagaatctacttcctggaagtattcaagcacgtggtgaaaatttattcaaccttgtgaaggcattcacaaatcctatgttgttaaaagagaacgagatatctaataaagctgctaaggatggaattgaagatgtgggggcggtcttttttgattatttgacttggttcatggtattttattctcgtgatatatctctgattcttcacagtctaccgatagccatttttcttcttgtaccgctgttcctgaagttcccaaacattaccttgatgtcatggtttgtaactctcctaggtttcatgagagatgctaataatatcgtggattcaagctatggtttctctgtggttgattctaactcattggagttccttttcaacaatgcacctgaggccgccaaatggctgaaggataactctgagttgtcctttgaagaaaaatatcggtctgatagaagctcatggttggctttgtatcctgtcccattcttgttctctggaagtttaaaattccaggcacaaactgaagagattaaaaagtactaccagcatttccctcagttagctgttcaggagatctgggataacaatggacagcgaagggtgcatctcaaacttgcacttggttccttatcagaaatttggacctctgtgctcaatattactgggccactatcaaattggtccttcgctgataacatgctcccagctcctcaaactgtaagtggtgggccaccatcatatatttgtcgactcagtggaaagagcgatgtggattggtctttctggttggaggcaaactcttctgaaagtctgagagtcgatgtcgcagtacttgatcagtaccttgttgatagtacaaagaaactcaagagcctcttcccaagttgggcagacttgacagccttcacaacatttttctcaacgtatcatttatgaggaggtcaagtatttgatgttcaacaagtgtaaatcattttctctttgtagccctacgtttcggggctatatgtggttttgtcaccatgatcagctggacctgagccccgaggctggtgtttgtaaaatctttgtaagcgtgccttgatgtattcatgaatcacacaagattgtaagaatctcaagtcagtcataaattttttaccacttagtcattcacgattgacggtatggcatcactgatcattcgtgttctaagtttaaaaattctaaaaagaaatgttgcatcgacatagaagtactgcgtttcattttgtaatcgataccacctgaggtgaaaggttagattttttatctacagttcgcaatcccacttgaaaaaggaacacattatgcagg

SEQ ID NO: 68349 - DNA, 2691 bp, Zea Mays
ggtttgtggtccttgcacgctgggtgctcgactgctcgctggaatacttctcctaaatagaggttgaggaaacacttgttagtggctctttcagcatgatgtttctgcgtcatagagtaacactaggctacaggaatcataaaaatattgtcatgagaagatgatgatccatccttgttggtaaatggtcattttgacagcccgcttggatctcctggtgcagcagactgtggttcttgtgttgcatctatgcttgagctatcacgactcctcattgactctgggtgggtccctcctcgaccggtgattttccttttcaatggtgcagaggaactttttcttttgggctcacatggttttattaagacacatagatggaacaggacaatccgtgctttcatcaatattgaagcttctgggagtgggggtacagatttagtttgtcaatctggacctggatcatggccttctcgtgtttatgctcagactgcaaagtatcccatggcaaacagtgttgctcaggatatgtttggaataattccaggtgatacagattatagaatatttgctgaagacattacaaacattccaggacttgatataatttttgttctcggtggttatttctatcatacttcatatgatacattggagaatctacttcctggaagtattcaagcacgtggtgaaaatttattcaaccttgtgaaggcattcacaaatcctatgttgttaaaagagaacgagatatctaataaagctgctaaggatggaattgaagatgtgggggcggtcttttttgattatttgacttggttcatggtattttattctcgtgatatatctctgattcttcacagtctaccgatagccatttttcttcttgtaccgctgttcctgaagttcccaaacattaccttgatgtcatggtttgtaactctcctaggtttcatgagaggaatggtactccatacgtttggtgtaatccttgcaatatttattcctgctctggctgcagcattaagattattattcacaaagaatgcaatgaattggtttgctcacccttatttggcgttcctaatgtttgtccctacttcattgattggtctattgctgccaaggcttacatgggggctatcggagcaagcacacttttggggtgcttttgggttgtattctttaataactatggtctacacactagctgggctgagtggaggttttctaacatttttcatttccatgtccatgcttcttggacgatttgtctctagaatcattaggaagcagtggagccaacaatcacctaggtcgttggttgcgtatgtgctgcctatgaccccatgtctcctttacggtctttactatggtggattccttatccagttcctgattgaaaagatgggcatgatgggatctcttccaaaaccatatggatattttgtgcctgatgttattgttggagctgtagttggattagtggttggttggtgttttggtcctctatcacctgttgctagtcgttggttgtcgaagacttcaattatccatggcttcctgcaaattacagtggttgctttggctatctcatcccaactgtttccttacagcactggagcaccaaaaagagttgttcttcaacatacttttgttacagatgctaataatatcgtggattcaagctatggtttctctgtggttgattctaactcattggagttccttttcaacaatgcacctgaggccgccaaatggctgaaggataactctgagttgtcctttgaagaaaaatatcggtctgatagaagctcatggttggctttgtatcctgtcccattcttgttctctggaagtttaaaattccaggcacaaactgaagagattaaaaagtactaccagcatttccctcagttagctgttcaggagatctgggataacaatggacagcgaagggtgcatctcaaacttgcacttggttccttatcagaaatttggacctctgtgctcaatattactgggccactatcaaattggtccttcgctgataacatgctcccagctcctcaaactgtaagtggtgggccaccatcatatatttgtcgactcagtggaaagagcgatgtggattggtctttctggttggaggcaaactcttctgaaagtctgagagtcgatgtcgcagtacttgatcagtaccttgttgatagtacaaagaaactcaagagcctcttcccaagttgggcagacttgacagccttcacaacatttttctcaacgtatcatttatgaggaggtcaagtatttgatgttcaacaagtgtaaatcattttctctttgtagccctacgtttcggggctatatgtggttttgtcaccatgatcagctggacctgagccccgaggctggtgtttgtaaaatctttgtaagcgtgccttgatgtattcatgaatcacacaagattgtaagaatctcaagtcagtcataaattttttaccacttagtcattcacgattgacggtatggcatcactgatcattcgtgttctaagtttaaaaattctaaaaagaaatgttgcatcgacatagaagtactgcgtttcattttgtaatcgataccacctgaggtgaaaggttagattttttatctacagttcgcaatcccacttgaaaaaggaacacattatgcagg

SEQ ID NO: 68350 - DNA, 3436 bp, Zea Mays
cttccattcgcagcagcgggtcacgagaggggtccctacgcccgcctttccaaatcctcgctcgctcgcgacgaccgccggcggcaccgccgaggctgacccgcctctgtccgatgcccccacgcgcgccgccgcgccggcggcctgctcccgccgcgggaggccccggcttcggcgactccgcgcgtgtgctgctcgcgctggccgcgctctacgccgccatgtcgctcctcgcctaccgcgtcatccacatgcgccacgtcgcgccgctcggcgccgacgcgccgcggggaaacttctccgagggacgcgtgctccagcacctccgccgcctcgctgttgacatccctggccgccaggaggggagcccagggttggaggccgccgcgcagtacatcaaaggggagctccagggtctcgccgcgcgtgcgggcccggagtacagaatagaggttgaggaaacacttgttagtggctctttcagcatgatgtttctgcgtcatagagtaacactaggctacaggaatcataaaaatattgtcatgagaagatgatgatccatccttgttggtaaatggtcattttgacagcccgcttggatctcctggtgcagcagactgtggttcttgtgttgcatctatgcttgagctatcacgactcctcattgactctgggtgggtccctcctcgaccggtgattttccttttcaatggtgcagaggaactttttcttttgggctcacatggttttattaagacacatagatggaacaggacaatccgtgctttcatcaatattgaagcttctgggagtgggggtacagatttagtttgtcaatctggacctggatcatggccttctcgtgtttatgctcagactgcaaagtatcccatggcaaacagtgttgctcaggatatgtttggaataattccaggtgatacagattatagaatatttgctgaagacattacaaacattccaggacttgatataatttttgttctcggtggttatttctatcatacttcatatgatacattggagaatctacttcctggaagtattcaagcacgtggtgaaaatttattcaaccttgtgaaggcattcacaaatcctatgttgttaaaagagaacgagatatctaataaagctgctaaggatggaattgaagatgtgggggcggtcttttttgattatttgacttggttcatggtattttattctcgtgatatatctctgattcttcacagtctaccgatagccatttttcttcttgtaccgctgttcctgaagttcccaaacattaccttgatgtcatggtttgtaactctcctaggtttcatgagaggaatggtactccatacgtttggtgtaatccttgcaatatttattcctgctctggctgcagcattaagattattattcacaaagaatgcaatgaattggtttgctcacccttatttggcgttcctaatgtttgtccctacttcattgattggtctattgctgccaaggcttacatgggtatttccttataaacatgggctatcggagcaagcacacttttggggtgcttttgggttgtattctttaataactatggtctacacactagctgggctgagtggaggttttctaacatttttcatttccatgtccatgcttcttggacgatttgtctctagaatcattaggaagcagtggagccaacaatcacctaggtgagaaattcttctgtcatcaatggaggtgtttcccgtagtgcttttgctttaaaaaatggtaacttctgttgcacattgcattgcattgcatttttgacctcttatttgttctatatcaaactgtggatatctcatgttcttgtacttatttaatgttcgttttggcccctgttatgatcagagttgacgattttacatgaaaatatgtcacctatcatcctatactgtagattttttaaacagaatgcctatgctaagcccacatccaaccatgacaatatgtttactttgacatctggtttgaatatctttacttgagaccaataatgtacaggtcgttggttgcgtatgtgctgcctatgaccccatgtctcctttacggtctttactatggtggattccttatccagttcctgattgaaaagatgggcatgatgggatctcttccaaaaccatatggatattttgtgcctgatgttattgttggagctgtagttggattagtggttggttggtgttttggtcctctatcacctgttgctagtcgttggttgtcgaagacttcaattatccatggcttcctgcaaattacagtggttgctttggctatctcatcccaactgtttccttacagcactggagcaccaaaaagagttgttcttcaacatacttttgttacagatgctaataatatcgtggattcaagctatggtttctctgtggttgattctaactcattggagttccttttcaacaatgcacctgaggccgccaaatggctgaaggataactctgagttgtcctttgaagaaaaatatcggtctgatagaagctcatggttggctttgtatcctgtcccattcttgttctctggaagtttaaaattccaggcacaaactgaagagattaaaaagtactaccagcatttccctcagttagctgttcaggagatctgggataacaatggacagcgaagggtgcatctcaaacttgcacttggttccttatcagaaatttggacctctgtgctcaatattactgggccactatcaaattggtccttcgctgataacatgctcccagctcctcaaactgtaagtggtgggccaccatcatatatttgtcgactcagtggaaagagcgatgtggattggtctttctggttggaggcaaactcttctgaaagtctgagagtcgatgtcgcagtacttgatcagtaccttgttgatagtacaaagaaactcaagagcctcttcccaagttgggcagacttgacagccttcacaacatttttctcaacgtatcatttatgaggaggtcaagtatttgatgttcaacaagtgtaaatcattttctctttgtagccctacgtttcggggctatatgtggttttgtcaccatgatcagctggacctgagccccgaggctggtgtttgtaaaatctttgtaagcgtgccttgatgtattcatgaatcacacaagattgtaagaatctcaagtcagtcataaattttttaccacttagtcattcacgattgacggtatggcatcactgatcattcgtgttctaagtttaaaaattctaaaaagaaatgttgcatcgacatagaagtactgcgtttcattttgtaatcgataccacctgaggtgaaaggttagattttttatctacagttcgcaatcccacttgaaaaaggaacacattatgcagg

SEQ ID NO: 68351 - DNA, 3138 bp, Zea Mays
cgctgctcggctccgccttcccccaataaaccgcagaaaataaagaagagaaaaattcttccattcgcagcagcgggtcacgagaggggtccctacgcccgcctttccaaatcctcgctcgctcgcgacgaccgccggcggcaccgccgaggctgacccgcctctgtccgatgcccccacgcgcgccgccgcgccggcggcctgctcccgccgcgggaggccccggcttcggcgactccgcgcgtgtgctgctcgcgctggccgcgctctacgccgccatgtcgctcctcgcctaccgcgtcatccacatgcgccacgtcgcgccgctcggcgccgacgcgccgcggggaaacttctccgagggacgcgtgctccagcacctccgccgcctcgctgttgacatccctggccgccaggaggggagcccagggttggaggccgccgcgcagtacatcaaaggggagctccagggtctcgccgcgcgtgcgggcccggagtacagaatagaggttgaggaaacacttgttagtggctctttcagcatgatgtttctgcgtcatagagtaacactaggctacaggaatcataaaaatattgtcatgagaagatgatgatccatccttgttggtaaatggtcattttgacagcccgcttggatctcctggtgcagcagactgtggttcttgtgttgcatctatgcttgagctatcacgactcctcattgactctgggtgggtccctcctcgaccggtgattttccttttcaatggtgcagaggaactttttcttttgggctcacatggttttattaagacacatagatggaacaggacaatccgtgctttcatcaatattgaagcttctgggagtgggggtacagatttagtttgtcaatctggacctggatcatggccttctcgtgtttatgctcagactgcaaagtatcccatggcaaacagtgttgctcaggatatgtttggaataattccaggtgatacagattatagaatatttgctgaagacattacaaacattccaggacttgatataatttttgttctcggtggttatttctatcatacttcatatgatacattggagaatctacttcctggaagtattcaagcacgtggtgaaaatttattcaaccttgtgaaggcattcacaaatcctatgttgttaaaagagaacgagatatctaataaagctgctaaggatggaattgaagatgtgggggcggtcttttttgattatttgacttggttcatggtattttattctcgtgatatatctctgattcttcacagtctaccgatagccatttttcttcttgtaccgctgttcctgaagttcccaaacattaccttgatgtcatggtttgtaactctcctaggtttcatgagaggaatggtactccatacgtttggtgtaatccttgcaatatttattcctgctctggctgcagcattaagattattattcacaaagaatgcaatgaattggtttgctcacccttatttggcgttcctaatgtttgtccctacttcattgattggtctattgctgccaaggcttacatgggggctatcggagcaagcacacttttggggtgcttttgggttgtattctttaataactatggtctacacactagctgggctgagtggaggttttctaacatttttcatttccatgtccatgcttcttggacgatttgtctctagaatcattaggaagcagtggagccaacaatcacctaggtcgttggttgcgtatgtgctgcctatgaccccatgtctcctttacggtctttactatggtggattccttatccagttcctgattgaaaagatgggcatgatgggatctcttccaaaaccatatggatattttgtgcctgatgttattgttggagctgtagttggattagtggttggttggtgttttggtcctctatcacctgttgctagtcgttggttgtcgaagacttcaattatccatggcttcctgcaaattacagtggttgctttggctatctcatcccaactgtttccttacagcactggagcaccaaaaagagttgttcttcaacatacttttgttacagatgctaataatatcgtggattcaagctatggtttctctgtggttgattctaactcattggagttccttttcaacaatgcacctgaggccgccaaatggctgaaggataactctgagttgtcctttgaagaaaaatatcggtctgatagaagctcatggttggctttgtatcctgtcccattcttgttctctggaagtttaaaattccaggcacaaactgaagagattaaaaagtactaccagcatttccctcagttagctgttcaggagatctgggataacaatggacagcgaagggtgcatctcaaacttgcacttggttccttatcagaaatttggacctctgtgctcaatattactgggccactatcaaattggtccttcgctgataacatgctcccagctcctcaaactgtaagtggtgggccaccatcatatatttgtcgactcagtggaaagagcgatgtggattggtctttctggttggaggcaaactcttctgaaagtctgagagtcgatgtcgcagtacttgatcagtaccttgttgatagtacaaagaaactcaagagcctcttcccaagttgggcagacttgacagccttcacaacatttttctcaacgtatcatttatgaggaggtcaagtatttgatgttcaacaagtgtaaatcattttctctttgtagccctacgtttcggggctatatgtggttttgtcaccatgatcagctggacctgagccccgaggctggtgtttgtaaaatctttgtaagcgtgccttgatgtattcatgaatcacacaagattgtaagaatctcaagtcagtcataaattttttaccacttagtcattcacgattgacggtatggcatcactgatcattcgtgttctaagtttaaaaattctaaaaagaaatgttgcatcgacatagaagtactgcgtttcattttgtaatcgataccacctgaggtgaaaggttagattttttatctacagttcgcaatcccacttgaaaaaggaacacattatgcagg

SEQ ID NO: 68352 - DNA, 3508 bp, Zea Mays
cggtcctccgccccgctgctcggctccgccttcccccaataaaccgcagaaaataaagaagagaaaaattcttccattcgcagcagcgggtcacgagaggggtccctacgcccgcctttccaaatcctcgctcgctcgcgacgaccgccggcggcaccgccgaggctgacccgcctctgtccgatgcccccacgcgcgccgccgcgccggcggcctgctcccgccgcgggaggccccggcttcggcgactccgcgcgtgtgctgctcgcgctggccgcgctctacgccgccatgtcgctcctcgcctaccgcgtcatccacatgcgccacgtcgcgccgctcggcgccgacgcgccgcggggaaacttctccgagggacgcgtgctccagcacctccgccgcctcgctgttgacatccctggccgccaggaggggagcccagggttggaggccgccgcgcagtacatcaaaggggagctccagggtctcgccgcgcgtgcgggcccggagtacagaatagaggttgaggaaacacttgttagtggctctttcagcatgatgtttctgcgtcatagagtaacactaggctacaggaatcataaaaatattgtcatgagggtttcatcaaatgtttcagaagatgatgatccatccttgttggtaaatggtcattttgacagcccgcttggatctcctggtgcagcagactgtggttcttgtgttgcatctatgcttgagctatcacgactcctcattgactctgggtgggtccctcctcgaccggtgattttccttttcaatggtgcagaggaactttttcttttgggctcacatggttttattaagacacatagatggaacaggacaatccgtgctttcatcaatattgaagcttctgggagtgggggtacagatttagtttgtcaatctggacctggatcatggccttctcgtgtttatgctcagactgcaaagtatcccatggcaaacagtgttgctcaggatatgtttggaataattccaggtgatacagattatagaatatttgctgaagacattacaaacattccaggacttgatataatttttgttctcggtggttatttctatcatacttcatatgatacattggagaatctacttcctggaagtattcaagcacgtggtgaaaatttattcaaccttgtgaaggcattcacaaatcctatgttgttaaaagagaacgagatatctaataaagctgctaaggatggaattgaagatgtgggggcggtcttttttgattatttgacttggttcatggtattttattctcgtgatatatctctgattcttcacagtctaccgatagccatttttcttcttgtaccgctgttcctgaagttcccaaacattaccttgatgtcatggtttgtaactctcctaggtttcatgagaggaatggtactccatacgtttggtgtaatccttgcaatatttattcctgctctggctgcagcattaagattattattcacaaagaatgcaatgaattggtttgctcacccttatttggcgttcctaatgtttgtccctacttcattgattggtctattgctgccaaggcttacatgggggctatcggagcaagcacacttttggggtgcttttgggttgtattctttaataactatggtctacacactagctgggctgagtggaggttttctaacatttttcatttccatgtccatgcttcttggacgatttgtctctagaatcattaggaagcagtggagccaacaatcacctaggtgagaaattcttctgtcatcaatggaggtgtttcccgtagtgcttttgctttaaaaaatggtaacttctgttgcacattgcattgcattgcatttttgacctcttatttgttctatatcaaactgtggatatctcatgttcttgtacttatttaatgttcgttttggcccctgttatgatcagagttgacgattttacatgaaaatatgtcacctatcatcctatactgtagattttttaaacagaatgcctatgctaagcccacatccaaccatgacaatatgtttactttgacatctggtttgaatatctttacttgagaccaataatgtacaggtcgttggttgcgtatgtgctgcctatgaccccatgtctcctttacggtctttactatggtggattccttatccagttcctgattgaaaagatgggcatgatgggatctcttccaaaaccatatggatattttgtgcctgatgttattgttggagctgtagttggattagtggttggttggtgttttggtcctctatcacctgttgctagtcgttggttgtcgaagacttcaattatccatggcttcctgcaaattacagtggttgctttggctatctcatcccaactgtttccttacagcactggagcaccaaaaagagttgttcttcaacatacttttgttacagatgctaataatatcgtggattcaagctatggtttctctgtggttgattctaactcattggagttccttttcaacaatgcacctgaggccgccaaatggctgaaggataactctgagttgtcctttgaagaaaaatatcggtctgatagaagctcatggttggctttgtatcctgtcccattcttgttctctggaagtttaaaattccaggcacaaactgaagagattaaaaagtactaccagcatttccctcagttagctgttcaggagatctgggataacaatggacagcgaagggtgcatctcaaacttgcacttggttccttatcagaaatttggacctctgtgctcaatattactgggccactatcaaattggtccttcgctgataacatgctcccagctcctcaaactgtaagtggtgggccaccatcatatatttgtcgactcagtggaaagagcgatgtggattggtctttctggttggaggcaaactcttctgaaagtctgagagtcgatgtcgcagtacttgatcagtaccttgttgatagtacaaagaaactcaagagcctcttcccaagttgggcagacttgacagccttcacaacatttttctcaacgtatcatttatgaggaggtcaagtatttgatgttcaacaagtgtaaatcattttctctttgtagccctacgtttcggggctatatgtggttttgtcaccatgatcagctggacctgagccccgaggctggtgtttgtaaaatctttgtaagcgtgccttgatgtattcatgaatcacacaagattgtaagaatctcaagtcagtcataaattttttaccacttagtcattcacgattgacggtatggcatcactgatcattcgtgttctaagtttaaaaattctaaaaagaaatgttgcatcgacatagaagtactgcgtttcattttgtaatcgataccacctgaggtgaaaggttagattttttatctacagttcgcaatcccacttgaaaaaggaacacattatgcagg

SEQ ID NO: 68353 - DNA, 813 bp, Zea Mays
gtacttatgcgtggaggaagccatgccgcacctcaagtcttcacaggtggcggtgaagggaaaggtggagccggcaacactggtgggcttcatccacaagtgcacggggaggagagccgccatcatcagggcggagccactggatgatgttctcctgccgcaaccaccaaacccgccggcggcgccaccggcgtctaaagccgagagcaagaaagatgagccacctgctgagaatccgccggccaaggtggaggagccaaacgaggagaacagaggagggggagagaaggacaacgcggatgacgacaaccccaagacggagaagccggctagcgacggccacggcgccggcgccgccgaggagcatggagcccatgcaacaaccgaaggtccagaccgtgacaacgacgacgacgccggcgatgggctcgtgctggagaaccataccaaggcggcggtggaccgcctgttcgccgttccgacgccggccggagtcgtgacggtcgttgcgcctgagatggccctcggcagccgcagctactgctacccggcgtatccttgcgcgcagtactactacccctaccagccgcacctgtacccgccgcagccgtacccggcggcgtctgcttatagccctgttgccatgtatggctatccagcaagctatccacccgaagctttcagtgaggagaacccaaatgcatgcaccatcgtgtgacatactagtatatatgtagtataaaagaagccagtacttgtgtgtgtgtgtatatatatatatatatatatatatatatatatatatatatatat

SEQ ID NO: 68354 - DNA, 1134 bp, Zea Mays
ctagctagtgtcaaggaggaggagcagcagcagagtacgcacgtacagcgccacccacaccacacccatggcaaagcaggacaaggcggcgtccggcgggaacggcggcggcgatggggcggtgctggtcagcccgtcgccgccggagaagctgctgctgccggcgcggtcgtcagcgcccaaggccaagggtggagagaccaacaccaacaaagacatagggaacgagctaccggaactggacatgaaaatggttaccgttcttaagataaacctgcactgcgacgcctgcagcgaggagatcaaaaggcggatacttaagattacaggcgtggaggaagccatgccgcacctcaagtcttcacaggtggcggtgaagggaaaggtggagccggcaacactggtgggcttcatccacaagtgcacggggaggagagccgccatcatcagggcggagccactggatgatgttctcctgccgcaaccaccaaacccgccggcggcgccaccggcgtctaaagccgagagcaagaaagatgagccacctgctgagaatccgccggccaaggtggaggagccaaacgaggagaacagaggagggggagagaaggacaacgcggatgacgacaaccccaagacggagaagccggctagcgacggccacggcgccggcgccgccgaggagcatggagcccatgcaacaaccgaaggtccagaccgtgacaacgacgacgacgccggcgatgggctcgtgctggagaaccataccaaggcggcggtggaccgcctgttcgccgttccgacgccggccggagtcgtgacggtcgttgcgcctgagatggccctcggcagccgcagctactgctacccggcgtatccttgcgcgcagtactactacccctaccagccgcacctgtacccgccgcagccgtacccggcggcgtctgcttatagccctgttgccatgtatggctatccagcaagctatccacccgaagctttcagtgaggagaacccaaatgcatgcaccatcgtgtgacatactagtatatatgtagtataaaagaagccagtacttgtgtgtgtgtgtatatatatatatatatatatatatatatatatatatatatatat

SEQ ID NO: 68355 - DNA, 1020 bp, Zea Mays
ctagctagtgtcaaggaggaggagcagcagcagagtacgcacgtacagcgccacccacaccacacccatggccaagggtggagagaccaacaccaacaaagacatagggaacgagctaccggaactggacatgaaaatggttaccgttcttaagataaacctgcactgcgacgcctgcagcgaggagatcaaaaggcggatacttaagattacaggcgtggaggaagccatgccgcacctcaagtcttcacaggtggcggtgaagggaaaggtggagccggcaacactggtgggcttcatccacaagtgcacggggaggagagccgccatcatcagggcggagccactggatgatgttctcctgccgcaaccaccaaacccgccggcggcgccaccggcgtctaaagccgagagcaagaaagatgagccacctgctgagaatccgccggccaaggtggaggagccaaacgaggagaacagaggagggggagagaaggacaacgcggatgacgacaaccccaagacggagaagccggctagcgacggccacggcgccggcgccgccgaggagcatggagcccatgcaacaaccgaaggtccagaccgtgacaacgacgacgacgccggcgatgggctcgtgctggagaaccataccaaggcggcggtggaccgcctgttcgccgttccgacgccggccggagtcgtgacggtcgttgcgcctgagatggccctcggcagccgcagctactgctacccggcgtatccttgcgcgcagtactactacccctaccagccgcacctgtacccgccgcagccgtacccggcggcgtctgcttatagccctgttgccatgtatggctatccagcaagctatccacccgaagctttcagtgaggagaacccaaatgcatgcaccatcgtgtgacatactagtatatatgtagtataaaagaagccagtacttgtgtgtgtgtgtatatatatatatatatatatatatatatatatatatatatatat

SEQ ID NO: 68356 - DNA, 1344 bp, Zea Mays
ctagctagtgtcaaggaggaggagcagcagcagagtacgcacgtacagcgccacccacaccacacccatggcaaaggacaaggcggcgtccggcgggaacggcggcggcgatggggcggcggcgccggctggggagcagctggtgataagggcgccggtgcactgcgatggctgcggcaggaagctgcgccgctcactccagcgcctcgagggtgttggagaggtgaccgtggacagccgggccgacacggtggtcgtgaggggccgcggggcggtggagaacgcggcggaggtcgtgcaggtcgtcgagaggaagaccggggagaaggcggtgctggtcagcccgtcgccgccggagaagctgctgctgccggcgcggtcgtcagcgcccaaggccaagggtggagagaccaacaccaacaaagacatagggaacgagctaccggaactggacatgaaaatggttaccgttcttaagataaacctgcactgcgacgcctgcagcgaggagatcaaaaggcggatacttaagattacaggcgtggaggaagccatgccgcacctcaagtcttcacaggtggcggtgaagggaaaggtggagccggcaacactggtgggcttcatccacaagtgcacggggaggagagccgccatcatcagggcggagccactggatgatgttctcctgccgcaaccaccaaacccgccggcggcgccaccggcgtctaaagccgagagcaagaaagatgagccacctgctgagaatccgccggccaaggtggaggagccaaacgaggagaacagaggagggggagagaaggacaacgcggatgacgacaaccccaagacggagaagccggctagcgacggccacggcgccggcgccgccgaggagcatggagcccatgcaacaaccgaaggtccagaccgtgacaacgacgacgacgccggcgatgggctcgtgctggagaaccataccaaggcggcggtggaccgcctgttcgccgttccgacgccggccggagtcgtgacggtcgttgcgcctgagatggccctcggcagccgcagctactgctacccggcgtatccttgcgcgcagtactactacccctaccagccgcacctgtacccgccgcagccgtacccggcggcgtctgcttatagccctgttgccatgtatggctatccagcaagctatccacccgaagctttcagtgaggagaacccaaatgcatgcaccatcgtgtgacatactagtatatatgtagtataaaagaagccagtacttgtgtgtgtgtgtatatatatatatatatatatatatatatatatatatatatatat

SEQ ID NO: 68357 - DNA, 1107 bp, Zea Mays
ctagctagtgtcaaggaggaggagcagcagcagagtacgcacgtacagcgccacccacaccacacccatggcaaaggtgcagcaggacaaggcggtgctggtcagcccgtcgccgccggagaagctgctgctgccggcgcggtcgtcagcgcccaaggccaagggtggagagaccaacaccaacaaagacatagggaacgagctaccggaactggacatgaaaatggttaccgttcttaagataaacctgcactgcgacgcctgcagcgaggagatcaaaaggcggatacttaagattacaggcgtggaggaagccatgccgcacctcaagtcttcacaggtggcggtgaagggaaaggtggagccggcaacactggtgggcttcatccacaagtgcacggggaggagagccgccatcatcagggcggagccactggatgatgttctcctgccgcaaccaccaaacccgccggcggcgccaccggcgtctaaagccgagagcaagaaagatgagccacctgctgagaatccgccggccaaggtggaggagccaaacgaggagaacagaggagggggagagaaggacaacgcggatgacgacaaccccaagacggagaagccggctagcgacggccacggcgccggcgccgccgaggagcatggagcccatgcaacaaccgaaggtccagaccgtgacaacgacgacgacgccggcgatgggctcgtgctggagaaccataccaaggcggcggtggaccgcctgttcgccgttccgacgccggccggagtcgtgacggtcgttgcgcctgagatggccctcggcagccgcagctactgctacccggcgtatccttgcgcgcagtactactacccctaccagccgcacctgtacccgccgcagccgtacccggcggcgtctgcttatagccctgttgccatgtatggctatccagcaagctatccacccgaagctttcagtgaggagaacccaaatgcatgcaccatcgtgtgacatactagtatatatgtagtataaaagaagccagtacttgtgtgtgtgtgtatatatatatatatatatatatatatatatatatatatatatat

SEQ ID NO: 68358 - DNA, 1059 bp, Zea Mays
ctagctagtgtcaaggaggaggagcagcagcagagtacgcacgtacagcgccacccacaccacacccatggcaaagctgctgctgccggcgcggtcgtcagcgcccaaggccaagggtggagagaccaacaccaacaaagacatagggaacgagctaccggaactggacatgaaaatggttaccgttcttaagataaacctgcactgcgacgcctgcagcgaggagatcaaaaggcggatacttaagattacaggcgtggaggaagccatgccgcacctcaagtcttcacaggtggcggtgaagggaaaggtggagccggcaacactggtgggcttcatccacaagtgcacggggaggagagccgccatcatcagggcggagccactggatgatgttctcctgccgcaaccaccaaacccgccggcggcgccaccggcgtctaaagccgagagcaagaaagatgagccacctgctgagaatccgccggccaaggtggaggagccaaacgaggagaacagaggagggggagagaaggacaacgcggatgacgacaaccccaagacggagaagccggctagcgacggccacggcgccggcgccgccgaggagcatggagcccatgcaacaaccgaaggtccagaccgtgacaacgacgacgacgccggcgatgggctcgtgctggagaaccataccaaggcggcggtggaccgcctgttcgccgttccgacgccggccggagtcgtgacggtcgttgcgcctgagatggccctcggcagccgcagctactgctacccggcgtatccttgcgcgcagtactactacccctaccagccgcacctgtacccgccgcagccgtacccggcggcgtctgcttatagccctgttgccatgtatggctatccagcaagctatccacccgaagctttcagtgaggagaacccaaatgcatgcaccatcgtgtgacatactagtatatatgtagtataaaagaagccagtacttgtgtgtgtgtgtatatatatatatatatatatatatatatatatatatatatatat

SEQ ID NO: 68359 - DNA, 1347 bp, Zea Mays
ctagctagtgtcaaggaggaggagcagcagcagagtacgcacgtacagcgccacccacaccacacccatggcaaagcaggacaaggcggcgtccggcgggaacggcggcggcgatggggcggcggcgccggctggggagcagctggtgataagggcgccggtgcactgcgatggctgcggcaggaagctgcgccgctcactccagcgcctcgagggtgttggagaggtgaccgtggacagccgggccgacacggtggtcgtgaggggccgcggggcggtggagaacgcggcggaggtcgtgcaggtcgtcgagaggaagaccggggagaaggcggtgctggtcagcccgtcgccgccggagaagctgctgctgccggcgcggtcgtcagcgcccaaggccaagggtggagagaccaacaccaacaaagacatagggaacgagctaccggaactggacatgaaaatggttaccgttcttaagataaacctgcactgcgacgcctgcagcgaggagatcaaaaggcggatacttaagattacaggcgtggaggaagccatgccgcacctcaagtcttcacaggtggcggtgaagggaaaggtggagccggcaacactggtgggcttcatccacaagtgcacggggaggagagccgccatcatcagggcggagccactggatgatgttctcctgccgcaaccaccaaacccgccggcggcgccaccggcgtctaaagccgagagcaagaaagatgagccacctgctgagaatccgccggccaaggtggaggagccaaacgaggagaacagaggagggggagagaaggacaacgcggatgacgacaaccccaagacggagaagccggctagcgacggccacggcgccggcgccgccgaggagcatggagcccatgcaacaaccgaaggtccagaccgtgacaacgacgacgacgccggcgatgggctcgtgctggagaaccataccaaggcggcggtggaccgcctgttcgccgttccgacgccggccggagtcgtgacggtcgttgcgcctgagatggccctcggcagccgcagctactgctacccggcgtatccttgcgcgcagtactactacccctaccagccgcacctgtacccgccgcagccgtacccggcggcgtctgcttatagccctgttgccatgtatggctatccagcaagctatccacccgaagctttcagtgaggagaacccaaatgcatgcaccatcgtgtgacatactagtatatatgtagtataaaagaagccagtacttgtgtgtgtgtgtatatatatatatatatatatatatatatatatatatatatatat

SEQ ID NO: 68360 - DNA, 2650 bp, Zea Mays
atggcgccgccgctcagcctccctccgccccaccactccctcccccacctcctccgccaccgccttccgctgcgccgcctcgtcgcggcccacgctctcgccgccgtcgccggccacctgtcgctcccggatccgcgcccccataccatcctcatcgtcgcctactcccgcctcgagcgccctttccccgccgtgctcctcctcttccgctcctgcctccgccgctccctcgcgcccacccgccactccctcccgctcgccatctctgccgccgcctccgcgggcctccgccacctcccgctcgcgctctccctccacgccgtcgcagtttaccgcaacctcctcccgttccagcatgtggccaacgcgctcgtctccctgtacgccaggcacacgcgcctgggcgacgcgcgcagggtgttcgaggaaatgccctccgcccctgacgtcgtctcgtacaacacgctgatgcacgcttacgtgaacaccgggagtgtggccgtcgctcgggaggtgttcgaggggatgcctgtgcgggacgccacgtcctggggcactgtgatcgccggctctgccaaggcggggcagctggaggaagcgatggcactattcgacaggatgctggaagaggggttcaggcctgacgatgtagccctggccgcggtgctttcatgctgtgcgcagctaggggcgctggacaagggccgggaggtgcatgggctcgttaagctgagcaggccccggccgaacgtgttcttgtgcacggggcttgtcgatctctatgccaagtgtgggtgtgttgaggctgctagggagatgtttgaagcatgccaggataggaacgtgtacacatggaacgctctcattgtcgggctggcaatgtatggccacggaacggtggcgctggagtacttccaccgtatggtggctgatggaattcgtccagatggccacgctggccttgtggacttggcaaggcgcatcttccatgacatggagagtgtgcacaatgtgccacgggagctgaaacactatgggtgcatggcggacttgcttggtcgggctggactcattgaggaagccatgaacatggtaaggaagatgcccatggaaggggacaattatgtatggggaggtattcttgctggatgtagaatgcatgggaacgtggaggctgctgagcttgcagctcggcatttgttgcaactgaacccagatgacagtggggtgtattctgccatggctgggatctatgcagctgcaggtaggtgggaggatgtcgtgaggattaggaagttgatggatgaaaggattgtcaggagaaatgttgcatgcagctcaattactacagagctcaaagatggtactattatgctgagctgattcatacattgtgctatgccagtggactgataaatcagaattcagaacactgaaaatggagagcagttcggaaaagagaactggcaagaattgcaatgacaagcctcacaaacatagttgttaaaatcacgattctatcgtgtggtgttacatctttacgatcttacttgattgggttgattctattctgaaaaaaaaaactacgattttgcaattatagtattcatgactccatgatttatgattatcggagttccaattccattcaggatcatgattttgacaacctgctcacaaagactcaaggcatacattcatttattctgccaaatgtgaatctgaggaagcaagggtggagagtcatcttacagtgtgacatataacgtgatggttgctttccttcatgaaatacggagccatgaaatttttgggaactgggttttcttgtcaaatcaaatgctcattctgacaccagcaaaggtagctcataagtgaaccgaagagaggtgtggaaaaattcatggtgcagtgcaactaaatttctttgatggctactggacccaatgcaatatatttcgcaggaattcaatcggaaagttgaacatagctctggacagtgcacagttcacattttatcccacacaaaaagtaccaactggagacaagaaaacaataaagtttacttgttctaccattgatttacttcagcacatctctactcctataaagtactagattcaaccgtcgtcgtgtatcgtctaatgacgacctttacctctcagatgggccatgatggccccaacacgacatggagatctacgtagggccatgatggacccaacacgacatggagatctacgtagcacagcattcccgaatagtattatcatgctagctaatgaaggacgagtgactgaacgagttataaaaaaagagtgtattttcttttcaaatcatatcttttttggtcttttaggtaagataaagtacactatatatgagccacatatccactttatttttaaatttatttttgtagggatggtccatcatattggcttgtcattagagcctcatgtgtcgtatcgttgttgtaatataccattaaatatgattggtgtgccgttgtaatgtattggcattgtactactgatttatccatgccacaattagtgtcttcagttcatttgtatgttttttaagccaaggcactcttgcagatgtaagatattgaagcttggaattgagaataagaatctggtctcct

SEQ ID NO: 68361 - DNA, 2581 bp, Zea Mays
atggcgccgccgctcagcctccctccgccccaccactccctcccccacctcctccgccaccgccttccgctgcgccgcctcgtcgcggcccacgctctcgccgccgtcgccggccacctgtcgctcccggatccgcgcccccataccatcctcatcgtcgcctactcccgcctcgagcgccctttccccgccgtgctcctcctcttccgctcctgcctccgccgctccctcgcgcccacccgccactccctcccgctcgccatctctgccgccgcctccgcgggcctccgccacctcccgctcgcgctctccctccacgccgtcgcagtttaccgcaacctcctcccgttccagcatgtggccaacgcgctcgtctccctgtacgccaggcacacgcgcctgggcgacgcgcgcagggtgttcgaggaaatgccctccgcccctgacgtcgtctcgtacaacacgctgatgcacgcttacgtgaacaccgggagtgtggccgtcgctcgggaggtgttcgaggggatgcctgtgcgggacgccacgtcctggggcactgtgatcgccggctctgccaaggcggggcagctggaggaagcgatggcactattcgacaggatgctggaagaggggttcaggcctgacgatgtagccctggccgcggtgctttcatgctgtgcgcagctaggggcgctggacaagggccgggaggtgcatgggctcgttaagctgagcaggccccggccgaacgtgttcttgtgcacggggcttgtcgatctctatgccaagtgtgggtgtgttgaggctgctagggagatgtttgaagcatgccaggataggaacgtgtacacatggaacgctctcattgtcgggctggcaatgtatggccacggaacggtggcgctggagtacttccaccgtatggtggctgatggaattcgtccagatggccacgctggccttgtggacttggcaaggcgcatcttccatgacatggagagtgtgcacaatgtgccacgggagctgaaacactatgggtgcatggcggacttgcttggtcgggctggactcattgaggaagccatgaacatggtaaggaagatgcccatggaaggggacaattatgtatggggaggtattcttgctggatgtagaatgcatgggaacgtggaggctgctgagcttgcagctcggcatttgttgcaactgaacccagatgacagtggggtgtattctgccatggctgggatctatgcagctgcaggtaggtgggaggatgtcgtgaggattaggaagttgatggatgaaaggattgtcaggagaaatgttgcatgcagctcaattactacagagctcaaagatggtactattatgctgagctgattcatacattgtgctatgccagtggactgataaatcagaattcagaacactgaaaatggagagcagttcggaaaagagaactggcaagaattgcaatgacaagcctcacaaacatagttgttaaaatcacgattctatcgtgtggtgttacatctttacgatcttacttgattgggttgattctattctgaaaaaaaaaactacgattttgcaattatagtattcatgactccatgatttatgattatcggagttccaattccattcaggatcatgattttgacaacctgctcacaaagactcaagatgcaggcatacattcatttattctgccaaatgtgaatctgaggaagcaagggtggagagtcatcttacagtgtgacatataacgtgatggttgctttccttcatgaaatacggagccatgaaatttttgggaactgggttttcttgtcaaatcaaatgctcattctgacaccagcaaaggtagctcataagtgaaccgaagagaggaattcaatcggaaagttgaacatagctctggacagtgcacagttcacattttatcccacacaaaaagtaccaactggagacaagaaaacaataaagtttacttgttctaccattgatttacttcagcacatctctactcctataaagtactagattcaaccgtcgtcgtgtatcgtctaatgacgacctttacctctcagatgggccatgatggccccaacacgacatggagatctacgtagggccatgatggacccaacacgacatggagatctacgtagcacagcattcccgaatagtattatcatgctagctaatgaaggacgagtgactgaacgagttataaaaaaagagtgtattttcttttcaaatcatatcttttttggtcttttaggtaagataaagtacactatatatgagccacatatccactttatttttaaatttatttttgtagggatggtccatcatattggcttgtcattagagcctcatgtgtcgtatcgttgttgtaatataccattaaatatgattggtgtgccgttgtaatgtattggcattgtactactgatttatccatgccacaattagtgtcttcagttcatttgtatgttttttaagccaaggcactcttgcagatgtaagatattgaagcttggaattgagaataagaatctggtctcct

SEQ ID NO: 68362 - DNA, 988 bp, Zea Mays
tactagaaacgtatttccttagacgacgacaaggcccagatgagcagaagcttttggaagccgccatggcgtatgtctcgggcaaccccatcatgacggatgatgaattcgatcaactaaagctgagactaaaggtctacagtgacttgactgttgactacttgaagatgttgctcctaaatgttcccgcagctgttgtagctctggcactattcttctttttggatgatttcacgggatttgaaatcacatatcttcttgagttgccggagcctttcagtttcatcttcacatggttcgccgcactgcctttaatattttgggtagcgcaggcgatcactaatgtcatagtgaaggacttcctgatcttgaagggtccgtgtccaaactgcgggaatgaaaacctctccttcttcggtaccatactgtcagtgcctagcggtggctcaaaaaacagcgtgaaatgtgcaagttgtggcactgagttggagtacgactcttcaacccgattgatcacactcccagaaccggctgaggctaaataagtgatggcgtggtttcggtgagtcatcatcctgctaatccatcaattaattaatgcatgatggtagaccaaagctacagtgttcttactgcatggatgttcctagatttcgctagcaggaaagacggcccggccggcccgcagattcttgatcgacgacagtacgaagcaagactgttcttggatcgggtggcaatcgtggagtgatgtatgtttgctgtgctagtctgtgtgtatatatatttgaacaagtttagacacctgtattatatagatctaatgaaatgggtatatgtatgtgcatagagtgtacaaagaaaaatttaataagccgagttattgtatgttttttctcctcctatatattgctgttacctagtcggctactacaaacaatgagggataaacaagcaaataaacaacgatttctcgatggaaacccac

SEQ ID NO: 68363 - DNA, 1426 bp, Zea Mays
gaaaaagtatctctctctcccgcgcgcgcgggtgagccggggaccctcctacgtctcgccaccctgctggtatagcccgccggtcgtccacgccatggccacccaatatgcgcggctctccctgccatgccgcctgccctcgccgctccctccgccggtgccgacgacgacccgccggctgccgcgcgccgcggcggcggcggcgtccacctccccgcggtgcccacgcgtcgggggcgcggcggccacgcgcgcccgcggcccgtgccggcctcgcgcctccgagggcgaagtgcagcagcaggaggcggaagcggaccaggtggtggacagcaacatgctgccctactgcagcatcaaccgcaaggagaagaagagcatcggggagatggagcaggagttcctccaggcgatgcaggccttctactacgaaggcaaggcgatcatgtcgaacgaggagttcgacaacctcaaggaggagctcatgtgggaagggagcagcgtcgtgatgctaagcccagatgagcagaagcttttggaagccgccatggcgtatgtctcgggcaaccccatcatgacggatgatgaattcgatcaactaaagctgagactaaagaaagaaggaagcgacattgtacaggaaggtccaagatgcagcctacggagtcgaaaggtctacagtgacttgactgttgactacttgaagatgttgctcctaaatgttcccgcagctgttgtagctctggcactattcttctttttggatgatttcacgggatttgaaatcacatatcttcttgagttgccggagcctttcagtttcatcttcacatggttcgccgcactgcctttaatattttgggtagcgcaggcgatcactaatgtcatagtgaaggacttcctgatcttgaagggtccgtgtccaaactgcgggaatgaaaacctctccttcttcggtaccatactgtcagtgcctagcggtggctcaaaaaacagcgtgaaatgtgcaagttgtggcactgagttggagtacgactcttcaacccgattgatcacactcccagaaccggctgaggctaaataagtgatggcgtggtttcggaaagacggcccggccggcccgcagattcttgatcgacgacagtacgaagcaagactgttcttggatcgggtggcaatcgtggagtgatgtatgtttgctgtgctagtctgtgtgtatatatatttgaacaagtttagacacctgtattatatagatctaatgaaatgggtatatgtatgtgcatagagtgtacaaagaaaaatttaataagccgagttattgtatgttttttctcctcctatatattgctgttacctagtcggctactacaaacaatgagggataaacaagcaaataaacaacgatttctcgatggaaacccac

SEQ ID NO: 68364 - DNA, 2621 bp, Zea Mays
aagaaaaaaagaaaaagcagaaaaagtttcacttgttgctgtccgctccaaactcccattcactcctcgcgcctcgagatcccatccaaatcccgatcagtcgccgcccaagcctagcagatccgccggcgagcgcgcgggggcaatgggtgtcgtctcggcagcggcggacgcgattgtcgcggttttctccctcaccatcgtcgtcgcggcgccgctactcgacgcgcagtccgtcctcccgcataccctctacccggcgccgctcctggaactcaagcgctggtacgccgccgagtttggcgactacctcgtggcccagtcccccggcttcttccgtggccttgtttgcctcgagctcgccttccaatggccgctcgccgtcgccacactctacggcatcctcacccgccgccgctgggctgccaccacctccctcatggccggcgttggcaccctcacctccatggtaaagccgtgtttcccttctcccttgtagtggagtcacgattgtaatgcattatgcatgcatgtctggaatttcgtgagaccagtgtctcaccgctgcagctctgcccctgtgccccagatccaaaacactaccatggtggatgcacaattgtacacttaaaagtcagttcagttgatgtggaatccaaacatagtttctcatgtgcttattttgttatgattggctgattgttcaaatgaaatcgtgctggaaaaggttttgtagacccatgggattcagagttacttccatattgtcttggcataccaattgcatttcctgttggtgatgattcccagaatgtcaagctattgccaacatttttagttttgttctctgaaccatggttccttttgacctcaaatgtgctatggataggtgacgttgttcaggttaaatctcaaccgcactgtctcgtattaaatgataggagggaaaaaaatttcttgtcacaatatcagatatcaaatcatcgcaaaaattgagtactgactacctgttatgctagatgtgagcacattattatttttttcttcgaagtaataatgtgatcttgttattgtatatcctttatataattttaaaatcttctttaatcgttgcagtctgcaattcttggtgagatgttaggttcaggcaaatcaacaccaaagttgcttcagatgtatgttccttatgctgtttttgctgtcattgctattctacgtggactttgctcatgctctggacgcactactgctggttcatcacttgggccttctgcccggaagaagagggtctagatcaggtttctcttccctgcatttgaacaattgtttgatattctattcaggcatatgtttggaaaagctagatgatattagttcaaaattgatccaggaagcgttattcacttatttgcttattcctctctagctcttattttgtttttttaccccttttgaccctcccatgcaaaatttgatatagttttgatcagtttgacagattaattcaactatatattttttgcatatttactgccattatctatgttcgcacgtatcagcagaaaactgtgggattgatgggttctggcattgaagttcaacaccatgtttcattgtcagtttgtttctgaaaacctatcctaaccaattctagaccaagcggatatgttaatcccttctataacaccgctctgctgttggcctttccacatttgccatgctaacaattagagcactgctcctcagaagcatgtctgtttgagattttatgagatcatataacattatgttacaagctgcaaatctataaaacctggccacctgggttacatacgtcacaagctataaaatctggcatttttcagcagtaaccataagctgtagagttctatcagatgttaccttattattcatacaacgtcaatgcactatacatgtacctagagctagaagtgaggaagacagaggattgcagtgctgtcttgttgactaccatataagatatatccataaccataagagatatagtaaaacgaaatgtctggttatatatggcactagtactctgaaaaactgctggtactaaatatgctcaaactatgtgagctatatgtccaatttaaacctcaactgcagtgtcatagccaaaagaacacgtaaggcttctctctaagctacataatcaaatcactgcagtatgccgtatccattacttttgatgccatcgtgttcttgtattatttttctctcaatttgttcttttaaagtttgctctatcattgcagcagtgacacttggagaattttcggtttgagacagtggcgccagagcactaatgctggtcagaagacgattatctggatcaggtttctatccctggtatttagcacggatgttgaaaaatccagatagtgttagtggctgtttctctaggatttggtgttcgttttccctgaaatgtgatattcatcttgcctttatttccattttaccctttgattatatgtcttgctaactaagacattgttttgtttactggatgagctgattcaactctggcattgttctggcgaataagtttcataaatccttgtcttggtaaaatataaaataaaaatcaa

SEQ ID NO: 68365 - DNA, 846 bp, Zea Mays
aaaaatctaaaaagaagaaaaaaagaaaaagcagaaaaagtttcacttgttgctgtccgctccaaactcccattcactcctcgcgcctcgagatcccatccaaatcccgatcagtcgccgcccaagcctagcagatccgccggcgagcgcgcgggggcaatgggtgtcgtctcggcagcggcggacgcgattgtcgcggttttctccctcaccatcgtcgtcgcggcgccgctactcgacgcgcagtccgtcctcccgcataccctctacccggcgccgctcctggaactcaagcgctggtacgccgccgagtttggcgactacctcgtggcccagtcccccggcttcttccgtggccttgtttgcctcgagctcgccttccaatggccgctcgccgtcgccacactctacggcatcctcacccgccgccgctgggctgccaccacctccctcatggccggcgttggcaccctcacctccatgtctgcaattcttgagggtctagatcagcagtgacacttggagaattttcggtttgagacagtggcgccagagcactaatgctggtcagaagacgattatctggatcaggtttctatccctggtatttagcacggatgttgaaaaatccagatagtgttagtggctgtttctctaggatttggtgttcgttttccctgaaatgtgatattcatcttgcctttatttccattttaccctttgattatatgtcttgctaactaagacattgttttgtttactggatgagctgattcaactctggcattgttctggcgaataagtttcataaatccttgtcttggtaaaatataaaataaaaatcaa

SEQ ID NO: 68366 - DNA, 4649 bp, Zea Mays
agagtgctgtgctgttttgcctacgtgcaacgccgcattacaagatcaagtttattacgaaatgtctaaaatctaaatggagtgtcatttggaaagcaagaataaactctgtatgcaacaagaagctgccagcatccactccaccacctgccctctatcaccgtcattgtctactgcacggatcttgatgaagacaagtgatatactttgatgttagaatcctccacaagattaataaccaatccctcttcggtagttcattagaatggagtgcaacaaggaagaagcttcaagagctaaggatttagctttggtaaagctgcaagaagcagactatgctggtgctaaaaggattgccctcaaggctcaaaagcttttctctggccttgaaaatatttctcagctgttaactgtttgtgaagttcactgctgtgctgctattaagatcaacggggagactgactggtatagtgtccttcaagtagaaacaactgcagatgacatattactcaaaaaacagtaccgcaaacttgctctcttactccatccagataagaacaagtttgtgggtgctgaagctgcctttaagctaattggagaagctcacatgatactgacagacaaagtaaaacgttcacgtcatgactcaaaaaggaacccagttattccaaaatctgcaccaaagaagcgtggacgaccatcaaaggaaactgattatgttgctaagagggccaataaggaaaatactgatgctgtatattcaactttctggaccatttgcaccacttgtggaaccaaataccagtacccatatagtttgttgatgaaagttctcttgtgccaggtctgctcaaagagtttctttgcttatgatttgtctaagaaaccgtttgtcagagtggatgcatcaaatccatggagtggaattgggatgcgacacaaaatgtttcccaaccaacaacacaattaccagagtgttcctactcagcaaaatcctgtcactggtcgtcaaactcctgtccccgaccagaaacagcaacctcggaatgtctctggtaagcaaactccaggcattaaccagcaacaacgatcacagaaattccctttcagttcaaggccaaagaatgtggtaaattctcatccatggggtggatttggtaggcaacaggaaatgtgtcctctgagtcaacccacacatgtatctgaccaaaaaccctactatcaaagggcccctggccagcaaaaccctgtcaatggtcatcaaactcttgtcactgaccatcaacagcattctctgaatacccagcaacaatctacaaaccccccttgcaatccaggatcaaagaatgtagtgaattctcaaggggcagccttccagaatagtaatgcaactgcaaacagtaaccttacggatgaagctggggcttgtaatagagaaaagattacaaggccatcattcaatgatgaagatagaactaaatcacaggttgcaaattctgataaagttcatctagtaaacaagcaaatgaagggaaacaaggtagctacaggatccagtcatcctgttgccataaatggtagccaagttgctaggaaagatgttcttactgccgcatgtgcagataaaacatctgggcagcatccttgtatagcaagccagcagagaaatagtgtcattgttgaagatgggtctgatggttgtggaaaggttagtgatcatcttcctaactcttcgacaaagaaaaggataagaaaagaccattcttcctatactgctggcaaaagtgatcatacaacagaaaatgaagttgctgaagcaaacagccaacacaaatatagtattccaagcaaagagaagataacaaatgaaaaagaagtgatcagtggattaaatcttgatgtgttgcaaggaacaaaaagaaaacaacaaacaagttctggaagtggaagtgatgctgctgctaaatctgtaaaccatagtattccctgcaatgttacagtttcatgtccagatccagacttctacgactttgagaaaaatagggatgcagatcgattcacagttgatcagatatgggcagtttatgatgatcttgaaggcatgccaagatactatgctcgaattaagcaggtctactctccaaacttcatgttgcagttcacatggctagagtatgatcctttgtgtgatgctgagaaggaatggtcttctaaggagctgcctgttgcttgtggaaatttcagagttggaagaacactcttgactgaagacactaagatgttttctcatgttgtctcttggacaaaaggaaggaagaggaacagatatgagatttatcctaagaaaggcgaagtctgggcacttttcaggggatgggacatcaactgggtttcagattccgacgatcataggcaccatgattatgatattgttgaaatcacctcagactttgctatgggtttaggcacttatgtgattcccttggtaaagatcaaaggttttgtcagcttatttgttcgatcaagcagtgaagcaccatttctgatacctagtggcaacacccttagtttctcgcacagcatccctttccacaggttggtggaaaatggcaggcaacatatcccaaccggtgctcttgagctggacactgcatcactaccttctgatttggagaaagcgtttactcctgtgaacctcgacaacagttttatgagcaccggaagtggtagcactccatgcaatgtttcatctactagctcctgcgaagtgccggttggaaagaccgaacagactcaggatggtactggtacaggtgtgaaggatggagtcgagaagctgaatcagaatacaaaggtcgaacaagacaacggctcagaagcttcaacgattgatgactgtggcgatgggtggaacgacagctctccgccaggatctccagctgggtttcattaccctgacacggagttttgcagcttcactagcctgagatcattcgacaagttcaagaaagggcaagtttgggcactgtactgcgacaccgacaagttcccaaagtactacggtttggtaaagagcgtcgattcagaagactgcacagtccacataaggtggctggagcactgtccgcgcgaacaagtggaggagcacctggcacaagacggcctgtccattggctgtgggttattcgaagtcagcaggcagagtgagacctacgactgcacagaagtcttctctcacagtgtggaggtgacgggtaaagggaaaagatatgagatccttccgtgtgctggccaggtgtgggctgtatacaaggactggagccgcacatggagcttcgaagattacagtagatgcgagtatcttctggtcgaggtcatggaggtttctgatggtgatataacagtgtcgtgccttactaaagcggagggctttagcactgtgttcatgcaagagcagaacggtaaatccaggagaatagcaaggagtgacttgactatgttctctcatcaggttcctgcctaccgcttgacagacgaaactggcgatctttgtggttactgggagcttgatcctgcgtctttaccggaagttttgctggtcaggaagaccaagtgaaacattgttgagctgatagagaggggttttggcactgtgaaaagtgaagttatgcgctggtgacaaggctgtggtactggattgttgtttatttttggctagttgtaccttgtttcgtgtaaacaggctagtccattagtttgctacctgatgccactatggcaagccttttgctggctcggtctcgctttaggctacgtttcatcatctcacctgtttgtctttgctacgtccattgtggacatttttggtgggtataccagttggtcgcggctgtcttttaaaattaattatacaaacggtatccagacgaatctattagttctaattagtttaggattagttctccatcctaaaattcaggtaactaaactatatgagaaacgttattacaatcttataatatatattccatttacttttgttttgtttcagtccgcaatgtttggggagatgctgggttcagggagagcaacgccgaagctgctcgggttgtacgttctgttccttgtctttgctgtagcttcagttgcgcgtggcctctgctcccgctcagcacaggctacaccggcggcaggtccatcgcctgtacttgctgctccgaagaagagggtttagatacctgatcagggcatgtttgagagtcttgcattgggtccaaaacctctgaaaattacacaatgttcaaaagtttccacgacatggactggattttgctatttgaatggcggtcgacgtgctaaagacatgtgcctggtttgagacgccaagtagaatgagatatggcagtcttccctcttcacggtgatgtagtagtcagaataatcgtagtaggtgttggacaccaaaatgagcggacggtccggcccatgggcccggacggtccgcgtgtcccgagattagattgactcggatgtttatccttatctcgtgcgtggttatccatctaatcacgtgggagtttgttggctatctcttaggaaaaggtccagacctcctcccctataaatataaaggggtacggctgattgag

SEQ ID NO: 68367 - DNA, 4972 bp, Zea Mays
gttcattccgcttggctgagacgggagaacagggatgaatttttcttcttctcttcgtgcggggcctcaccagcaccacagaaggggcggaaaggggtggacgtttctcgtatatccaattgtaggattgaacttgaaggcgatgagcgctggccgaaattttctgtatgcaacaagaagctgccagcatccactccaccacctgccctctatcaccgtcattgtctactgcacggatcttgatgaagacaagtgatatactttgatgttagaatcctccacaagattaataaccaatccctcttcggtagttcattagaatggagtgcaacaaggaagaagcttcaagagctaaggatttagctttggtaaagctgcaagaagcagactatgctggtgctaaaaggattgccctcaaggctcaaaagcttttctctggccttgaaaatatttctcagctgttaactgtttgtgaagttcactgctgtgctgctattaagatcaacggggagactgactggtatagtgtccttcaagtagaaacaactgcagatgacatattactcaaaaaacagtaccgcaaacttgctctcttactccatccagataagaacaagtttgtgggtgctgaagctgcctttaagctaattggagaagctcacatgatactgacagacaaagtaaaacgttcacgtcatgactcaaaaaggaacccagttattccaaaatctgcaccaaagaagcgtggacgaccatcaaaggaaactgattatgttgctaagagggccaataaggaaaatactgatgctgtatattcaactttctggaccatttgcaccacttgtggaaccaaataccagtacccatatagtttgttgatgaaagttctcttgtgccaggtctgctcaaagagtttctttgcttatgatttgtctaagaaaccgtttgtcagagtggatgcatcaaatccatggagtggaattgggatgcgacacaaaatgtttcccaaccaacaacacaattaccagagtgttcctactcagcaaaatcctgtcactggtcgtcaaactcctgtccccgaccagaaacagcaacctcggaatgtctctggtaagcaaactccaggcattaaccagcaacaacgatcacagaaattccctttcagttcaaggccaaagaatgtggtaaattctcatccatggggtggatttggtaggcaacaggaaatgtgtcctctgagtcaacccacacatgtatctgaccaaaaaccctactatcaaagggcccctggccagcaaaaccctgtcaatggtcatcaaactcttgtcactgaccatcaacagcattctctgaatacccagcaacaatctacaaaccccccttgcaatccaggatcaaagaatgtagtgaattctcaaggggcagccttccagaatagtaatgcaactgcaaacagtaaccttacggatgaagctggggcttgtaatagagaaaagattacaaggccatcattcaatgatgaagatagaactaaatcacaggttgcaaattctgataaagttcatctagtaaacaagcaaatgaagggaaacaaggtagctacaggatccagtcatcctgttgccataaatggtagccaagttgctaggaaagatgttcttactgccgcatgtgcagataaaacatctgggcagcatccttgtatagcaagccagcagagaaatagtgtcattgttgaagatgggtctgatggttgtggaaaggttagtgatcatcttcctaactcttcgacaaagaaaaggataagaaaagaccattcttcctatactgctggcaaaagtgatcatacaacagaaaatgaagttgctgaagcaaacagccaacacaaatatagtattccaagcaaagagaagataacaaatgaaaaagaagtgatcagtggattaaatcttgatgtgttgcaaggaacaaaaagaaaacaacaaacaagttctggaagtggaagtgatgctgctgctaaatctgtaaaccatagtattccctgcaatgttacagtttcatgtccagatccagacttctacgactttgagaaaaatagggatgcagatcgattcacagttgatcagatatgggcagtttatgatgatcttgaaggcatgccaagatactatgctcgaattaagcaggtctactctccaaacttcatgttgcagttcacatggctagagtatgatcctttgtgtgatgctgagaaggaatggtcttctaaggagctgcctgttgcttgtggaaatttcagagttggaagaacactcttgactgaagacactaagatgttttctcatgttgtctcttggacaaaaggaaggaagaggaacagatatgagatttatcctaagaaaggcgaagtctgggcacttttcaggggatgggacatcaactgggtttcagattccgacgatcataggcaccatgattatgatattgttgaaatcacctcagactttgctatgggtttaggcacttatgtgattcccttggtaaagatcaaaggttttgtcagcttatttgttcgatcaagcagtgaagcaccatttctgatacctagtggcaacacccttagtttctcgcacagcatccctttccacaggttggtggaaaatggcaggcaacatatcccaaccggtgctcttgagctggacactgcatcactaccttctgatttggagaaagcgtttactcctgtgaacctcgacaacagttttatgagcaccggaagtggtagcactccatgcaatgtttcatctactagctcctgcgaagtgccggttggaaagaccgaacagactcaggatggtactggtacaggtgtgaaggatggagtcgagaagctgaatcagaatacaaaggtcgaacaagacaacggctcagaagcttcaacgattgatgactgtggcgatgggtggaacgacagctctccgccaggatctccagctgggtttcattaccctgacacggagttttgcagcttcactagcctgagatcattcgacaagttcaagaaagggcaagtttgggcactgtactgcgacaccgacaagttcccaaagtactacggtttggtaaagagcgtcgattcagaagactgcacagtccacataaggtggctggagcactgtccgcgcgaacaagtggaggagcacctggcacaagacggcctgtccattggctgtgggttattcgaagtcagcaggcagagtgagacctacgactgcacagaagtcttctctcacagtgtggaggtgacgggtaaagggaaaagatatgagatccttccgtgtgctggccaggtgtgggctgtatacaaggactggagccgcacatggagcttcgaagattacagtagatgcgagtatcttctggtcgaggtcatggaggtttctgatggtgatataacagtgtcgtgccttactaaagcggagggctttagcactgtgttcatgcaagagcagaacggtaaatccaggagaatagcaaggagtgacttgactatgttctctcatcaggttcctgcctaccgcttgacagacgaaactggcgatctttgtggttactgggagcttgatcctgcgtctttaccggaagttttgctggtcaggaagaccaagtgaaacattgttgagctgatagagaggggttttggcactgtgaaaagtgaagttatgcgctggtgacaaggctgtggtactggattgttgtttatttttggctagttgtaccttgtttcgtgtaaacaggctagtccattagtttgctacctgatgccactatggcaagccttttgctggctcggtctcgctttaggctacgtttcatcatctcacctgtttgtctttgctacgtccattgtggacatttttggtgggtataccagttggtcgcggctgtcgttcgcagcttactagtgtttgcacatggcacgccacctcttcccaccatctcgcttaaaagccgagacagtaattaagcagtcaatcgaccccaacatcacacatcctaatggcggtggcggtggacgcggtggcggctctcttctcgctggtcatggccgtcggggcgccgctgttcgactcgcaggtcgtgctcccgctcagcctctacccggcgccgctggtggacgtgtaccggtggttcgtcgccgagttcgacaactacatcgtggccgaccggccgccgttcttccgcggcctcgtctggctcgacctcgccttcctctggccggtcagcctcgccaacctctacggcatcctcgcgcgccgacgctggtccgccaccacctccctcatggccggtgtccacatgctcacctacctgtccgcaatgtttggggagatgctgggttcagggagagcaacgccgaagctgctcgggttgtacgttctgttccttgtctttgctgtagcttcagttgcgcgtggcctctgctcccgctcagcacaggctacaccggcggcaggtccatcgcctgtacttgctgctccgaagaagagggtttagatacctgatcagggcatgtttgagagtcttgcattgggtccaaaacctctgaaaattacacaatgttcaaaagtttccacgacatggactggattttgctatttgaatggcggtcgacgtgctaaagacatgtgcctggtttgagacgccaagtagaatgagatatggcagtcttccctcttcacggtgatgtagtagtcagaataatcgtagtaggtgttggacaccaaaatgagcggacggtccggcccatgggcccggacggtccgcgtgtcccgagattagattgactcggatgtttatccttatctcgtgcgtggttatccatctaatcacgtgggagtttgttggctatctcttaggaaaaggtccagacctcctcccctataaatataaaggggtacggctgattgag

SEQ ID NO: 68368 - DNA, 5007 bp, Zea Mays
ctcgcctgctcccaattcccacctccattgcttcaaacgcggcgagatcggaggccaaagccgcggccaaacaaggctgtctggggtctcaaaccgaaggcccaagcggcgcgcctcgacaccccggctcccctccgcccaatcgcctcccggcccccgcgcagcgtggcgcgttaggtctccgccgcctacctctgtatgcaacaagaagctgccagcatccactccaccacctgccctctatcaccgtcattgtctactgcacggcaggatcttgatgaagacaagtgatatactttgatgttagaatcctccacaagattaataaccaatccctcttcggtagttcattagaatggagtgcaacaaggaagaagcttcaagagctaaggatttagctttggtaaagctgcaagaagcagactatgctggtgctaaaaggattgccctcaaggctcaaaagcttttctctggccttgaaaatatttctcagctgttaactgtttgtgaagttcactgctgtgctgctattaagatcaacggggagactgactggtatagtgtccttcaagtagaaacaactgcagatgacatattactcaaaaaacagtaccgcaaacttgctctcttactccatccagataagaacaagtttgtgggtgctgaagctgcctttaagctaattggagaagctcacatgatactgacagacaaagtaaaacgttcacgtcatgactcaaaaaggaacccagttattccaaaatctgcaccaaagaagcgtggacgaccatcaaaggaaactgattatgttgctaagagggccaataaggaaaatactgatgctgtatattcaactttctggaccatttgcaccacttgtggaaccaaataccagtacccatatagtttgttgatgaaagttctcttgtgccaggtctgctcaaagagtttctttgcttatgatttgtctaagaaaccgtttgtcagagtggatgcatcaaatccatggagtggaattgggatgcgacacaaaatgtttcccaaccaacaacacaattaccagagtgttcctactcagcaaaatcctgtcactggtcgtcaaactcctgtccccgaccagaaacagcaacctcggaatgtctctggtaagcaaactccaggcattaaccagcaacaacgatcacagaaattccctttcagttcaaggccaaagaatgtggtaaattctcatccatggggtggatttggtaggcaacaggaaatgtgtcctctgagtcaacccacacatgtatctgaccaaaaaccctactatcaaagggcccctggccagcaaaaccctgtcaatggtcatcaaactcttgtcactgaccatcaacagcattctctgaatacccagcaacaatctacaaaccccccttgcaatccaggatcaaagaatgtagtgaattctcaaggggcagccttccagaatagtaatgcaactgcaaacagtaaccttacggatgaagctggggcttgtaatagagaaaagattacaaggccatcattcaatgatgaagatagaactaaatcacaggttgcaaattctgataaagttcatctagtaaacaagcaaatgaagggaaacaaggtagctacaggatccagtcatcctgttgccataaatggtagccaagttgctaggaaagatgttcttactgccgcatgtgcagataaaacatctgggcagcatccttgtatagcaagccagcagagaaatagtgtcattgttgaagatgggtctgatggttgtggaaaggttagtgatcatcttcctaactcttcgacaaagaaaaggataagaaaagaccattcttcctatactgctggcaaaagtgatcatacaacagaaaatgaagttgctgaagcaaacagccaacacaaatatagtattccaagcaaagagaagataacaaatgaaaaagaagtgatcagtggattaaatcttgatgtgttgcaaggaacaaaaagaaaacaacaaacaagttctggaagtggaagtgatgctgctgctaaatctgtaaaccatagtattccctgcaatgttacagtttcatgtccagatccagacttctacgactttgagaaaaatagggatgcagatcgattcacagttgatcagatatgggcagtttatgatgatcttgaaggcatgccaagatactatgctcgaattaagcaggtctactctccaaacttcatgttgcagttcacatggctagagtatgatcctttgtgtgatgctgagaaggaatggtcttctaaggagctgcctgttgcttgtggaaatttcagagttggaagaacactcttgactgaagacactaagatgttttctcatgttgtctcttggacaaaaggaaggaagaggaacagatatgagatttatcctaagaaaggcgaagtctgggcacttttcaggggatgggacatcaactgggtttcagattccgacgatcataggcaccatgattatgatattgttgaaatcacctcagactttgctatgggtttaggcacttatgtgattcccttggtaaagatcaaaggttttgtcagcttatttgttcgatcaagcagtgaagcaccatttctgatacctagtggcaacacccttagtttctcgcacagcatccctttccacaggttggtggaaaatggcaggcaacatatcccaaccggtgctcttgagctggacactgcatcactaccttctgatttggagaaagcgtttactcctgtgaacctcgacaacagttttatgagcaccggaagtggtagcactccatgcaatgtttcatctactagctcctgcgaagtgccggttggaaagaccgaacagactcaggatggtactggtacaggtgtgaaggatggagtcgagaagctgaatcagaatacaaaggtcgaacaagacaacggctcagaagcttcaacgattgatgactgtggcgatgggtggaacgacagctctccgccaggatctccagctgggtttcattaccctgacacggagttttgcagcttcactagcctgagatcattcgacaagttcaagaaagggcaagtttgggcactgtactgcgacaccgacaagttcccaaagtactacggtttggtaaagagcgtcgattcagaagactgcacagtccacataaggtggctggagcactgtccgcgcgaacaagtggaggagcacctggcacaagacggcctgtccattggctgtgggttattcgaagtcagcaggcagagtgagacctacgactgcacagaagtcttctctcacagtgtggaggtgacgggtaaagggaaaagatatgagatccttccgtgtgctggccaggtgtgggctgtatacaaggactggagccgcacatggagcttcgaagattacagtagatgcgagtatcttctggtcgaggtcatggaggtttctgatggtgatataacagtgtcgtgccttactaaagcggagggctttagcactgtgttcatgcaagagcagaacggtaaatccaggagaatagcaaggagtgacttgactatgttctctcatcaggttcctgcctaccgcttgacagacgaaactggcgatctttgtggttactgggagcttgatcctgcgtctttaccggaagttttgctggtcaggaagaccaagtgaaacattgttgagctgatagagaggggttttggcactgtgaaaagtgaagttatgcgctggtgacaaggctgtggtactggattgttgtttatttttggctagttgtaccttgtttcgtgtaaacaggctagtccattagtttgctacctgatgccactatggcaagccttttgctggctcggtctcgctttaggctacgtttcatcatctcacctgtttgtctttgctacgtccattgtggacatttttggtgggtataccagttggtcgcggctgtcgttcgcagcttactagtgtttgcacatggcacgccacctcttcccaccatctcgcttaaaagccgagacagtaattaagcagtcaatcgaccccaacatcacacatcctaatggcggtggcggtggacgcggtggcggctctcttctcgctggtcatggccgtcggggcgccgctgttcgactcgcaggtcgtgctcccgctcagcctctacccggcgccgctggtggacgtgtaccggtggttcgtcgccgagttcgacaactacatcgtggccgaccggccgccgttcttccgcggcctcgtctggctcgacctcgccttcctctggccggtcagcctcgccaacctctacggcatcctcgcgcgccgacgctggtccgccaccacctccctcatggccggtgtccacatgctcacctacctgtccgcaatgtttggggagatgctgggttcagggagagcaacgccgaagctgctcgggttgtacgttctgttccttgtctttgctgtagcttcagttgcgcgtggcctctgctcccgctcagcacaggctacaccggcggcaggtccatcgcctgtacttgctgctccgaagaagagggtttagatacctgatcagggcatgtttgagagtcttgcattgggtccaaaacctctgaaaattacacaatgttcaaaagtttccacgacatggactggattttgctatttgaatggcggtcgacgtgctaaagacatgtgcctggtttgagacgccaagtagaatgagatatggcagtcttccctcttcacggtgatgtagtagtcagaataatcgtagtaggtgttggacaccaaaatgagcggacggtccggcccatgggcccggacggtccgcgtgtcccgagattagattgactcggatgtttatccttatctcgtgcgtggttatccatctaatcacgtgggagtttgttggctatctcttaggaaaaggtccagacctcctcccctataaatataaaggggtacggctgattgag

SEQ ID NO: 68369 - DNA, 4804 bp, Zea Mays
gttttggagggaagttgcgcgccacctaatttcaggagcccccgacaccaaaacccccctgctaggctgctcgcctgctcccaattcccacctccattgcttcaaacgcggcgagatcggaggccaaagccgcggccaaacaaggctgtctggggtctcaaaccgaaggcccaagcggcgcgcctcgacaccccggctcccctccgcccaatcgcctcccggcccccgcgcagcgtggcgcgttaggtctccgccgcctacctctgtatgcaacaagaagctgccagcatccactccaccacctgccctctatcaccgtcattgtctactgcacggatcttgatgaagacaagtgatatactttgatgttagaatcctccacaagattaataaccaatccctcttcggtagttcattagaatggagtgcaacaaggaagaagcttcaagagctaaggatttagctttggtaaagctgcaagaagcagactatgctggtgctaaaaggattgccctcaaggctcaaaagcttttctctggccttgaaaatatttctcagctgttaactgtttgtgaagttcactgctgtgctgctattaagatcaacggggagactgactggtatagtgtccttcaagtagaaacaactgcagatgacatattactcaaaaaacagtaccgcaaacttgctctcttactccatccagataagaacaagtttgtgggtgctgaagctgcctttaagctaattggagaagctcacatgatactgacagacaaagtaaaacgttcacgtcatgactcaaaaaggaacccagttattccaaaatctgcaccaaagaagcgtggacgaccatcaaaggaaactgattatgttgctaagagggccaataaggaaaatactgatgctgtatattcaactttctggaccatttgcaccacttgtggaaccaaataccagtacccatatagtttgttgatgaaagttctcttgtgccaggtctgctcaaagagtttctttgcttatgatttgtctaagaaaccgtttgtcagagtggatgcatcaaatccatggagtggaattgggatgcgacacaaaatgtttcccaaccaacaacacaattaccagagtgttcctactcagcaaaatcctgtcactggtcgtcaaactcctgtccccgaccagaaacagcaacctcggaatgtctctggtaagcaaactccaggcattaaccagcaacaacgatcacagaaattccctttcagttcaaggccaaagaatgtggtaaattctcatccatggggtggatttggtaggcaacaggaaatgtgtcctctgagtcaacccacacatgtatctgaccaaaaaccctactatcaaagggcccctggccagcaaaaccctgtcaatggtcatcaaactcttgtcactgaccatcaacagcattctctgaatacccagcaacaatctacaaaccccccttgcaatccaggatcaaagaatgtagtgaattctcaaggggcagccttccagaatagtaatgcaactgcaaacagtaaccttacggatgaagctggggcttgtaatagagaaaagattacaaggccatcattcaatgatgaagatagaactaaatcacaggttgcaaattctgataaagttcatctagtaaacaagcaaatgaagggaaacaaggtagctacaggatccagtcatcctgttgccataaatggtagccaagttgctaggaaagatgttcttactgccgcatgtgcagataaaacatctgggcagcatccttgtatagcaagccagcagagaaatagtgtcattgttgaagatgggtctgatggttgtggaaaggttagtgatcatcttcctaactcttcgacaaagaaaaggataagaaaagaccattcttcctatactgctggcaaaagtgatcatacaacagaaaatgaagttgctgaagcaaacagccaacacaaatatagtattccaagcaaagagaagataacaaatgaaaaagaagtgatcagtggattaaatcttgatgtgttgcaaggaacaaaaagaaaacaacaaacaagttctggaagtggaagtgatgctgctgctaaatctgtaaaccatagtattccctgcaatgttacagtttcatgtccagatccagacttctacgactttgagaaaaatagggatgcagatcgattcacagttgatcagatatgggcagtttatgatgatcttgaaggcatgccaagatactatgctcgaattaagcaggtctactctccaaacttcatgttgcagttcacatggctagagtatgatcctttgtgtgatgctgagaaggaatggtcttctaaggagctgcctgttgcttgtggaaatttcagagttggaagaacactcttgactgaagacactaagatgttttctcatgttgtctcttggacaaaaggaaggaagaggaacagatatgagatttatcctaagaaaggcgaagtctgggcacttttcaggggatgggacatcaactgggtttcagattccgacgatcataggcaccatgattatgatattgttgaaatcacctcagactttgctatgggtttaggcacttatgtgattcccttggtaaagatcaaaggttttgtcagcttatttgttcgatcaagcagtgaagcaccatttctgatacctagtggcaacacccttagtttctcgcacagcatccctttccacaggttggtggaaaatggcaggcaacatatcccaaccggtgctcttgagctggacactgcatcactaccttctgatttggagaaagcgtttactcctgtgaacctcgacaacagttttatgagcaccggaagtggtagcactccatgcaatgtttcatctactagctcctgcgaagtgccggttggaaagaccgaacagactcaggatggtactggtacaggtgtgaaggatggagtcgagaagctgaatcagaatacaaaggtcgaacaagacaacggctcagaagcttcaacgattgatgactgtggcgatgggtggaacgacagctctccgccaggatctccagctgggtttcattaccctgacacggagttttgcagcttcactagcctgagatcattcgacaagttcaagaaagggcaagtttgggcactgtactgcgacaccgacaagttcccaaagtactacggtttggtaaagagcgtcgattcagaagactgcacagtccacataaggtggctggagcactgtccgcgcgaacaagtggaggagcacctggcacaagacggcctgtccattggctgtgggttattcgaagtcagcaggcagagtgagacctacgactgcacagaagtcttctctcacagtgtggaggtgacgggtaaagggaaaagatatgagatccttccgtgtgctggccaggtgtgggctgtatacaaggactggagccgcacatggagcttcgaagattacagtagatgcgagtatcttctggtcgaggtcatggaggtttctgatggtgatataacagtgtcgtgccttactaaagcggagggctttagcactgtgttcatgcaagagcagaacggtaaatccaggagaatagcaaggagtgacttgactatgttctctcatcaggttcctgcctaccgcttgacagacgaaactggcgatctttgtggttactgggagcttgatcctgcgtctttaccggaagttttgctggtcaggaagaccaagtgaaacattgttgagctgatagagaggggttttggcactgtgaaaagtgaagttatgcgctggtgacaaggctgtggtactggattgttgtttatttttggctagttgtaccttgtttcgtgtaaacaggctagtccattagtttgctacctgatgccactatggcaagccttttgctggctcggtctcgctttaggctacgtttcatcatctcacctgtttgtctttgctacgtccattgtggacatttttggtgggtataccagttggtcgcggctgtcttttaaaattaattatacaaacggtatccagacgaatctattagttctaattagtttaggattagttctccatcctaaaattcaggtaactaaactatatgagaaacgttattacaatcttataatatatattccatttacttttgttttgtttcagtccgcaatgtttggggagatgctgggttcagggagagcaacgccgaagctgctcgggttgtacgttctgttccttgtctttgctgtagcttcagttgcgcgtggcctctgctcccgctcagcacaggctacaccggcggcaggtccatcgcctgtacttgctgctccgaagaagagggtttagatacctgatcagggcatgtttgagagtcttgcattgggtccaaaacctctgaaaattacacaatgttcaaaagtttccacgacatggactggattttgctatttgaatggcggtcgacgtgctaaagacatgtgcctggtttgagacgccaagtagaatgagatatggcagtcttccctcttcacggtgatgtagtagtcagaataatcgtagtaggtgttggacaccaaaatgagcggacggtccggcccatgggcccggacggtccgcgtgtcccgagattagattgactcggatgtttatccttatctcgtgcgtggttatccatctaatcacgtgggagtttgttggctatctcttaggaaaaggtccagacctcctcccctataaatataaaggggtacggctgattgag

SEQ ID NO: 68370 - DNA, 5103 bp, Zea Mays
ccactttgcccgtttggcaacgatgtttttggttttggagggaagttgcgcgccacctaatttcaggagcccccgacaccaaaacccccctgctaggctgctcgcctgctcccaattcccacctccattgcttcaaacgcggcgagatcggaggccaaagccgcggccaaacaaggctgtctggggtctcaaaccgaaggcccaagcggcgcgcctcgacaccccggctcccctccgcccaatcgcctcccggcccccgcgcagcgtggcgcgttaggtctccgccgcctacctctgtatgcaacaagaagctgccagcatccactccaccacctgccctctatcaccgtcattgtctactgcacggatcttgatgaagacaagtgatatactttgatgttagaatcctccacaagattaataaccaatccctcttcggtagttcattagaatggagtgcaacaaggaagaagcttcaagagctaaggatttagctttggtaaagctgcaagaagcagactatgctggtgctaaaaggattgccctcaaggctcaaaagcttttctctggccttgaaaatatttctcagctgttaactgtttgtgaagttcactgctgtgctgctattaagatcaacggggagactgactggtatagtgtccttcaagtagaaacaactgcagatgacatattactcaaaaaacagtaccgcaaacttgctctcttactccatccagataagaacaagtttgtgggtgctgaagctgcctttaagctaattggagaagctcacatgatactgacagacaaagtaaaacgttcacgtcatgactcaaaaaggaacccagttattccaaaatctgcaccaaagaagcgtggacgaccatcaaaggaaactgattatgttgctaagagggccaataaggaaaatactgatgctgtatattcaactttctggaccatttgcaccacttgtggaaccaaataccagtacccatatagtttgttgatgaaagttctcttgtgccaggtctgctcaaagagtttctttgcttatgatttgtctaagaaaccgtttgtcagagtggatgcatcaaatccatggagtggaattgggatgcgacacaaaatgtttcccaaccaacaacacaattaccagagtgttcctactcagcaaaatcctgtcactggtcgtcaaactcctgtccccgaccagaaacagcaacctcggaatgtctctggtaagcaaactccaggcattaaccagcaacaacgatcacagaaattccctttcagttcaaggccaaagaatgtggtaaattctcatccatggggtggatttggtaggcaacaggaaatgtgtcctctgagtcaacccacacatgtatctgaccaaaaaccctactatcaaagggcccctggccagcaaaaccctgtcaatggtcatcaaactcttgtcactgaccatcaacagcattctctgaatacccagcaacaatctacaaaccccccttgcaatccaggatcaaagaatgtagtgaattctcaaggggcagccttccagaatagtaatgcaactgcaaacagtaaccttacggatgaagctggggcttgtaatagagaaaagattacaaggccatcattcaatgatgaagatagaactaaatcacaggttgcaaattctgataaagttcatctagtaaacaagcaaatgaagggaaacaaggtagctacaggatccagtcatcctgttgccataaatggtagccaagttgctaggaaagatgttcttactgccgcatgtgcagataaaacatctgggcagcatccttgtatagcaagccagcagagaaatagtgtcattgttgaagatgggtctgatggttgtggaaaggttagtgatcatcttcctaactcttcgacaaagaaaaggataagaaaagaccattcttcctatactgctggcaaaagtgatcatacaacagaaaatgaagttgctgaagcaaacagccaacacaaatatagtattccaagcaaagagaagataacaaatgaaaaagaagtgatcagtggattaaatcttgatgtgttgcaaggaacaaaaagaaaacaacaaacaagttctggaagtggaagtgatgctgctgctaaatctgtaaaccatagtattccctgcaatgttacagtttcatgtccagatccagacttctacgactttgagaaaaatagggatgcagatcgattcacagttgatcagatatgggcagtttatgatgatcttgaaggcatgccaagatactatgctcgaattaagcaggtctactctccaaacttcatgttgcagttcacatggctagagtatgatcctttgtgtgatgctgagaaggaatggtcttctaaggagctgcctgttgcttgtggaaatttcagagttggaagaacactcttgactgaagacactaagatgttttctcatgttgtctcttggacaaaaggaaggaagaggaacagatatgagatttatcctaagaaaggcgaagtctgggcacttttcaggggatgggacatcaactgggtttcagattccgacgatcataggcaccatgattatgatattgttgaaatcacctcagactttgctatgggtttaggcacttatgtgattcccttggtaaagatcaaaggttttgtcagcttatttgttcgatcaagcagtgaagcaccatttctgatacctagtggcaacacccttagtttctcgcacagcatccctttccacaggttggtggaaaatggcaggcaacatatcccaaccggtgctcttgagctggacactgcatcactaccttctgatttggagaaagcgtttactcctgtgaacctcgacaacagttttatgagcaccggaagtggtagcactccatgcaatgtttcatctactagctcctgcgaagtgccggttggaaagaccgaacagactcaggatggtactggtacaggtgtgaaggatggagtcgagaagctgaatcagaatacaaaggtcgaacaagacaacggctcagaagcttcaacgattgatgactgtggcgatgggtggaacgacagctctccgccaggatctccagctgggtttcattaccctgacacggagttttgcagcttcactagcctgagatcattcgacaagttcaagaaagggcaagtttgggcactgtactgcgacaccgacaagttcccaaagtactacggtttggtaaagagcgtcgattcagaagactgcacagtccacataaggtggctggagcactgtccgcgcgaacaagtggaggagcacctggcacaagacggcctgtccattggctgtgggttattcgaagtcagcaggcagagtgagacctacgactgcacagaagtcttctctcacagtgtggaggtgacgggtaaagggaaaagatatgagatccttccgtgtgctggccaggtgtgggctgtatacaaggactggagccgcacatggagcttcgaagattacagtagatgcgagtatcttctggtcgaggtcatggaggtttctgatggtgatataacagtgtcgtgccttactaaagcggagggctttagcactgtgttcatgcaagagcagaacggtaaatccaggagaatagcaaggagtgacttgactatgttctctcatcaggttcctgcctaccgcttgacagacgaaactggcgatctttgtggttactgggagcttgatcctgcgtctttaccggaagttttgctggtcaggaagaccaagtgaaacattgttgagctgatagagaggggttttggcactgtgaaaagtgaagttatgcgctggtgacaaggctgtggtactggattgttgtttatttttggctagttgtaccttgtttcgtgtaaacaggctagtccattagtttgctacctgatgccactatggcaagccttttgctggctcggtctcgctttaggctacgtttcatcatctcacctgtttgtctttgctacgtccattgtggacatttttggtgggtataccagttggtcgcggctgtcgttcgcagcttactagtgtttgcacatggcacgccacctcttcccaccatctcgcttaaaagccgagacagtaattaagcagtcaatcgaccccaacatcacacatcctaatggcggtggcggtggacgcggtggcggctctcttctcgctggtcatggccgtcggggcgccgctgttcgactcgcaggtcgtgctcccgctcagcctctacccggcgccgctggtggacgtgtaccggtggttcgtcgccgagttcgacaactacatcgtggccgaccggccgccgttcttccgcggcctcgtctggctcgacctcgccttcctctggccggtcagcctcgccaacctctacggcatcctcgcgcgccgacgctggtccgccaccacctccctcatggccggtgtccacatgctcacctacctgtccgcaatgtttggggagatgctgggttcagggagagcaacgccgaagctgctcgggttgtacgttctgttccttgtctttgctgtagcttcagttgcgcgtggcctctgctcccgctcagcacaggctacaccggcggcaggtccatcgcctgtacttgctgctccgaagaagagggtttagatacctgatcagggcatgtttgagagtcttgcattgggtccaaaacctctgaaaattacacaatgttcaaaagtttccacgacatggactggattttgctatttgaatggcggtcgacgtgctaaagacatgtgcctggtttgagacgccaagtagaatgagatatggcagtcttccctcttcacggtgatgtagtagtcagaataatcgtagtaggtgttggacaccaaaatgagcggacggtccggcccatgggcccggacggtccgcgtgtcccgagattagattgactcggatgtttatccttatctcgtgcgtggttatccatctaatcacgtgggagtttgttggctatctcttaggaaaaggtccagacctcctcccctataaatataaaggggtacggctgattgag

SEQ ID NO: 68371 - DNA, 1756 bp, Zea Mays
ctaccggacagtgaggcgccgcttgccctccacatacggccgcggcgaggaacccaaaaggccaaaaccctcccaaaagctactacacagtacacacacggaacggaatccgggcatccgggaaagcagccctaatctcaaggccgcggctgcgagcgctgcttcccacctcccaactccagaagtcctccctagacgccgccagccgcgcgcacacccaccgagagctcctcgggctttctttctccgttcctccctcgcgcgctcagggtttcacgatggaggccgaggcggcggccaagagggcgcgggagggcggggaggacgccaccgcgccggtggcgggggccgaggcggtggtcgccggtgctggcgagcaggcgggaatctccgccgtcatcccaggatggttctccgagatcagccccatgtggcccggtgaggcgcactccttgaaggtggagaaggttctgttccagggcaagtcagactaccaaaatgtgatggtttttcagtcctccacgtacgggaaggtgcttgtcctcgacggagttattcaggtgacagagagggatgagtgcgcgtaccaagagatgattactcacctgcccctttgctccatcaaagaccccaagaaggtatgttattggagggggggatggtggtgttttgcgtgaggtttcacggcatatctctgtggagcagattgacatctgtgaaattgataagatggtggtagatgtctccaagcaatttttccctcatctagctgttggatttgaagaccctcgtgtgtcattacacattggagatggggttgccttcttgaaaaatgctccagagggtacatatgatgcagtaattgtggattcttctgatccgataggtcctgctcaggagctttttgagaagcctttcttccagtcggtggccagagctttgcgtccaggtggagttgtatgcacccaggcagagagcatatggctacatatgcacatcattgaagatattttcgtcaattgccgccaagttttcaaaggctcagttaactatgcttggacaacagtacctacataccctagcggagttattgggttcatgctttgctccaccgaagggcctgctgttgatttccagcaccctgttttcaacatcgaggaggatgaacattctacgaaatcaaaaggaccccttaagttctacaactcggagatccacacggcatcattctgtttgccctcttttgcaaagagggtaattgagtcaaaggcaagctagacgtgaggatacttcaccaagtccagtcgattgggttaagtaccttaggcgcaacacaaaatttgttgtcgtgtgaaaatgggatgcctccctcccccaccccccacttgatgaataagcacatgagatgagatgcaacggttatcggagttgtcagtctatacgattctgtctgttgtatgtgccggctgccaggtgcagctatgaaaacgttttgcaatagctgttttcggcagtgctctgatcaggttgagttttggacatcatttattatgttcctgcatccatacctgatactccctccgttcttttttatttggcgcggtttagttcaaaaatgaactagtggtgataaatattcgagagaacggaggtagtaccacagatggaatatataagaaataaaactgtgtaatggttgttgccatcctatctttttgaaactggttcagctccaaaaaacataaatagataaaac

SEQ ID NO: 68372 - DNA, 2273 bp, Zea Mays
gggatggttcccaataaaaggaagtaagagaatgccagggccaactaggtccactaattatgaatatgaccgcaggtcatcattgaatggctgcaacgatgggttcaatatctgccaatggttcttaccaaacaaataggcccagtgcactaaagcaggcacctcacatgcaattccaacaatgttgcaacggtggacttaggttcttaagcaagcattcccaatccacgcgaagtaagatacaggtggctaaaagaagagctacagataatggaattcatccaaagactacgggacatcgggcacctattgtatgttctgctgggatgactattgtatttgttgcaactgaagtgcacccatggtgcaaaactggtggcctcggtgatgttgtaggaggactgcccccagctttggctgctatgggacaccgtgtcatgacaatagctcctcgttatgatcaatacaaggatgcatgggatacaagtgtccttgttgaggtaaatattggtgacacggtagaaactgttcgcttcttccactgctacaaaagaggagttgatcgtgtttttgttgatcatcctatgtttcttgaaaaggtatggggcaagactggagcaaaattgtatggtcctactactggaactgactatcgagataaccagttgaggttctgccttttgtgccttgctgctttggaggctccaagagttctcaatttcaacaattctgaatatttctctggaccatatggggaagatgttgtcttcgtagccaatgattggcacactgctattttgccatgttatttgaagagcatgtataagccaaatggaatttataaaaatgctaaggttgctttctgcatacataatattgcctatcaaggtagatttgcccgagcagacttcgatcttcttaatctacctgacagtttcttgccatcatttgattttattgatggacatgttaagcctgttctagggagaaagcttaactggatgaaggcagggatcattgagagtgatctggttctaacagtcagtccacattatgtcaaggaactcacatctggcccagataagggtgttgagttggatggtgtccttcgcacaaagcctctagaaattggaatcgttaatggcatggatgtttatgaatgggatccttcaacagataagtacatcagcgtgaaatatgatgcaacaacggtaactgaagcaagggctctcaataaagagagtttgcaagcagaagtcggattgcctgtggactcgagcatccctgttatagttttcgtcgggcgtctcgaagaacagaaagggtccgacatactcattgcagccattccagagttcgtgggcgagaatgtccagataatcgttcttggcacgggaaagaagaagatggaggaggaactaacgcagctggaagtgaaatatccaaacaacgctagaggcatagcgaaattcaatgttccattggcacacatgatgtttgccggggctgacttcattatcgtcccaagcaggtttgagccatgtggtctcattcagctgcaagggatgagatatggagtgattcctatctgttcatccactggaggacttgtcgacacggttgaggagggcgtcaccggattccacatgggttctttcaatgtcgagtgtgaaactgtagacccagccgacgtgacagcagtggcgtcaaccgtcacgcgagccctgaagcagtacgacaccccggcattccatgagatggttcagaactgcatggcgaaagacctgtcctggaaggggcctgcgaagaagtgggaggaggtgcttctgggccttggagtcgaggggagtcgagctggcatcgacgacgcagaggagatcgccccacttgccaaggaaaacgtagccactccgtgagggcttggtggtgcctcgactcggaaacacgcgttggtgataggaagcgtcttctaggatcctcctgggcggccttgtggctggtggagtgaggtgtccagtcagacacggtttcgcctctactactagtctactactactacctcattgtaatataatccttggcattctaaaaaatgccatgcctgctctaattcttctgttcttgcgcaacatacacttcccgcttccgttcggtcgacaacggttatgtaaatatagcgaatgctagcgggcagctcgaatcatcccaagtggtagggtcacgatggagttgtttgaaatggctcgttcttgtgcatagttcgcttctcagtg

SEQ ID NO: 68373 - DNA, 2228 bp, Zea Mays
ctcccttggagcgtctgcccgaatccagaggtcatcattgaatggctgcaacgatgggttcaatatctgccaatggttcttaccaaacaaataggcccagtgcactaaagcaggcacctcacatgcaattccaacaatgttgcaacggtggacttaggttcttaagcaagcattcccaatccacgcgaagtaagatacaggtggctaaaagaagagctacagataatggaattcatccaaagactacgggacatcgggcacctattgtatgttctgctgggatgactattgtatttgttgcaactgaagtgcacccatggtgcaaaactggtggcctcggtgatgttgtaggaggactgcccccagctttggctgctatgggacaccgtgtcatgacaatagctcctcgttatgatcaatacaaggatgcatgggatacaagtgtccttgttgaggtaaatattggtgacacggtagaaactgttcgcttcttccactgctacaaaagaggagttgatcgtgtttttgttgatcatcctatgtttcttgaaaaggtatggggcaagactggagcaaaattgtatggtcctactactggaactgactatcgagataaccagttgaggttctgccttttgtgccttgctgctttggaggctccaagagttctcaatttcaacaattctgaatatttctctggaccatatggggaagatgttgtcttcgtagccaatgattggcacactgctattttgccatgttatttgaagagcatgtataagccaaatggaatttataaaaatgctaaggttgctttctgcatacataatattgcctatcaaggtagatttgcccgagcagacttcgatcttcttaatctacctgacagtttcttgccatcatttgattttattgatggacatgttaagcctgttctagggagaaagcttaactggatgaaggcagggatcattgagagtgatctggttctaacagtcagtccacattatgtcaaggaactcacatctggcccagataagggtgttgagttggatggtgtccttcgcacaaagcctctagaaattggaatcgttaatggcatggatgtttatgaatgggatccttcaacagataagtacatcagcgtgaaatatgatgcaacaacggtaactgaagcaagggctctcaataaagagagtttgcaagcagaagtcggattgcctgtggactcgagcatccctgttatagttttcgtcgggcgtctcgaagaacagaaagggtccgacatactcattgcagccattccagagttcgtgggcgagaatgtccagataatcgttcttggcacgggaaagaagaagatggaggaggaactaacgcagctggaagtgaaatatccaaacaacgctagaggcatagcgaaattcaatgttccattggcacacatgatgtttgccggggctgacttcattatcgtcccaagcaggtttgagccatgtggtctcattcagctgcaagggatgagatatggagtgattcctatctgttcatccactggaggacttgtcgacacggttgaggagggcgtcaccggattccacatgggttctttcaatgtcgagtgtgaaactgtagacccagccgacgtgacagcagtggcgtcaaccgtcacgcgagccctgaagcagtacgacaccccggcattccatgagatggttcagaactgcatggcgaaagacctgtcctggaaggggcctgcgaagaagtgggaggaggtgcttctgggccttggagtcgaggggagtcgagctggcatcgacgacgcagaggagatcgccccacttgccaaggaaaacgtagccactccgtgagggcttggtggtgcctcgactcggaaacacgcgttggtgataggaagcgtcttctaggatcctcctgggcggccttgtggctggtggagtgaggtgtccagtcagacacggtttcgcctctactactagtctactactactacctcattgtaatataatccttggcattctaaaaaatgccatgcctgctctaattcttctgttcttgcgcaacatacacttcccgcttccgttcggtcgacaacggttatgtaaatatagcgaatgctagcgggcagctcgaatcatcccaagtggtagggtcacgatggagttgtttgaaatggctcgttcttgtgcatagttcgcttctcagtg

SEQ ID NO: 68374 - DNA, 2293 bp, Zea Mays
gctttttgtccaccgtgaagttgtctttgttctgtggttttgcacttgggacttggcttcggattttggacagtgtgacgttcgtgtgcgctaaggtcatcattgaatggctgcaacgatgggttcaatatctgccaatggttcttaccaaacaaataggcccagtgcactaaagcaggcacctcacatgcaattccaacaatgttgcaacggtggacttaggttcttaagcaagcattcccaatccacgcgaagtaagatacaggtggctaaaagaagagctacagataatggaattcatccaaagactacgggacatcgggcacctattgtatgttctgctgggatgactattgtatttgttgcaactgaagtgcacccatggtgcaaaactggtggcctcggtgatgttgtaggaggactgcccccagctttggctgctatgggacaccgtgtcatgacaatagctcctcgttatgatcaatacaaggatgcatgggatacaagtgtccttgttgaggtaaatattggtgacacggtagaaactgttcgcttcttccactgctacaaaagaggagttgatcgtgtttttgttgatcatcctatgtttcttgaaaaggtatggggcaagactggagcaaaattgtatggtcctactactggaactgactatcgagataaccagttgaggttctgccttttgtgccttgctgctttggaggctccaagagttctcaatttcaacaattctgaatatttctctggaccatatggggaagatgttgtcttcgtagccaatgattggcacactgctattttgccatgttatttgaagagcatgtataagccaaatggaatttataaaaatgctaaggttgctttctgcatacataatattgcctatcaaggtagatttgcccgagcagacttcgatcttcttaatctacctgacagtttcttgccatcatttgattttattgatggacatgttaagcctgttctagggagaaagcttaactggatgaaggcagggatcattgagagtgatctggttctaacagtcagtccacattatgtcaaggaactcacatctggcccagataagggtgttgagttggatggtgtccttcgcacaaagcctctagaaattggaatcgttaatggcatggatgtttatgaatgggatccttcaacagataagtacatcagcgtgaaatatgatgcaacaacggtaactgaagcaagggctctcaataaagagagtttgcaagcagaagtcggattgcctgtggactcgagcatccctgttatagttttcgtcgggcgtctcgaagaacagaaagggtccgacatactcattgcagccattccagagttcgtgggcgagaatgtccagataatcgttcttggcacgggaaagaagaagatggaggaggaactaacgcagctggaagtgaaatatccaaacaacgctagaggcatagcgaaattcaatgttccattggcacacatgatgtttgccggggctgacttcattatcgtcccaagcaggtttgagccatgtggtctcattcagctgcaagggatgagatatggagtgattcctatctgttcatccactggaggacttgtcgacacggttgaggagggcgtcaccggattccacatgggttctttcaatgtcgagtgtgaaactgtagacccagccgacgtgacagcagtggcgtcaaccgtcacgcgagccctgaagcagtacgacaccccggcattccatgagatggttcagaactgcatggcgaaagacctgtcctggaaggggcctgcgaagaagtgggaggaggtgcttctgggccttggagtcgaggggagtcgagctggcatcgacgacgcagaggagatcgccccacttgccaaggaaaacgtagccactccgtgagggcttggtggtgcctcgactcggaaacacgcgttggtgataggaagcgtcttctaggatcctcctgggcggccttgtggctggtggagtgaggtgtccagtcagacacggtttcgcctctactactagtctactactactacctcattgtaatataatccttggcattctaaaaaatgccatgcctgctctaattcttctgttcttgcgcaacatacacttcccgcttccgttcggtcgacaacggttatgtaaatatagcgaatgctagcgggcagctcgaatcatcccaagtggtagggtcacgatggagttgtttgaaatggctcgttcttgtgcatagttcgcttctcagtg

SEQ ID NO: 68375 - DNA, 1269 bp, Zea Mays
atgctccctgctcgctcctagtccctcccgggctcccggcagcggcggcgcaccttatggcgacttgagctctctgggcgacgtcctcgggacgggcagactgtaattgaaatgaaaaggataggtagatctagctaattcgacaacagagcaaggtgcgctcctatggaagtggaagaagcaggaggcgaagtggagaacgccggcaaggacgaggcggaggcggagtaccattcgcgcgatttcgaatgggaggacctcaaggaagaggtggaatctggacctgtcttctcctaccacctctccccctttctcgaccccgccgccagtaccacctcgccgccgcagccctcgtcggaggcctggagaagcttccaccgtcgccatgcgtccggaaaattctttaaggaaaggagatatttgcttaaggaatttcctgaactttgtagcagcaaagatcatgccaaggttttagaagtggggtgtgggaatggaagcactgctgtttccattctacgatccaagtcaccatggaattagagaagagcacccagtcttccttggagagaaccaatgttgtgctggtggcatggattttattaccatgatattcacactgtcagccatacccttcgacataatgccaactaccatagaacaatgtgtttctgttctgaaaccaggcggccttcttctttttagggattacggtctttatgacatgacaatgcttcggtttttacctcatcaaagagtagggtttcgggaatatatgcgatcagatggtaccttttcatacttcttctcattggatactgtgagagaactctttcgtgctgctgggctagtagagttggagctggaatattgctgtgtcaagtccgtgaaccgaaagaatgggaagacgatgcggcgggtatgggtccatggcaaattcaaaaaaccacctaggtgacatcagttagggcttgttcgtgttcagctcaatccatatgaattggatagaattgtgtggatttaaatccatagcaagtcaaaatctctactaattttttccaatctcatcccaatccatatggtgtagaaataaccaaagggcttagctgttagttttgctcggccactttgttgttgcaacaaagcgttgtaacagttttgtagccacaaacttaaatggcattgaaattatgccctcccccacccccaatagccattctccaaccattttccttatatttcaccctttatcagtactttcgattatatttt

SEQ ID NO: 68376 - DNA, 228 bp, Zea Mays
atgagggtggattgtgaatctggatacaaacaatcaggcagcagcaactaccttagtagtcataatacaacaaactcaatttcgcaagtaggtgcacaccaactcaagttttcccctgcttgtactctgattgtttttaataaaaaacatattatcaaaaaaacatgctccaaaataccacttgcattgcctccaaaacatacagagcatcgagagggttgtcgctga

SEQ ID NO: 68377 - DNA, 1064 bp, Zea Mays
gtaaataagtgcaacattcatatgaaaagacttgtcatctatataactagcttaaatcactccttgcattagctagtgaagtagctatcctatcataaatggtgttcatagtaacttcgttctctcccctacctcaggaccaccatcttgatattgatccacaacatttgatgctccaggcatgtactcatcatctgcgtcacacctctcaaactccttatcaagcaacttactatcatgaatgaaattatgtaatgcaaaacaagatataatgatctccttctatcgttgaattgagaatctcgacatgtctttcaatatgcgccattttttcttgaggaccccaaatgctcgctcaatgacatagcggagcgaggagtgcaagaagttaaatatctcatgtttcccttacggtggacatccacgatgatgacgaaattccgatatatggtacgtagtacccttgaaaggtgcaaggtatccagctcgatttggatatttggagtccacaaggtagtatttatctaaaaaggacataaaattaccattgcaaaatataaataatcagagtcgacaagatagtacttattagattacctttaggagggacaggaaaataagaaaagtttgccaaacacatgattaaggatccgtgtgtcatgtgcagaaccccgcatccaacaaccacaaatgtaaacctcatgtcaaagtcacatatcgcaagtacattctacgatgtatatccatggcgacaagtgtagttaataacctcatcagccaacacaactaccttaacatatgatccatttattgctccaatggtacctttaaaatattaccagaaacgatcttctttcaacttctcatgttcataactaaatgttggatcctttggtttcacgttttcttttcctaacttaagcaaacacttcaatacttccttgaacttcatgtgaattgtccatgtgaaccgtacaaaacggttttcaactcgggaaaaagactgtggccctccaacaatcgatagaaacattgcagtgactcaattgatgtaacattatgag

SEQ ID NO: 68378 - DNA, 2227 bp, Zea Mays
gtcgatttgggtgcgtaggatttcaattcggggaggcgctgccgatccgggataactgtggcatatgatcccaaatcttgatccacttgaagtgttcagtacattctgtaggttagtaccaaccttttgtgtaaatgtcaaatgaacatattaattatgtgcttcaggtctctgtttttttcttgatctgtcatttccttttttttgttatataggatgtgctcagttaggccattttttacagtaaacctactttatcatttttttccatgccattgggaagctaatgtgaactttcacggaatgacatttccttgggtacaagcactatatttaccttgtataggatagtcttatttaatgttgccactatgtcttttaggacaatatatattgccatttatggccagtaattctcgatttgttttattattgtatttgttatatagaatgtgcaatttctctgcaactttcattgggcggcggtacttatctgaatgtttatgtcctactacctttttagaagtatgttttgaaggcaggagatcctttcctttgaaccagaatgccctctttgaaactaaaatatctgttgggaaccaaaattgtcccttaaatgatcttaatattaatttaataaacttcagtggaactttgatacttattattgacttatcttctttcttggtcttggcacttgcttttgtgtttatatagaagaaaaaaaaatctgttctgatgagtacagaaaaatgtgttttcagatttttttttttgcttaaactgcttaacttcttaacttgaaacaacaacttattttttcaacaattctaactgttaagtgaattcaacacagttggtttcaagatgacaagtaagaaaagtaacagatctacagtcacaccacacactgctctgcatatggaatgggacaggatttcttgccctatttgtatggagcaaccccacaatgctgttttacttatatgcagttcatacaagaatggctgcagatgttacatttgtaacacaagccatcgtcactctaattgccttgatcggttcagaaaaatgaatggtgatagtaagacgttcacggagcccaagactcggaagacatgttgataatgagggatcttatcataccgatgtaaacagtggcccaaatccagatgacatatctagatctgaatttgatttcgctaaccatcaagaatttgagaactcaaccttaactgttgaaggtggtattgtatcgggggaatgccatgatgccatgcaaagttctgctgaagttaagtgtcctctctgtagaggatctgtatctggctggattcctgctggagatgtgagacagtatctagacaataagttgagaacttgctctcatgaatcctgcaaatttactggaacctatgaacaactgcgtgaacatgctaggactgcacacgttcttacagagcctgctcatgtagatctgtccaggaaaagagcttgggatcgccttgagcgtgagcaggaggtcggtgatgtcattagtgcaatcaggtcccaggtacctggggcaataatagttggtgactatgttattgagactagagatgacatgtccccagacatagactctggcgacgatgaaagtagtgaatggtggtcagaccaagttgaatcaccagatgctagacttgatcccccaagggtttggccacatgaagccctagggtcacctagcatttggtcagatgaaaggcgtaatttggcaaggataccacagaacaacagagtaccacccaggttttcattaggcagtaggcgacccctgcattcaggttggcaggggggtcgtcggtcaagcacacggaatcgactgcaacggggcttctcaaatcaccactctggacaccgtagcaactatcgtggacatcgtcacttgcttctggataggtcctatgttggtacccgagattcaggctccggcaggagcctaaattcgtcagtggtgccaagcaggcggcagcggctgcggtacacgcacagaagccactactgatggaagcaatatcagttctacgtgtagagctttattggttaatccattcatgctatctttgtaaatatatgttaaggttatgtttttatttaatgtatttaatctgtctaaacaatctatcctagatgcaaaaagaactacattatttatcataaatgtcatttgtggtgtctctgc

SEQ ID NO: 68379 - DNA, 1122 bp, Zea Mays
tgaggtcgctaggcatctttgatgatcccgcccgccacgccatctccttgctcccgctcgactgtgcgtgctccacttcacgcgcctatttcttcaccagcagtccagcacgccctcctgccctcacgctcgctcccctccctggacgcccgtgcagctcccgcgccctgccatcctttgccctgttatcctcgcgccggcgcgccgctcctgtgcctgtcgtcctcaccatccttgcatgagtgctctggggctccctccctctcgtgtcgccatgtacaccatcgcgtccccgttcagcaccggccgcaactcatccctttttctcagtttgccccaggaaggctggatccggaggcacattgcccggagggacagttggatcaatctggtgttgaatcgatgccccgtagggtggttcctcccacaagctcccatggccgggtgcccgggtgctagaggatctgctcaatgttgagcaagtcgacatggaggcctgcaatgtggattcagctacttttaggaggattactacgtggtgaaagcctgtttcctgatgcccttgcttggggacaaacaattgttggtgcccagtgaggtgtcaacactgatgctacagaagctacggatgccttgatggaagcgggaactgagacatgggaggtggcgtagaggtgtttacgttttctattgtaagcgtgaatctgtgttgggtcggccaaagagacagcctataaaatgtaataatattgggtccaaaaatgagaaggaaaagaaaagaatactgatcacaccaatcaacttgtgtctcacgtttgccacgcttgcttactcggtggcggcctgtggcgtgctagcgacgacacgctgacagccaagggacgtcacaagtacttacccctaggtttggagaactgcagtttcaaagattggtggtgtcatgttttatagatggttccaatttatctcgctagagattcaactccttggttgttttggtggcatgatgaatttgtaaacatgggaatcaggaatggctgtattttttagggattttttcctaatcttgctgccatcttgtgggatattagagatgaggcaatgttatggtgtatggcggga

SEQ ID NO: 68380 - DNA, 501 bp, Zea Mays
cgccatctccttgctcccgctcgactgtgcgtgctccacttcacgcgcctatttcttcaccagcagtccagcacgccctcctgccctcacgctcgctcccctccctggacgcccgtgcagctcccgcgccctgccatcctttgccctgttatcctcgcgccggcgcgccgctcctgtgcctgtcgtcctcaccatccttgcatgagtgctctggggctccctccctctcgtgtcgccatgtacaccatcgcgtccccgttcagcaccggccgcaactcatccctttttctcagtttgccccaggaaggctggatccggaggcacattgcccggagggacagttggatcaatctggtgttgaatcgatgccccgtagggtggttcctcccacaagctcccatggccgggtgcccgggtgctagaggatctgctcaatgttgagcaagtcgacatggaggcctgcaatggtggatgccttatttgcagagggtagaatttgtg

SEQ ID NO: 68381 - DNA, 542 bp, Zea Mays
cgccatctccttgctcccgctcgactgtgcgtgctccacttcacgcgcctatttcttcaccagcagtccagcacgccctcctgccctcacgctcgctcccctccctggacgcccgtgcagctcccgcgccctgccatcctttgccctgttatcctcgcgccggcgcgccgctcctgtgcctgtcgtcctcaccatccttgcatgagtgctctggggctccctccctctcgtgtcgccatgtacaccatcgcgtccccgttcagcaccggccgcaactcatccctttttctcagtttgccccaggaaggctggatccggaggcacattgcccggagggacagttggatcaatctggtgttgaatcgatgccccgtagggtggttcctcccacaagctcccatggccgggtgcccgggtgctagaggatctgctcaatgttgagcaagtcgacatggaggcctgcaatggcacaaactcaataagggcgtaattgctgtccacacgtagcacagtccttacaggcaggtggcagcttgttgtgg

SEQ ID NO: 68382 - DNA, 839 bp, Zea Mays
ccgcccgccacgccatctccttgctcccgctcgactgtgcgtgctccacttcacgcgcctatttcttcaccagcagtccagcacgccctcctgccctcacgctcgctcccctccctggacgcccgtgcagctcccgcgccctgccatcctttgccctgttatcctcgcgccggcgcgccgctcctgtgcctgtcgtcctcaccatccttgcatgagtgctctggggctccctccctctcgtgtcgccatgtacaccatcgcgtccccgttcagcaccggccgcaactcatccctttttctcagtttgccccaggaaggctggatccggaggcacattgcccggagggacagttggatcaatctggtgttgaatcgatgccccgtagggtggttcctcccacaagctcccatggccgggtgcccgggtgctagaggatctgctcaatgttgagcaagtcgacatggaggcctgcaatggtcaatcgatatggtttccatggtcatcttcaagcaacagagactatcagagatgtcatggaaatatttgctagtggtggcgaaggaatcaaaagatggaaccatgtcaagcagtggccaccagtgattcaggcccagtcatgccagtagcccagtaccatagttcgaggtagggttagtgggagaacaaaaggaatatatttccccctttttcccattcactagcctatgtggctcacaatgtggtggatggcatgccagcgaggtaacaatgtggtgggttatttgtacaaaacataatccaatttagggatcacctagaatatgttttgcactaattttaactattgaaggacctgaag

SEQ ID NO: 68383 - DNA, 1133 bp, Zea Mays
gtccgtttcagaaaccctgaaacccaacaagaggaggtgctaactgactaatttacagagggtaaattaaacctgcaatcgccaacatttttgcaagtttatgctgctccatttgcacaagccacaaggctaaccccgggatataaaagatcttatgctaataacgagccttattctgctcaagtagggcataatcgcacagcactctcaatttcaaaccagaattggacagttcctgaaatcctgaaatcagcagagtgagaagctattgggcgatcttgggggtctattttccaaaaagtggaagccaaagaagaatggcgccatcaggggtcctatgctaactagagatgattccttcataaggaaggggagtcatttggagcaaaggcagaaactagggctggcagatcatccacctccatcaaatgcgcgccaattccgttctgaaccctcatcagcacttgagaaagttgagatagagaaggcaaagcaggatgatgatctgtctgatctaagcaacatactgacggagctgaaagggatggccgttgacatgggctctgagatcgagaggcaaacaaaagcaatgggggatgcagagaaggattatgacgagctgaacttcagggtcaagggagcaaacactcgagctcgccgtctcctcgggagataaaaaaatgcatatattcttgtctcttggatggtccataacacattaactatatgggggcatcaaattctgatgattttgtgcatcagattttgattagcattgttaccgtggacatgtcggcgtgtatggtagttgagacatattttatatgtttgcttcttttttctatttttttagcattgcacgagcttaggatttcagtggattttacatggaaaaccttgtctgattagaaacttcttttcgggtaaataatgctgatacatagtgatttgtcgccgtacactcttcacaccatcaagtacctacgtatgagtagaaactttgccagcgatttacgaatgtaaacaccatatatactgatacggggcctgttgcatttatgcccgcattttatattgaaattgtgatggttgggttttgacaagtggaacccaaacaagaggaagtgtttgag

SEQ ID NO: 68384 - DNA, 1598 bp, Zea Mays
ttcctcctgtcagggcgcgtgcatcccctacgaccagggcagcgtatatccttgtcgctcttcgtcgtctccccccacaactgttatattcccaccggcgccgccggctcttcgtcgtcctcctccgggtgtgccccagttcgctgcccgttccccagccgccgatccctcgatctccgctagcttcgttccttcgtacaggaacggtcgagcagaaactagcagccactcccgagtcccgactcccgatcgcgattacttgccgcggcaccagtactccagcggccaccatgagcagcgggaagcgatccttcttcgcgcccaagaagaaggccaccaacccgttcgattccgactccgacgacgacaaaccgcagcagcggccagcgcgggcgtcctccgtgcctcccccggacgagcagcggggctcctcctctctcttcggcgccggcgacagaggcgggctcttctcttccgcggccaaccatcactaccggaacgacttccgcgacgctggcggccttgagggccagtccgtgcaggagctggagggctacgcggcgtacaaggccgaggagaccacgcgccggacgcgggggtgcgtcaggatcgccgaggagatgagggacaccgcatccaagacgctcgtcaccgtccaccagcaggggcagcagatccaccgcacgcacatgatggccgtcgacatcgaccaggatctctccaggagtgagaagctattgggcgatcttgggggtctattttccaaaaagtggaagccaaagaagaatggcgccatcaggggtcctatgctaactagagatgattccttcataaggaaggggagtcatttggagcaaaggcagaaactagggctggcagatcatccacctccatcaaatgcgcgccaattccgttctgaaccctcatcagcacttgagaaagttgagagaaggcaaagcaggatgatgatctgtctgatctaagcaacatactgacggagctgaaagggatggccgttgacatgggctctgagatcgagaggcaaacaaaagcaatgggggatgcagagaaggattatgacgagctgaacttcagggtcaagggagcaaacactcgagctcgccgtctcctcgggagataaaaaaatgcatatattcttgtctcttggatggtccataacacattaactatatgggggcatcaaattctgatgattttgtgcatcagattttgattagcattgttaccgtggacatgtcggcgtgtatggtagttgagacatattttatatgtttgcttcttttttctatttttttagcattgcacgagcttaggatttcagtggattttacatggaaaaccttgtctgattagaaacttcttttcgggtaaataatgctgatacatagtgatttgtcgccgtacactcttcacaccatcaagtacctacgtatgagtagaaactttgccagcgatttacgaatgtaaacaccatatatactgatacggggcctgttgcatttatgcccgcattttatattgaaattgtgatggttgggttttgacaagtggaacccaaacaagaggaagtgtttgag

SEQ ID NO: 68385 - DNA, 4016 bp, Zea Mays
accgacactcctctccttctcccccaattttctttaaaaatccccgctcgctaaatcccctcccaccgacgcctgtcgccactggcacgcattcctgctctcctctcctcttctccctcgtcggtgcggcgtggcgcggctcggcgttcggtgagaaaccactcggggatgaggatctgctgctagagtgagaggagctacggtcagtatcctctgccttcgtcggcggcggaagtggaggggaggaagcgatggaggcgagcgccgggctggtggccggctcccacaaccgcaacgagctcgtcgtcatccgccgcgacggcgatcccgggccgaagccgccgcgggagcagaacgggcaggtgtgccagatttgcggcgacgacgtcggccttgcccccggcggggaccccttcgtggcgtgcaacgagtgcgccttccccgtctgccgggactgctacgaatacgagcgccgggagggcacgcagaactgcccccagtgcaagactcgatacaagcgcctcaagggctgccagcgtgtgaccggtgacgaggaggaggacggcgtcgatgacctggacaacgagttcaactgggacggccatgactcgcagtctgtggccgagtccatgctctacggccacatgagctacggccgtggaggtgaccctaatggcgcgccacaagctttccagctcaaccccaatgttccactcctcaccaacgggcagatggtggatgacatcccaccggagcagcacgcgctggtgccttctttcatgggtggtgggggaaagaggatacatccccttccttatgcggatcccagcttacctgtgcaacccaggtctatggacccatccaaggatcttgctgcatatgggtatggtagtgttgcttggaaggaacggatggagaattggaagcagagacaagagaggatgcaccagacggggaatgatggtggtggtgatgatggtgacgatgctgatctaccactaatggatgaagcaagacaacaactgtccaggaaaattccacttccatcaagccagattaatccatataggatgattatcattattcggcttgtggttttggggttcttcttccactaccgagtgatgcatccggtgaatgatgcatttgctttgtggctcatatctgttatctgtgaaatctggtttgccatgtcttggattcttgatcaattcccaaagtggttccctattgagagagagacttacctagaccggctgtcactgaggttcgacaaggaaggccagccatctcaacttgctccaattgatttctttgtcagtacggttgatcccttaaaggaacctcctttggtcacaacaaatactgttctatctatcctttcggtggattatcctgttgataaggtttcttgctatgtttctgatgatggtgctgcaatgctaacgtttgaagcattatctgaaacatctgaatttgcaaagaaatgggttcctttctgcaaacggtacaatattgaacctcgcgctccagagtggtacttccaacagaagatagactacttgaaagacaaggtggcagcaaactttgttagggagaggagagcaatgaagagagagtatgaggaattcaaggtgagaatcaatgccttagttgccaaagcccagaaagttcctgaagaaggatggacaatgcaagatggaaccccctggcctggaaacaatgttcgtgatcatcctggaatgattcaggtcttccttggccaaagcggaggccttgactgtgagggaaatgaactgccacgattggtttatgtttctagagagaaacgaccaggctataaccatcataagaaagctggtgctatgaatgcattggtccgagtctctgctgtactaacaaatgctccatatttgttaaacttggattgtgatcactacatcaacaacagcaaggctataaaggaagcaatgtgttttatgatggaccctttactaggaaagaaggtttgctatgtacagttccctcaaagatttgatgggattgatcgccatgaccgatatgctaaccggaatgttgtcttttttgatatcaacatgaaaggtttggatggtattcagggtccaatttatgttggtactggatgtgtatttagaaggcaggcattatatggttatgatgcccccaaaacaaagaagccaccatcaaggacttgcaactgctggcccaagtggtgcttttgctgttgctgctttggcaataggaagcaaaagaagactaccaaacccaaaacagagaagaaaaagttattatttttcaagaaagaagagaaccaatcccctgcatatgctcttggtgaaattgacgaagctgctccaggagctgagaatgaaaaggccggtattgtaaatcaacaaaaattagaaaagaaatttggccaatcttctgtttttgttacatccacacttctcgagaatggtggaaccttgaagagtgcaagtcctgcttctcttttgaaagaagctatacatgtcattagttgtggttatgaagacaagacagactggggaaaagagattggctggatctatggatcagttacagaagatattctaactggtttcaagatgcattgtcatggttggcggtcaatttactgcatacctaaacgggttgcattcaaaggttctgcacctctgaatctttcagatcgtcttcaccaggtgcttcggtgggctcttgggtctattgagatcttcttcagcaatcattgccctctttggtatgggtatggtggcggtctgaaatttttggaaagattttcctacatcaactccatcgtgtatccttggacatctattcccctcttggcttactgtacattgcctgccatctgtttattgacagggaaatttatcactccagagggacttctcaaggtcatagctggtgttgatacaagcttcaccgtgacatcaaagggtggagatgatgaggagttctcagagctatatacattcaaatggactaccttattgatacctcctaccaccttgcttctattgaacttcattggtgtggtcgctggcgtttcaaatgcgatcaataacggatatgagtcatggggccccctctttgggaagctattctttgcattttgggtgattgtccatctttatccctttctcaaaggtttggttggaaggcaaaacaggacaccaacgattgtcatcgtctggtccattctgctggcttcaatcttctcgctcctttgggttcggattgatcctttccttgcgaaggatgatggtccgcttcttgaggagtgtggtttggattgcaactaggatgtcagtgcatcagctcccccaatctgcatatgcttgaagtatattttctggtgtttgtccccatattcagtgtctgtagataagagacatgaaatgtcccaagtttcttttgatccatggtgaacctacttaatatctgagagatatactgggggaaaatggaggctgcggcaatccttgtgcagttgggccgtggaatacagcatatgcaagtgtttgattgtgcagcattctttattacttggtcgcaatatagatgggctgagccgaacagcaaggtattttgattctgcactgctcccgtgtacaaacttggttctcaataaggcaggcaggaatgcatctgccagtggaacagagcaacctgcacattatttatgtatgcctgttcattggagggcttgttcattacatgttcgtctatactagaaaaaacagaatattagcattaatctatagttaattaaagtatgtaaatgcgcctgttttttgttgtgtactgtaatcatctgagttggttttgtgaaattttcgtagaaagaatgaatgtgagatacagaaaatgtaatgccgtggtatatgcgtatggaacgatgtagtatcttttatggttccataatagtgtatttaacaaccccagcaaggggtttcttgggtttctttttt

SEQ ID NO: 68386 - DNA, 720 bp, Zea Mays
ggcaaatcgcataagttctacaagtccggcggattactccggtgcaatccaggtgacgggaagagaggatctggagaagtctggctacctggtggacgattcctacaccgtggagtgcagcatcacggtgctaaaaaaagcgccggcgcggaatactgcggctgcggctgcggcgacggccatggatcgcgatgctgcgatgctgccgtccctcgaactgcaccggcacttgggcgaacttctgcagaaggggacgggcgcggacgtcacgttccatgtgtccggcgagaagttcgccgcgcacaaggccatccttgcctcgaggtcgccggtgttcatggcggagctgtttgggggaatgaaggaggaggcgtcccggcacatcgaggtgaaggacataaagcccgcggcgttcaaggccgtgcttcgcttcatctacactggcacggcgccggaactggacaagaagggcgacggcgggacgtcgttggcgcagcatctgcttgccggcgcggacaggatgatgatgctgaggaatgatgaaccgaagcttgtcaaatgatccgaagctctgatgttccgaaacccaatgacgccgaaactgaaggccttgctgaagaaactttagagaaaatcttgtaatattattgtaaaaatatttgtaaattaagaatcaagtactacttttgtaaacttgtacataccttgcaatatatcgtt

SEQ ID NO: 68387 - DNA, 1614 bp, Zea Mays
cagactctcaactcgtaacctgtttcgtatctatattttccaaaaatccgaaaacagacgaacgatgtatagaaaacggagctgataggaacgagattttttacatccattttcatccctagctgtggtcccacaggtcgcaccattctcccctcttcttccgccgatacacacgccctgcacgggggctcgccgaggcttcagtttactactgaagcacgcaccgcagcgtctccaccttctgctcaacctccgcttccgtaggtgccggcgctaagcgaggatccctccgttcatcggtcccgacggcacctcgactcgtttcgtcggtcgctgtggcgacgggtgattgactgcgatatgaggcaatggttatgttgtaactgccactttgatgacgaggaagatggccatgacaaggaacaggccaaagctcagagcaataagatagaccccaagcagaagtcttcaaaacctcctgttagtcaacctgagccagagttctcccctccaacaattgatgttcctgaattgtcattggatgatttgaaacaaaagactgatgattttggatcaagtgctctgattggtgaaggttcttatggacgagtatatcatgccgctttagatgatgggaggcaagccgcagttaaaaaacttgatgcatctgaaaatgagcctaatgatgagttcctcaaacaggtctcactggcatcaaagctaaaacatgaaaatcttgttgagatgttgggttattgtgtggatgggaattatcgtatacttgcttatgaatttgcaaccatgggttcgcttcatgatgttttacatggaagaaaaggcgttcaaggcgcgcagcctggccctgtgcttgactggatgcagagggtcaaaattgttattgaggctgcaaaagacttcaatcttttgaaccaagcaccagatatggcagctcgtctccattcaactcgtgtattgggaacttttggatatcatgcacctgagtatgctatgactggccagctgacacaaaaaagcgatgtctacagctttggcgtggtccttttggaacttttgactggaaggaaaccagtagatcacacaatgcctcgaggacaacaaagtttagtcacatgggctactccaaggttgagtgaagacaaggtgaagcaatgtgtagatcccaggttgaagggagaatatcctccaaagggagtcgctaagcttgctgcagtggcagcactgtgtgtgcaatacgaagcagagttcaggcccaacatgagcattgttgtgaaggcgctttcgcctctccttcaacaaagacctgcaccaggcaccgcagagccagccccgcaacctgtgagctgaatccagtcacgtgtgatgggacctcgcagcatcaggcatctccgcgatcattcaatcagcaagtcattgagagtattttgaatatttgttctgtagcattctgttcctggcttgatgttggcgctgcacaatgacaatgaattcgctgcttgaagaatagatgcaggatgatctggattttttttttggtctggcgtggcgttgctgccttctcttccatggttaccaaataccatgattgaaatcaag

SEQ ID NO: 68388 - DNA, 1695 bp, Zea Mays
ctccccccttccgtcttgttcacttttcaatctcccacgtcgccccatgggccatggcaaggctgcttcgggtgtccctcgctctctctctcgctttccctctctagacttcaatacttttcccctgtccgtgggcaagcccatcatgacgtgagggagggggaggcgatgcccagtctactctagcctgggtcttgagagagaggggagacgagggtgggagtaatacaacagagccaagccgagggaggagagagggagagagagggggagcagggaacccaaagagacaaggcaaggaagcagagagaaactccaagattgggggcgactgggggaggagtagaggcggcgtttgttctccttcgattccctagtcttcctggagggcgacgaagggagatttcgccgggcgcggacggacgccgcgatggccggtgtcgacgccgccagaggaggagaagaagcagttggaggctgcgctaaaaatggattctccggatgccggtggggaagaccaatctgactcatttgctggccctcgacatagttgctttgagccaagggagagggaggtacccattgaggacatgagtgtttctggaaatggggagggtaagcatgacaagaaaggttggttcagtaattggggaaagagaagtcaggttagcaagtcagagggggtgaagaagatggcatctccaaggaactcgctctgtgtagatgacaaggtgagtgacctcgtcattgaatcgccctcaaatgtacaaacaagaccgggaaggcattcggtagatgtagtcagaccagatgacaacagaaggatcagggaaagggatagtaggagacatgttgcttctgcagagaatgggcataggcgcaaagaaggttccaaagaaagtgagtacaaaaaaggcctaaggcctgttctctggctctctccaaatttccctcttcggactgaggagctgctgccattgcttgatattcttgcaaacaaagtgaaggcaattcgtcgtttgagggatctacttacaacaaaactccctccaggcacatttcctgtcaaggtcgctattccagtcgtgcctacaatcagagtgcttgtgacattcacaaaatttgaagagctacagccgctagatgagttcaccacaccaccctcaagtcctgacaacagcaagagcccagcagtgcagccttcttcaagttcctggattcagtggatcaaggcgccctacctccagaacttgtcgacggcacctggcccaagcagccgcgtggaggacatccaggacccattcgccattccttccaattacgtgtggacaacacctgaagagaagaaaaagaagacacaagaaaacaagaacaagtcgaagaaaggcaggagcggcgcatagatagtacgtaggtgatagcattggtgggggggggggggagttaaagttatgctgtgagtgggtgaaaagggctatactcttcaggatctaacaggagggatgattggaagatttggagatttcggctgctctgacgtcgaatattgagaagcgaccgcttgtcttctttcattgtgataacagatctgctgtcaacattctttcgtttaacccatcgtttgggtcctgattatcattgcaatctactgtattggtagattttgaggtgtggcgccttctgatatgattgttt

SEQ ID NO: 68389 - DNA, 2069 bp, Zea Mays
ctccccccttccgtcttgttcacttttcaatctcccacgtcgccccatgggccatggcaaggctgcttcgggtgtccctcgctctctctctcgctttccctctctagacttcaatacttttcccctgtccgtgggcaagcccatcatgacgtgagggagggggaggcgatgcccagtctactctagcctgggtcttgagagagaggggagacgagggtgggagtaatacaacagagccaagccgagggaggagagagggagagagagggggagcagggaacccaaagagacaaggcaaggaagcagagagaaactccaagattgggggcgactggtaagcaaggtctggaagcgtggctccaacctccgcgccgacatgaccctcgctggtttcgatggcttcaagatccaacgctccgaccagaccatactcttcctcggggaagggtcggaggatggcaaggtgccgccgggttcactgtgcatgatcaaccacaaggacaaggagattatgaacgcgctggagggggcaggcaccccagcctcagatgcagaagtccagcaggaggtcgctgcaatgtcacagaccaacatcttccgtccggggattgacgtcacccaagcgctgttgctcccacagctcacttggcggcggcaggaacggacagaggcggttggcccgtggaaggccaaggtgtatgaaatgaatcatgtggtggtcagtgtcaagtcaaggagggtcccgggggcgatgacggatgaagaattcttttcatcttgcaatgacaatgatatagagagtgaggggtttgatgatgttctgacagaggaggagaagaagcagttggaggctgcgctaaaaatggattctccggatgccggtggggaagaccaatctgactcatttgctggccctcgacatagttgctttgagccaagggagagggaggtacccattgaggacatgagtgtttctggaaatggggagggtaagcatgacaagaaaggttggttcagtaattggggaaagagaagtcaggttagcaagtcagagggggtgaagaagatggcatctccaaggaactcgctctgtgtagatgacaaggtgagtgacctcgtcattgaatcgccctcaaatgtacaaacaagaccgggaaggcattcggtagatgtagtcagaccagatgacaacagaaggatcagggaaagggatagtaggagacatgttgcttctgcagagaatgggcataggcgcaaagaaggttccaaagaaagtgagtacaaaaaaggcctaaggcctgttctctggctctctccaaatttccctcttcggactgaggagctgctgccattgcttgatattcttgcaaacaaagtgaaggcaattcgtcgtttgagggatctacttacaacaaaactccctccaggcacatttcctgtcaaggtcgctattccagtcgtgcctacaatcagagtgcttgtgacattcacaaaatttgaagagctacagccgctagatgagttcaccacaccaccctcaagtcctgacaacagcaagagcccagcagtgcagccttcttcaagttcctggattcagtggatcaaggcgccctacctccagaacttgtcgacggcacctggcccaagcagccgcgtggaggacatccaggacccattcgccattccttccaattacgtgtggacaacacctgaagagaagaaaaagaagacacaagaaaacaagaacaagtcgaagaaaggcaggagcggcgcatagatagtacgtaggtgatagcattggtgggggggggggggagttaaagttatgctgtgagtgggtgaaaagggctatactcttcaggatctaacaggagggatgattggaagatttggagatttcggctgctctgacgtcgaatattgagaagcgaccgcttgtcttctttcattgtgataacagatctgctgtcaacattctttcgtttaacccatcgtttgggtcctgattatcattgcaatctactgtattggtagattttgaggtgtggcgccttctgatatgattgttt

SEQ ID NO: 68390 - DNA, 1287 bp, Zea Mays
ctcccagccatctccacttcttctccccacgccatcctccttcctgctcctcacgcacaccagtggagggcctcccatggcgtctcctcccctttcctcaagtcagccaccctagcttccactcctctcgccaccagccattttccagcagcctctcttctcccacacggcagcagcttctccctcacgccaacagcagggagcaggagcttttcctcccatggccggcctcccttctccccctcggctccttcctccaggccgagctcctatgtcaggaacggctgatccacttgaccgctgctccatttttccctcgcctctgctctctcggctgctgtcagccatggcgtgacgcctctgctccttctctcttccccacaaaacaaccagcgcgcaggagcttctccttcatggacgctgaccaggctggtccctcgcccccttctctccccttgtccgcgaccttctctgcccgcgcgcaaagccgctgaccggagcgcggcatggcagcgccgccctttcgtggatgaagctagtgcccctttcagcttctccactgcagcaggccgggcatccccatgcctgcgccttccctctcttgccgtgccttccccatggtcaggatcagcggcagaagtcgtgtgctacctgttagatgatatgggcagcaaccacgcttcgcagctccttgcaacagcaatcaatccctgccgcatgccacctgctcgatatattacgcagccacatcgtcgttgccctttctcgcagcacgccgttgttggttctaggtgctgctacctacatccctcgcactcaccttgctcgacaaaaatgcctccccgttcgttgacctcgggtggctgcacacttgttgtcgctgccccttgtccgtcaacgcgcagcccctctgtttccccattggcgcagcagccccgacgtctccgcgctctgtcggctcgctgttttgtgaagccagtggacagcacgccgtcgacgctcgctgggtgtttgctgtttttgcgcagccccatccgcgacgtcgtcgaaacccctagtggtcgacgccgcgcttcgcgccttgctcgttcgatgaaataccgagccatgtggacagcccatgcgtctagtcacgacccgttcaggaccgagagatgacgatcgagacagtgatgtggtgccacccacaagatgcagtcggtggacgacccaagaaaggatggacataaccagtggatgctcgccaagcgagtacctcccccagcaaacactatctaagtgttaaat

SEQ ID NO: 68391 - DNA, 1975 bp, Zea Mays
acacgaacacaacagcacagcctctctctcctctactagacttgttttttccgttcatccatccatacgtttcgtttgttccacctgcgcaactgcgacggggataagtacgtcttccagatgacgacggcggcatggccgcggccacgcttcctcgtcctcccccagcctggattcctccgctcggtctgccacggcctctgcgcccgctgtctcttctgcttcctgctgctcctcgccttcgcctgcagctccagctccggacgggtggtggtcaccagcttgcctggcttcgacggcgacctccccttccacctcgaaacagggtacgtggaggtggaggaggacgccggcgtggagctcttctactacttcgtccaggccgagtccggcgccgccgccgccgccgatgacacccctttcctcttctggctcaccggcggcgaccgctgctccgtcttcagcggcctcgcctacgagatcggtcccatcagattcgtcctggaaccctacaacggcaccctgccgcgcctgcgatacaaccacaactcgtggtcaaaggtgtcacatatcctcttcgtcgattcaccggttggagctggattttccttctcgagagatcccaaaggctacgatgtcggagacatctcggcctcactgcagctacaggaattcctcatcaagtgatcatcccgagtacctcgcgaatcctttctacattggcggggactcctatgtcggaaaaatcgtgccgttcctcgggcagatgatttcagaaggtattgaacttggaagaagacccttccctaacctcaagggctatctggtgggtaacccaatcacgggcgaaagtatagatttcacttccagagtgccctacgctcatggagtcggtatcatatcagatcaattgtatgagacgatattggggcattgccaaggagaggactacactagtcctgcaaacgctctgtgtgctcaggctctggacactttcaacaatctcatcaacgaagtccagaacgcccagatcttactggacacgtgcgtctacgcgtctcctgcgccaaacgttctcagcagaccggtggacggtggtagaaggatcctgagggcggcggggatgggaggaggggcgacgctgaaccatccgccagctcgtcctcggtttggctgcatcacctacggctactacctgtcgtatttctgggcgaacgatgaacgcactcgaacagctcttgggatcaagaaggctaatttaaagcaaagcgatccatgaactggtggtcagggaacagtggacgagtgggtgaggtgtcacgacgcagacctgccgtacacgatcgacctcaagagcgccatcaagtaccaccggaacctgacgtccagaggctaccgcgccctggtgtacagcggcgaccatgacctgctggtgccacacctgggcacccaggcatgggtcaggtccctcaacttccccgtcgtcgacgactggagggcgtggcatctcggtggccaagccgccgggttcacgataaattactcaaacaacatgacgttcgcgacgatcaaaggtggcgggcacacggcgccggagtacgagccggagaggtgtttcgccatgttcagccgctggatactcgaccgtccactctaatctccactcgtacattgccggattcttgcaccatgaccatgattgatggactgtgtggattgcagttcataggtggaataaaatggatgatttctgtgaatggataggtctgccaactaggcaactttgtgtaaattaactaggtctgtgtcagcgcgctttaacgtaatatatgcggggataaatcgtgcaaatccagccaccaagattttaggaatgcggtggttcattcactttgtgtaaattaccgtgccgctggagacgagcgttagcagcaacgacgcgaccacgacgccgagcatctgcgcgagccagtat

SEQ ID NO: 68392 - DNA, 1966 bp, Zea Mays
acacgaacacaacagcacagcctctctctcctctactagacttgttttttccgttcatccatccatacgtttcgtttgttccacctgcgcaactgcgacggggataagtacgtcttccagatgacgacggcggcatggccgcggccacgcttcctcgtcctcccccagcctggattcctccgctcggtctgccacggcctctgcgcccgctgtctcttctgcttcctgctgctcctcgccttcgcctgcagctccagctccggacgggtggtggtcaccagcttgcctggcttcgacggcgacctccccttccacctcgaaacagggtacgtggaggtggaggaggacgccggcgtggagctcttctactacttcgtccaggccgagtccggcgccgccgccgccgccgatgacacccctttcctcttctggctcaccggcggcgaccgctgctccgtcttcagcggcctcgcctacgagatcggtcccatcagattcgtcctggaaccctacaacggcaccctgccgcgcctgcgatacaaccacaactcgtggtcaaaggtgtcacatatcctcttcgtcgattcaccggttggagctggattttccttctcgagagatcccaaaggctacgatgtcggagacatctcggcctcactgcagctacaggaattcctcatcaagtggttcagtgatcatcccgagtacctcgcgaatcctttctacattggcggggactcctatgtcggaaaaatcgtgccgttcctcgggcagatgatttcagaaggtattgaacttggaagaagacccttccctaacctcaaggttctgaatttgtcatgatcagggctatctggtgggtaacccaatcacgggcgaaagtatagatttcacttccagagtgccctacgctcatggagtcggtatcatatcagatcaattgtatgagacgatattggggcattgccaaggagaggactacactagtcctgcaaacgctctgtgtgctcaggctctggacactttcaacaatctcatcaacgaagtccagaacgcccagatcttactggacacgtgcgtctacgcgtctcctgcgccaaacgttctcagcagaccggtggacggtggtagaaggatcctgagggcggcggggatgggaggaggggcgacgctgaaccatccgccagctcgtcctcggtttggctgcatcacctacggctactacctgtcgtatttctgggcgaacgatgaacgcactcgaacagctcttgggatcaagaagggaacagtggacgagtgggtgaggtgtcacgacgcagacctgccgtacacgatcgacctcaagagcgccatcaagtaccaccggaacctgacgtccagaggctaccgcgccctggtgtacagcggcgaccatgacctgctggtgccacacctgggcacccaggcatgggtcaggtccctcaacttccccgtcgtcgacgactggagggcgtggcatctcggtggccaagccgccgggttcacgataaattactcaaacaacatgacgttcgcgacgatcaaaggtggcgggcacacggcgccggagtacgagccggagaggtgtttcgccatgttcagccgctggatactcgaccgtccactctaatctccactcgtacattgccggattcttgcaccatgaccatgattgatggactgtgtggattgcagttcataggtggaataaaatggatgatttctgtgaatggataggtctgccaactaggcaactttgtgtaaattaactaggtctgtgtcagcgcgctttaacgtaatatatgcggggataaatcgtgcaaatccagccaccaagattttaggaatgcggtggttcattcactttgtgtaaattaccgtgccgctggagacgagcgttagcagcaacgacgcgaccacgacgccgagcatctgcgcgagccagtat

SEQ ID NO: 68393 - DNA, 2240 bp, Zea Mays
acacgaacacaacagcacagcctctctctcctctactagacttgttttttccgttcatccatccatacgtttcgtttgttccacctgcgcaactgcgacggggataagtacgtcttccagatgacgacggcggcatggccgcggccacgcttcctcgtcctcccccagcctggattcctccgctcggtctgccacggcctctgcgcccgctgtctcttctgcttcctgctgctcctcgccttcgcctgcagctccagctccggacgggtggtggtcaccagcttgcctggcttcgacggcgacctccccttccacctcgaaacagggtgcgcgtgcccgcgtggcgtgtctactagtagtatcctccttcttcttcttcattcattcatcctggtggtgtactactagactactactagtagctcacgcgcgcggcacatgtagatgtagcctctaaccaccgttgctgccctgaaactcaaaacgaaggtacgtggaggtggaggaggacgccggcgtggagctcttctactacttcgtccaggccgagtccggcgccgccgccgccgccgatgacacccctttcctcttctggctcaccggcggcgaccgctgctccgtcttcagcggcctcgcctacgagatcggtcccatcagattcgtcctggaaccctacaacggcaccctgccgcgcctgcgatacaaccacaactcgtggtcaaaggtgtcacatatcctcttcgtcgattcaccggttggagctggattttccttctcgagagatcccaaaggctacgatgtcggagacatctcggcctcactgcagctacaggaattcctcatcaagtgatcatcccgagtacctcgcgaatcctttctacattggcggggactcctatgtcggaaaaatcgtgccgttcctcgggcagatgatttcagaaggtattgaacttggaagaagacccttccctaacctcaaggttctgaatttgtcatgatcagggctatctggtgggtaacccaatcacgggcgaaagtatagatttcacttccagagtgccctacgctcatggagtcggtatcatatcagatcaattgtatgagacgatattggggcattgccaaggagaggactacactagtcctgcaaacgctctgtgtgctcaggctctggacactttcaacaatctcatcaacgaagtccagaacgcccagatcttactggacacgtgcgtctacgcgtctcctgcgccaaacgttctcagcagaccggtggacggtggtagaaggatcctgagggcggcggggatgggaggaggggcgacgctgaaccatccgccagctcgtcctcggtttggctgcatcacctacggctactacctgtcgtatttctgggcgaacgatgaacgcactcgaacagctcttgggatcaagaaggtacggtgagctgttctcgtcatttcgatgctagtaccattatattgttgttgttgtcagcaatgacgagaatgatccaggctaatttaaagcaaagcgatccatgaactggtggtcagggaacagtggacgagtgggtgaggtgtcacgacgcagacctgccgtacacgatcgacctcaagagcgccatcaagtaccaccggaacctgacgtccagaggctaccgcgccctggtgtacagcggcgaccatgacctgctggtgccacacctgggcacccaggcatgggtcaggtccctcaacttccccgtcgtcgacgactggagggcgtggcatctcggtggccaagccgccgggttcacgataaattactcaaacaacatgacgttcgcgacgatcaaaggtggcgggcacacggcgccggagtacgagccggagaggtgtttcgccatgttcagccgctggatactcgaccgtccactctaatctccactcgtacattgccggattcttgcaccatgaccatgattgatggactgtgtggattgcagttcataggtggaataaaatggatgatttctgtgaatggataggtctgccaactaggcaactttgtgtaaattaactaggtctgtgtcagcgcgctttaacgtaatatatgcggggataaatcgtgcaaatccagccaccaagattttaggaatgcggtggttcattcactttgtgtaaattaccgtgccgctggagacgagcgttagcagcaacgacgcgaccacgacgccgagcatctgcgcgagccagtat

SEQ ID NO: 68394 - DNA, 2010 bp, Zea Mays
attttttttttccgagcaagggccaaaatgcaaaaaaattcgccacccacctcccgtcccgtcttgaaccatccacacgaacacaacagcacagcctctctctcctctactagacttgttttttccgttcatccatccatacgtttcgtttgttccacctgcgcaactgcgacggggataagtacgtcttccagatgacgacggcggcatggccgcggccacgcttcctcgtcctcccccagcctggattcctccgctcggtctgccacggcctctgcgcccgctgtctcttctgcttcctgctgctcctcgccttcgcctgcagctccagctccggacgggtggtggtcaccagcttgcctggcttcgacggcgacctccccttccacctcgaaacagggtacgtggaggtggaggaggacgccggcgtggagctcttctactacttcgtccaggccgagtccggcgccgccgccgccgccgatgacacccctttcctcttctggctcaccggcggcgaccgctgctccgtcttcagcggcctcgcctacgagatcggtcccatcagattcgtcctggaaccctacaacggcaccctgccgcgcctgcgatacaaccacaactcgtggtcaaaggtgtcacatatcctcttcgtcgattcaccggttggagctggattttccttctcgagagatcccaaaggctacgatgtcggagacatctcggcctcactgcagctacaggaattcctcatcaagtgatcatcccgagtacctcgcgaatcctttctacattggcggggactcctatgtcggaaaaatcgtgccgttcctcgggcagatgatttcagaaggtattgaacttggaagaagacccttccctaacctcaagggctatctggtgggtaacccaatcacgggcgaaagtatagatttcacttccagagtgccctacgctcatggagtcggtatcatatcagatcaattgtatgagacgatattggggcattgccaaggagaggactacactagtcctgcaaacgctctgtgtgctcaggctctggacactttcaacaatctcatcaacgaagtccagaacgcccagatcttactggacacgtgcgtctacgcgtctcctgcgccaaacgttctcagcagaccggtggacggtggtagaaggatcctgagggcggcggggatgggaggaggggcgacgctgaaccatccgccagctcgtcctcggtttggctgcatcacctacggctactacctgtcgtatttctgggcgaacgatgaacgcactcgaacagctcttgggatcaagaagggaacagtggacgagtgggtgaggtgtcacgacgcagacctgccgtacacgatcgacctcaagagcgccatcaagtaccaccggaacctgacgtccagaggctaccgcgccctggtgtacagcggcgaccatgacctgctggtgccacacctgggcacccaggcatgggtcaggtccctcaacttccccgtcgtcgacgactggagggcgtggcatctcggtggccaagccgccgggttcacgataaattactcaaacaacatgacgttcgcgacgatcaaaggtggcgggcacacggcgccggagtacgagccggagaggtgtttcgccatgttcagccgctggatactcgaccgtccactctaatctccactcgtacattgccggattcttgcaccatgaccatgattgatggactgtgtggattgcagttcataggtggaataaaatggatgatttctgtgaatggataggtctgccaactaggcaactttgtgtaaattaactaggtctgtgtcagcgcgctttaacgtaatatatgcggggataaatcgtgcaaatccagccaccaagattttaggaatgcggtggttcattcactttgtgtaaattaccgtgccgctggagacgagcgttagcagcaacgacgcgaccacgacgccgagcatctgcgcgagccagtat

SEQ ID NO: 68395 - DNA, 2121 bp, Zea Mays
tgcttctcctccccgctcgctctcccccgcgctgtactttctcttcggcgaaaaccccacaaccaccgaccagagatggccgcggtgaaaccccaaccccatttctcgccgcacgccaccttctccgcgcccgatgccggacctgccgacaccggtttcgccgtcttccgcctcctcctgccctcgtccttctccgacgccgacaccatgcgcctctacgccgccgtcaacccgttgcgccgccgcactgccacgctgcaggtccgcgtcgagcccctcgaccccgcctccgcgggcggccgtgtcgtcgccgccatagttggccccaccgtccccgtccgccgcgtcgaggcctcgtcctcgtccgcggagcccctcgcgctctcgccggcgcaggaggcgctagtcgccgtgattgataccgagggcgcgctctgctgcgcagtcgagaaggaggctcgcggcaaggcccgtcccgggtgcatcacgtgcctgctcctggtcgatgctgaccggctcgaagcttcgaccgggagaggcgtcatggagaggatcgccctggaggccggcgccgacgtgcgcgtcgcgatgtgggaggagggcgcgcagccgccacgggggcagccgcttgaggaggttgtcgagataactggagatagaacagctgtaaggaaagctctagttgctttgtctagctttcttcaaggtgaccttccaatcggtaactcaacaacttatgttaagaaagaaggttcaatactcccatgggcatcttcagaagtacctgggcctaatatgggggcttcgtgctcagaggcatccacagagtttgcacaaggcagtgttgctaagactcattgtccagaaggtaatacaggagatgctcaaagtaaaactcttcagcaagtttcattcaggcttctcttgcctacctatcttgctggaggtttgattggcaagaagggcttgattatcaaaggcattgaagttgaaactggtgcttgtattgatgttggtgcacctgtcgctggttgcaaggaacgtgtaataacaatttgcgccctagagagcccagactcggaatatcatatagtgcaaagtgcactacttctcatatttgacaggatgatggagatggaaaccaatacacactcaacatttgagaaagcatctcaattcttggtcagagtccttgtgctcaaaaaccagtttggctgtttagttggtttgggtggttctataatcaaggaaatggtgaatacaacaggagcaagaattcaaatattggacgatacagaaattccggcttgtgcctctacctttgaactagttgtacagatcactggggagctaatgaatataaggaatgctttatcccttgttttctggaaacttcgtaaccatattttctccaatgaaaccgactacaacaattcccatatttcctcttcagaaattgctgaatcaaatgcaaccagccaggcgaatatttattcaacaatccaatattcagtggacaatggccataaggttgatcatagatcccctctcagttatggagtggactctgtggaaaagtctttcagtgatttagagctcagttcttcagaaattcaggtatctggtgctgacattatcgtctacaatccaccttccgagggcaacgaagctatgatcgtggtttctggaccaccggatcaggcacaatcagctcagcgcctactcgtcgagttgatcctacagggacaccccggcacctgcctttctgcttaatacggcagataaccttgtcgtgaaatatacaacgatggttgacgtgcagactgttagctggggaactgaattttatgactcgaactgcgtggggaatatggagtttgaaccatgtgattgatacgttgtgtacctttatctatacgtagtacttatcctgtgcccaatgtttatcggcatcgcgactaattttgaaactcttgcagccttgcaggaccgattcggtgaagctagtgataacataaaaagcggtcgattcggtgcttgcagtattgtcattaaattcaatttgaatccttattcaaggttcaaagtacatatgttgggagtttaattatcacagcaaac

SEQ ID NO: 68396 - DNA, 3200 bp, Zea Mays
agcagcagcaagcaggccagcagcagcagcagcaagcagcagagcgcgccctgttcttgtgccgaggaattatttattgccaccgcatcgagatttatatagtacggggaaattgattgctcattcccctctgcttcctccatccactgatccaccccatgctgcgatattttcctccactcgccgccggggcagcatttgctcgcgatttataacctcccctcgccttcgcctctcctttctgcttgtctttttccccagtggggaggttagcacccggcacaagcaaagcgccgggttcttgtcgcagtttctgcgcgctcgctcgctttttgcccgtaagatctgatacaaagaggagagggagagccaagagaggagaggttctcgtgtggaattcttcggcgatgaggtccgacgcccgtctggattcggtggtcttccagctcacccccacccggaccaggttcgatttggttctgatagcgaatggccggaaggagaagtttgcatctggtttgctgaaaccgttcgtcgctcacttgaaggccgcccaggatcagattgccaagggagggtactcgatcacacttgaaccaagctcagggttcgatgtgccatggtttacgagaggcaccgtggagagatttgtgcgtttcgtgagtactccggaggtccttgagcgagtcagaacactggagtctgagatcctgcagctcgaggatgccattgctatccagagcaacgatagtcttggattaaaatctgtcgaagaccatggaagaaagttgactgaaagcaatggaggtggacgtgcaaattatgatcctgattcagccacagcaattgttgtctacaagcctggatcaaatccaacgccacaaattcagaatgaaacagcagcacatgaggagaattcaaaagttcaattgctcagagtgcttgaaacccgcaaaactatgttaagaaaagagcaggctatggctttcgctcgtgctgtagctgctgggtttgacattgacaacttgggttacttgatcgcatttgcagagcgctttggtgctgcacgtctgatatcagaagtccagccagcagatgggatctcatgctgcatatcctccatgggcaatgcatcctccatctggtgcagttgtttacccaccttatcctatgcaaggcatgcctttttatcctggggtgaatccatactaccctccatatcctccagtggatgatcccaggtaccactactcaggaaggaaatcttcgaggaagcactcctcggatagtaaggactcagaaactcttgacgttgaaagtgaccattgcagttcagatagaggaagttctcatggtcgcaagtcacatagaaaggggaagaggtccggaaagaaaaaacctagtgtggttgttatcaagaatgtgaatgtaacatctaaaaagcatggctcatcagagagcgaatcacaatcaagttctgaagttgagtctgcggacagtgacaattcacactccaaatcaagtgaaaggaagcataaaagctcaagttcaaagaaaaaggagggtaggagaactacttttgcctccggagatgaatatagcaaggatgaaatgtcaaatggccacgatgctgagcaaggaaactggagcgcattccaaaatttcttgttgagagcagaagaaaaaacaagatctagtgatgcagacctgtttgctggtgagaaagaacccccatcaaggagaaaacagaatgtaaacacagcagatcctattcttttagctgagagagatggtggcattgtccatgagcggaacatagtaggttttgattcagccaatgggaggactagagctatccgggtcatgtccaatgatgaacttgttatgtctggagaagggaggaactatatgcatagtgaaataaaggagattgaagctggtggaggaaggtacaggagagggacaggtgatgactacatggtttatggtcagggaagtcagatagccagacatagtttgttggatcctcttgcagaggcccagtacaagaatcctgttcagcaggacaagaataggaatggtgtggcggacgagtcctttatgatccctcttaggtccagcttacatgataatatcggagcagaaagcagaactactattgacatagatgttgagcttccttctagaattcataaagcatcagatgaaaaggctggacatcagcttttttacgaacctgacgaattggtgccagagcgtggatctgaagatgtttcatttggatatgatccagcaatggattatgatagccacatgcagactactgtgaaggtggaagatgaaaaaacagaggatgacttgccagttgctgacaatgatgtacagaaggtagagaaagagaagctaaggaatgcaaaggatggttcagataaacgaaggaaagatgccttattgaggaggttatcggcgccaaggaccccactgaatgatgcacaaaaacgtgcacagaacctgcgtgcatataaggcagaccttcagaaactgaagaaagaacaggaagaagagcaaataaagcgattggagaggctcaaattggagcggcaaaagaggatcgccgcaagaggtaatggaaagggtccagggaatggttctcctaaagcgaatggtacgaatggactcagtaaatcagttccaaccttcactgggttgaaaaaggagaaaaatggaacaactgaatcactcagcgatcgactgaagaggctttctgaacccaaaagcattgctggggcagagcattccttgaatccaaagtcaactggcgcagaccattcacgaagaagaagcatggcgtgagacggagaaccgagcatcttgaatccatcgtaccactcgctagctcagcaaccatgaatggcatatcaaaaggcttcttgtacagaaagaggaaatggctggcgctgtagcactgcctgcttccaagatttgtgatggaaaatcaagttaccttttcaatggcatggcgttgtacttccaattttaacataattatttcattcttttattgaggatggcttgtaatagctgtaaacctggatttttcggcgacgcggagctatattttggtttttggctgtatttatggaatggattgatcgttgtttgagatatattgtggtatttatacagtgtataaatgtcaa

SEQ ID NO: 68397 - DNA, 3405 bp, Zea Mays
agcagcagcaagcaggccagcagcagcagcagcaagcagcagagcgcgccctgttcttgtgccgaggaattatttattgccaccgcatcgagatttatatagtacggggaaattgattgctcattcccctctgcttcctccatccactgatccaccccatgctgcgatattttcctccactcgccgccggggcagcatttgctcgcgatttataacctcccctcgccttcgcctctcctttctgcttgtctttttccccagtggggaggttagcacccggcacaagcaaagcgccgggttcttgtcgcagtttctgcgcgctcgctcgctttttgcccgtaagatctgatacaaagaggagagggagagccaagagaggagaggttctcgtgtggaattcttcggcgatgaggtccgacgcccgtctggattcggtggtcttccagctcacccccacccggaccaggttcgatttggttctgatagcgaatggccggaaggagaagtttgcatctggtttgctgaaaccgttcgtcgctcacttgaaggccgcccaggatcagattgccaagggagggtactcgatcacacttgaaccaagctcagggttcgatgtgccatggtttacgagaggcaccgtggagagatttgtgcgtttcgtgagtactccggaggtccttgagcgagtcagaacactggagtctgagatcctgcagctcgaggatgccattgctatccagagcaacgatagtcttggattaaaatctgtcgaagaccatggaagaaagttgactgaaagcaatggaggtggacgtgcaaattatgatcctgattcagccacagcaattgttgtctacaagcctggatcaaatccaacgccacaaattcagaatgaaacagcagcacatgaggagaattcaaaagttcaattgctcagagtgcttgaaacccgcaaaactatgttaagaaaagagcaggctatggctttcgctcgtgctgtagctgctgggtttgacattgacaacttgggttacttgatcgcatttgcagagcgctttggtgctgcacgtctgatgaaggcatgttcacatttcatcgaactgtggaagcagaagcatgaaactggacaatggattgaagttgaacctgaagcaatgtctacacgctctgaatttcctccatttaacgcatctggcattgtgttcatgggagacaacatgaagccaaacttggaatcaggctccattaatggagaggcaaatggcgaggatggagctaaagctgatcagaagtccagccagcagatgggatctcatgctgcatatcctccatgggcaatgcatcctccatctggtgcagttgtttacccaccttatcctatgcaaggcatgcctttttatcctggggtgaatccatactaccctccatatcctccagtggatgatcccaggtaccactactcaggaaggaaatcttcgaggaagcactcctcggatagtaaggactcagaaactcttgacgttgaaagtgaccattgcagttcagatagaggaagttctcatggtcgcaagtcacatagaaaggggaagaggtccggaaagaaaaaacctagtgtggttgttatcaagaatgtgaatgtaacatctaaaaagcatggctcatcagagagcgaatcacaatcaagttctgaagttgagtctgcggacagtgacaattcacactccaaatcaagtgaaaggaagcataaaagctcaagttcaaagaaaaaggagggtaggagaactacttttgcctccggagatgaatatagcaaggatgaaatgtcaaatggccacgatgctgagcaaggaaactggagcgcattccaaaatttcttgttgagagcagaagaaaaaacaagatctagtgatgcagacctgtttgctggtgagaaagaacccccatcaaggagaaaacagaatgtaaacacagcagatcctattcttttagctgagagagatggtggcattgtccatgagcggaacatagtaggttttgattcagccaatgggaggactagagctatccgggtcatgtccaatgatgaacttgttatgtctggagaagggaggaactatatgcatagtgaaataaaggagattgaagctggtggaggaaggtacaggagagggacaggtgatgactacatggtttatggtcagggaagtcagatagccagacatagtttgttggatcctcttgcagaggcccagtacaagaatcctgttcagcaggacaagaataggaatggtgtggcggacgagtcctttatgatccctcttaggtccagcttacatgataatatcggagcagaaagcagaactactattgacatagatgttgagcttccttctagaattcataaagcatcagatgaaaaggctggacatcagcttttttacgaacctgacgaattggtgccagagcgtggatctgaagatgtttcatttggatatgatccagcaatggattatgatagccacatgcagactactgtgaaggtggaagatgaaaaaacagaggatgacttgccagttgctgacaatgatgtacagaaggtagagaaagagaagctaaggaatgcaaaggatggttcagataaacgaaggaaagatgccttattgaggaggttatcggcgccaaggaccccactgaatgatgcacaaaaacgtgcacagaacctgcgtgcatataaggcagaccttcagaaactgaagaaagaacagaagagcaaataaagcgattggagaggctcaaattggagcggcaaaagaggatcgccgcaagaggtaatggaaagggtccagggaatggttctcctaaagcgaatggtacgaatggactcagtaaatcagttccaaccttcactgggttgaaaaaggagaaaaatggaacaactgaatcactcagcgatcgactgaagaggctttctgaacccaaaagcattgctggggcagagcattccttgaatccaaagtcaactggcgcagaccattcacgaagaagaagcatggcgtgagacggagaaccgagcatcttgaatccatcgtaccactcgctagctcagcaaccatgaatggcatatcaaaaggcttcttgtacagaaagaggaaatggctggcgctgtagcactgcctgcttccaagatttgtgatggaaaatcaagttaccttttcaatggcatggcgttgtacttccaattttaacataattatttcattcttttattgaggatggcttgtaatagctgtaaacctggatttttcggcgacgcggagctatattttggtttttggctgtatttatggaatggattgatcgttgtttgagatatattgtggtatttatacagtgtataaatgtcaa

SEQ ID NO: 68398 - DNA, 402 bp, Zea Mays
cgacgcctgcctcgcttttcgtgtccctgaaggaggtttgcaacaagaggaggatgaagatcgaagaccagcaagagctgtatatatttgtgagtggcgaagacaaccttgagaagcccagggatttgcagcagccgtgcccccactctcactcctaaaagaggacgagtcaagcggtgccgagtggtaatccttcatctgtcaaaaccaaccttttctcgtcatgctacaatatccactacattacgatggatttttttttacataatatatgctacatgcatggacataactattatgaattgtcttcatgtcgacaaggaagacattgttaaaaatcaagtagaacacatgcatgcataaagattgtttgcatatatgtaacatttttcttttgctcaa

SEQ ID NO: 68399 - DNA, 731 bp, Zea Mays
aaacaatcggacgcacacaggctttgccttccttataaacgacaagaccaaactagcaagagcagcagcgttcagagtttggaaaattcagacttgagctagaaccagaggaacaccaaacacgcacgcgcccaccccccgaaacggagagaactgaccccgcagagaagatggccggcgagatgagctgggtgggcaagaagatccacctctacaacgtcaccatgggcctctacatgctcgattggtgggagcggtgcctattcaacatattggtgctgatcctgctctggttcgtctgcttcaatggctcccgcttcgcttccgacgtcttcgaaaggttttgttgaaacaatcatcgttgtggtgatgatctacgaatccacctgaaggcgcggattttccaaggctcaaattacggcctggcaattggcacgccctcctcataggccttcagcgcaacacacagaagcagcgaaatctgctggttctggaatgttaactagttcccacaaactttagcgctgtcgtgatgtgtatgatgtggttccaatatgtaagattttttttacagttattctctttattttcttgttttgtgtttgattacacgatatcacaccctgaactctactgtaattaaaaaccattttcttggtatctcgtactgtaagtagccacagtttaactgcatggtgccgcatttatagggtgcgtttggaatctcaact

SEQ ID NO: 68400 - DNA, 1265 bp, Zea Mays
tacgagtgctgctacgtgaccttgtcggatacatggtcgctaaccccaagacattcccatccggaatcaaggccctggcagattacgttcacagcaaggggcttaagcttggcatctactcttccgctgggacaagaacttgcagcaacaggatgcctggatctctgggctacgaggagagggatgctaagatgtttgcgtcatggggcgttgactacctgaagtatgacaactgctacagagacggcacgcctgaaaccgtgaggtttgggcgcatgtcccgagcgctggtgaactctggccgcccaatcttctactcgctttgcgaatggggcttcatggaagttcccaaatggggcggcatgtacggcaacagctggaggaccaccggcgacatcaacgacacatggtcaggcatgctggacaacatcgacctgaacgacgcctacgcccgaccctgacatgctggaggtcgggaacggaggcatggcgtacaacgagtacgtcgtgcacttcagcctctgggccatcgccaaggctcccctggtcatcggctgcgacgtgacgagagtctccaatgagacgctcggaatcctctccaacgcggaggtcatcgcgatcagccaagatcggctgggtgtccaaggacagaaagtgagcaagtacggcaacgatctcgaggtatgggcagggcagctctcggggcacaggaaggcggtgctgctgctcaaccggggggccacgcgctccgcgtccatcaccgcggcatggccggacgtgggcatccgccgcggcgtggccgtggaggcgagggacgtctggaagcacgagacgctaccgggctggttcaccggcagcctcacggcggtggtcgggccgcactcgtgcaagctcttcgtcctcacgcccgttcctagctgacggcgccgctggagatctgtccatccaatatctgcccgtggatccagctagagttattaattgtatgatttcagatactgtaactgccttgtgactgctccgacaacaagagctcatcaccatctgtctaatgatttgacatggtgcaacgctcagtttggcctagatttgagatccgaacgtggcgaataaaataataaaatgacgtctcctgacttcttttagcagtttagtaattaatagtaaggcttcgtttaggcatactggttcacttatactgtaaaaacgccatctcttcgttcttaagtgaaagtaacgtgtaaacttcgcttagaaatcttatt

SEQ ID NO: 68401 - DNA, 1880 bp, Zea Mays
aaaagttcgaattatattggtaatctgttagggaagaagaagaaggaaaaagatattatcaataaatgaagatcatcggtaaacgaaggccatcaattgtaaaaattctgttggtgagttggagatggttaatgcaccggaaactgaaagcttacggctacgtccgacaccccgggcccgtcacgcgtcagacaagctggagtaccgctgccgcacagactgcagcgcgtgcgcactgagtacgcaggcaggacgcgacgcagcgccgaagcaacaaggatggcgcccgagattcagagcctgtgtccgagtacgacggccgcgctcctcctgctggccgcctgcctcgccgccgcggtggcagcgctcgacgctgcggactacgccaggccgccgctgcctgcaggcggaggcggccggcgcgtcctcttcgccaacgggctcgggctgacgccgcagatggggtggaacagctggaaccatttccagtgcgacatcaacgaggcggtcgtccggagcaccgctgatgcgctcgtcgccatcggacttgcaaaggctggctacacgtatgtcaacttagatgactgctgggcggattccgagagaaccaaagagggatacatggtcgctaaccccaagacattcccatccggaatcaaggccctggcagattacgttcacagcaaggggcttaagcttggcatctactcttccgctgggacaagaacttgcagcaacaggatgcctggatctctgggctacgaggagagggatgctaagatgtttgcgtcatggggcgttgactacctgaagtatgacaactgctacagagacggcacgcctgaaaccgtgaggtttgggcgcatgtcccgagcgctggtgaactctggccgcccaatcttctactcgctttgcgaatggggcttcatggaagttcccaaatggggcggcatgtacggcaacagctggaggaccaccggcgacatcaacgacacatggtcaggcatgctggacaacatcgacctgaacgacgcctacgcccggtacgccaagcccggcggctggaacgaccctgacatgctggaggtcgggaacggaggcatggcgtacaacgagtacgtcgtgcacttcagcctctgggccatcgccaaggctcccctggtcatcggctgcgacgtgacgagagtctccaatgagacgctcggaatcctctccaacgcggaggtcatcgcgatcagccaagatcggctgggtgtccaaggacagaaagtgagcaagtacggcaacgatctcgaggtatgggcagggcagctctcggggcacaggaaggcggtgctgctgctcaaccggggggccacgcgctccgcgtccatcaccgcggcatggccggacgtgggcatccgccgcggcgtggccgtggaggcgagggacgtctggaagcacgagacgctaccgggctggttcaccggcagcctcacggcggtggtcgggccgcactcgtgcaagctcttcgtcctcacgcccgttcctagctgacggcgccgctggagatctgtccatccaatatctgcccgtggatccagctagagttattaattgtatgatttcagatactgtaactgccttgtgactgctccgacaacaagagctcatcaccatctgtctaatgatttgacatggtgcaacgctcagtttggcctagatttgagatccgaacgtggcgaataaaataataaaatgacgtctcctgacttcttttagcagtttagtaattaatagtaaggcttcgtttaggcatactggttcacttatactgtaaaaacgccatctcttcgttcttaagtgaaagtaacgtgtaaacttcgcttagaaatcttatt

SEQ ID NO: 68402 - DNA, 471 bp, Zea Mays
ctttcgcttccaaagccgcccagcccagccgtcagccagtgtcctcactcctcagccgtcgtcgctgcgtcctcactcggtcactcctcagccgtcagccagtgctgaaggtctcccggtcagccgcccagttgcgcctgcaacagttgtccaatatgaagcgcgctgaagagtgaagacaagggaaaacactgaagatggttgatctattactcgccacattacctatgtaaacagtcttctgggggaaatgaaaatgtcagacttaacgtttgtatgtcgtgtgcctcctttgaacctgagctgtataatttgtaacgcttgaactggggactgatttgagaactgagacactgcagcaatatgttgatgggtcctaagtggcgaatctaatgcatgcgtgttatgccagcaagaaaaaaaagcaaaacgtcttataaatacgaaatagattgagtacacaaagaaaca

SEQ ID NO: 68403 - DNA, 764 bp, Zea Mays
gcaggccgcgttccggccttccgggccactacttatccctcgtgttccgttctgacacggcgccgactgggactgagaagaaacctccaaacacctacctctctacgaactacctgccgccggaaaaccctagagcgctcgaccatggatccgcagcagccggagcctgtcagttacctctgcggagattgcggagctgagaacaccctgaagcccggagatgtcatccagtgccgtgaatgtggctaccgcatcctctacaagaagcggacccgccggaacgtttaatcgacgttccaagttactagtgggccggccttcctgggctttcgcttccaaagccgcccagcccagccgtcagccagtgtcctcactcctcagccgtcgtcgctgcgtcctcactcggtcactcctcagccgtcagccagtgctgaaggtctcccggtcagccgcccagttgcgcctgcaacagttgtccaatatgaagcgcgctgaagagtgaagacaagggaaaacactgaagatggttgatctattactcgccacattacctatgtaaacagtcttctgggggaaatgaaaatgtcagacttaacgtttgtatgtcgtgtgcctcctttgaacctgagctgtataatttgtaacgcttgaactggggactgatttgagaactgagacactgcagcaatatgttgatgggtcctaaaagaaaaaaaagcaaaacgtcttataaatacgaaatagattgagtacacaaagaaaca

SEQ ID NO: 68404 - DNA, 515 bp, Zea Mays
gccagattgcagcgtgtgtgtgtggtaggtcttctgtccacacccatgttcacctctcccctgcccaagtttgcccagtcccagggtctggtatcccattcctctgtcagtggtgaccatgcccactgattgcctatctctccgtggccaagacgtctcagggagtgaccagcccgcatgaccctcgttccacgttctcctaaggtgaggaagcgacatatttttgttgcttttgctccaaggtggtaccaaatgaagaaaaacaagactgaagtacgggaggacttggtcgtccacataggatcttttacttaaaacttatcgggaggagtttgtgcctcccttggtttgtaaaatattactactcagcactcgttttatagctctggtctgtaataagtaacttgatcttactttctaaataaatgtaagtttatgtaattgcttccgcacttctataactccgatgttctgtaatgtctgcaagacgggtgagacgttcctggtaaggtaag

SEQ ID NO: 68405 - DNA, 350 bp, Zea Mays
ccagattgcagcgtgtgtgtgtggtaggtcttctgtccacacccatgttcacctctcccctgcccaagtttgcccagtcccagggtctggtatcccattcctctgtcagtggtgaccatgcccactgattgcctatctctccgtggccaagacgtctcagggagtgaccagcccgcatgaccctcgttccacgttctcctaagaaaacgaaaaagagagtgaggtgactcaagagaagacatcaccacctttgaaatctcaggcagggacttggctctacttcgacaactgtgagtccgagcctgactcaactacgaacgaaggcaagccccggtgcatgcaaccccttt

SEQ ID NO: 68406 - DNA, 3729 bp, Zea Mays
ggggggatccttggctttacagcacaaacctcgatagcctatccagccagcatcgttggattggagcacgcaaacaaaaccaaaagggagagcgacagcgtcaggaaataatacccaggggaaaaaacagagagagaaagaaaagaaaagaaaagaaaaggccattcaatcttatcaacacaaagttgatttaataaaaaaaggcaggaatcggtacagaagctgctgaattttctgttccattccatcaagcaataatgaagcgggggagcatggcccgccccagccttgcagcactattgtgctttgttgtcacttacctactcttcactccctccataaatagcaccactgcaccctctccttcgcgcactcatccattccatcatcccctttgcaagtatagtctctctgctaagcgaagcgaagcttcaagctagtctcggcggctctagaagacgatgggcaaggacgacgtgatcgagagcggcgctggcggcggcgagttcgctgccaaggactacacggaccctcccccggcgccgctgatcgacgcggcggagctggggtcctggtcgctgtaccgcgccgtgatcgccgagttcatcgccacgctgctgttcctgtacatcacggtggccaccgtgatcgggtacaagcaccagacggacgcgtcggcgtcgggcgccgacgcggcgtgcggcggcgtgggcgtgctgggcatcgcctgggccttcggcggcatgatcttcgtcctcgtctactgcaccgccggcatctcggggggccacatcaaccccgccgtcaccttcggcctcttcctggcgcgcaaggtctccctggtgcgcgcgctgctctacatcgtggcgcagtgcctcggcgccatctgcggcgtcggcctcgtcaaggcgttccagagcgcctacttcgacaggtacggcggcggcgccaactcgctcgcctccggctactcccgcggcaccggcctcggcgccgagatcatcggcaccttcgtgctcgtctacaccgtcttctccgccaccgaccccaagcgcaacgcccgcgactcccacgtcccggtgagcacccgaccaacgccaccgccttctccttttttttttgttttgtttttgtctcgaccctcggtctgctgctacctgctagtaagtagctgtttgttgggagtagtagtattttatttttaaaactagcttaaaagttcgcttgtcttaatcagttggcatcagtcgtaagttgagtcccaggcgagcttaattagagctcaagttatgctagctaacatgctcaaatctcggcaatgtacatggcgcacgtgaaaaaagaaaatttccgttcacgggcagagagagggaaaggagtagcacaacaaatacaaaaaggcaggagaatatccattttttcttgatcggctgtgctacgcagcgctgtggctagcacatattttgaagctagcacatattttcaagctagcagcaaggccacaacagttagcactcagcagcacatctattatttgctccatccaagatgaatttctttgccgtagactgaagtgtttcgttttatactatttttgttttgtttttgaaagattctcctgcggactattttgttcttccatggaccatgcatgtttatgtactgctctaaattactctgttcgtggcttccatgaggattaaaatcttcataaagttaaaacgtgtggaaggccggcgaatcaatcaatcatgtgttgtgtcaggatgcgtgagctccaaatcttctggcactcatcactcaccagtactagcacccctgcgtcattaaggctttcatagtcgtgataatgaccgttattaacgcacactcggtggaacattcgagtgggagtgcatccacgtcatggtcaggctaggggccaaccatcggcatcacccccggcccggacatataattaaagagctccggccttatctttctgtgcatgcatgccatcatctccattgtgcagacgcgaaagaaagcactgcattttttttaccgctcccatccactgaccgccattgacggcacagcaacagtaaacaaatttcgggccgggtagtgctacgggtcagtggcgggcccccggcgtgtaaaaagctgagctgggggggggggtctggtccggccctgtaggggtacatggtccgaccggtaggtcgggtccatccagtccttgtcgtgattagctagtccgtgcaccgtgcacgccctacctcccttgtgtcccatgccatgtgggcctctcgtcacctctgtccctccatggccatgatgatgaattattggcgccctcgcaccgtaccttcgtcctttgctcctactctactacgggcacgagcctcctgcgttttcaaacgatttcgcacgttatttttgaaaaaaaaaacttttattgaccgtgcgtactatacatccaacctaaccacacatgaaacacacacacacacagaattcctgcacagcacagcagtagtacaaaatatatattcagcattcgtgcatccaaagtcaaagtgtgtgtgtgtgtggctaggtgaaatttagcagtcactttagctaggctagggcagcactgcatccccctctttcgtgcgtgaggatctgggacagtgggcgaggtgacaaaacgcgatgccttttgcacggcctggcgccggtcgagtcttgtcaaaagaagaagaaaaaaattcgatgcccgtggcccaaaggcccactaactaacggtgtttggtgtgtggccattacattgttgcttattatacctgacccactacgcgtgatttttttgtctgtttgtttgcaggttctggctcccctccccatcggcttcgccgtgttcatggtgcacctggccaccatccccgtcaccggcaccggcatcaacccggccaggagcctgggcgccgccgtcatctacaacaaggacaagccctgggacgaccactggatcttctgggtgggccctctcgtgggcgctgccatcgcggccttctaccaccagtacatcctccgggctggcgccatcaaggccctcggctccttcaggagcaacgcgtgatgagcggggcttggctgtggagcaatggcgggcgacctacgggcggggggccgtgagcgaggagaatgccatcattcatcgatcgacttgggtgccggtggttggttcgggtcgccttttttttgtttcagcagctgctgcgttgcgcgcgtgcgtgagatttggtttggtttcgttcccctgcaatgtaatcatgtcgtgactctcaagggattattccgctctgctcttatggtctctgttttctatttaatgattgttattaccatgtagcagtaaccatcgtcatcagtgagaaccttgttgcttctgtctaaatcaaccgagacgtgtggagtggatggatcgaacattcagccttgtgctctctctcgctccctcgtttggctgtcctgtctgctgtctgtattattgcatcttggccctctcaatcaatcccttgtgattcctcccactaccttgtgattctctctccacagcggtggtgggggctgccgcgcccgctttagcagttacagctaggtacactacccggtaggaggagcgtgctgcgcagatttcatcaaatcttcaccgggtcgcttctgctgcctggaatatgatataaattaaaaaaaaaggaa

SEQ ID NO: 68407 - DNA, 686 bp, Zea Mays
ccaaaggtttgggcaaggttgattagtcatttaataggctcactcaaaggttgcaaggtttcgcaagaagccatttcctcttttctactctttagaagcactttatgaagctagaagtatgtctgaatagactctccatccattcaatacaaatccatttgatttggatggacaagagatgacaagtgaagctcaatctgtgtcagttatacatgaagcaagagagggagaaggtagcaaaagcagaaagcataagcagagccatgttggagcagctctcgaagactatgtggagttcaaaaagagccaaactaacaagacacttgatgctcttaaagaactttccatgaggaagtgtatgaagaaaatggaagcaatggatggattcacagatgagaagaagtcatatgctgtggaggtctttaagtcctagattaatagagaggctttcatgtcaacaatgaaccacaatgttcgaagaatgtggctaaagcgcaaaattaggtgtgtccatagttaagcatgtaacaaaacatagctttatgattttggtttcagcttagcatgagcacatattgtgtggcaacagcttcatattgccatccaagaacatgttagcaacaatatcttcatattgtttacctccgtccatgttgtattattgttttttagttttcactcgtgac

SEQ ID NO: 68408 - DNA, 1303 bp, Zea Mays
gttcgattcaccgtcgtccatagtgccgccatccccagccatcacgagcatgacatccttggccgtcgtgcccagcgtgtcatccccgtccctagtttgagatccagtggttgatcaactccgtgtgtgctcttcttcgttccttacacagccgtctctcctccaagatccaaaccccagcgctagtgagccatgtcaaaggaatttgcaagggcggcctggaactcaacatatgagaagggtttagtcgatgtactacatgactacaaagataatccaaagttgaaggtcaaaatgaatggaattcagaggcatggaagtgtagcactgctaagtttaatgaaaggttctctttggctcatttcacaaaacaacaactacaagagaaggataaagaacttaaatcaagctataaagtagtaagatattcaagaaaggaaagtgggactagttggaatgactccctatgtatgatattggttgaaccaaaggtttgggcaaggttgattagtgtaagcaatttcttgttataacattatgtctttgcttgttcaatatgatttttttgttgctaaaaactaattacatttcatgtagcatttaataggctcactcaaaggttgcaaggtttcgcaagaagccatttcctcttttctactctttagaagcactttatgaagtgtggctacaagagaattaaattttacatcaactcaacgactgcctccttatgctcctctatctgttgataatcttgctcctcctgctactgttcctcctcttgctcctcctgctcctacttttgttattccttcagctagaattatacatgaagcaagagagggagaaggtagcaaaagcagaaagcataagcagagccatgttggagcagctctcgaagactatgtggagttcaaaaagagccaaactaacaagacacttgatgctcttaaagaactttccatgaggaagtgtatgaagaaaatggaagcaatggatggattcacagatgagaagaagtcatatgctgtggaggtctttaagtcctagattaatagagaggctttcatgtcaacaatgaaccacaatgttcgaagaatgtggctaaagcgcaaaattaggtgtgtccatagttaagcatgtaacaaaacatagctttatgattttggtttcagcttagcatgagcacatattgtgtggcaacagcttcatattgccatccaagaacatgttagcaacaatatcttcatattgtttacctccgtccatgttgtattattgttttttagttttcactcgtgac

SEQ ID NO: 68409 - DNA, 428 bp, Zea Mays
cttccatggggatctcgtcccagcctccgaacgccagcatccactgcgtcgatggggggcgattgcgatggggagatgaccgcgacggatcgattgcgatgcctccatccgctgcaccgacgttcgattcaccgtcgtccatagtgccgccatccccagccatcacgagcatgacatccttggccgtcgtgcccagcgtgtcatccccgtccctagtttgagatccagtggttgatcaactccgtgtgtgctcttcttcgttccttacacagccgtctctcctccaagatccaaaccccagcgctagtgagataatgggttcttgggaggagcatgttaggcaatttttgttggaggaggaggaagatgacgatgaactattttttgttgttctccctgctataatcccatacctctcggaagagaaa

SEQ ID NO: 68410 - DNA, 1208 bp, Zea Mays
ccattcgtttctcccctccagcgccgaggccgagtacctcactgtggctaatggcgtcgctgaggcggcatggcttcgtcagctgctccaggagctgcacagtccgttgacatggagcacacttgtctactgtgataacgtcagtgccatgtatctctccaccaatcctgttcagcaccagcgcacaaatcatgttgagctcgacctctacttcgtccgcgagcgtgtcgccgtcggggatgtgcgagttctctatgtcccgaccacttctcagtttgtcgacatcttcaccaagggcctaactacatcgttatttgaggaggtttggtccagtcttaacatctgtcgtggctagaatttcgaccacgagagtgttagagttatttgtggctttgtattgtaatggggtgttttctatgtaatgggcttagggccaacaactctattataaatatagctcccccaaccctggttagggttagggtttccagcccactaacagattgaactatgactagattagtcatgcgaagattttaaatatttgtggattgatatgtctacaggtccttccgtgactatggagaatccgtcttgagacatttagagaatgcaatcagcaaagacccaaatctccgtaaagccccggtgaaccatgagggcgtaagggtttcaggatatggtgggtggttcttgctgaggctctctctgcatgatcctgttcttcccctaaacattgaggcacagagtaacgatgatgcgattaagctggggcttgcggttcttgctgctgtgaatgaatttccagcactggatgtgacggcactgaacaaattcgtgcatcagtgaatataagggacggacattggcatcataatgtgatcagcttcgcatggtgtcgtgttcgccccggtcgaacatgttctacatgtggcacgagtatcatacagaaatataccagtttattacttgcacaggctttttagtttggaaagacaagggagatttcagtgttgagatgattcttgtgtgtgtttataccagctatcagagtaagaatatgcgtgcgtactgttgaggctgatctttacttgagaataaggtttgagttacctgagtatttttttaaaaggatcaggaggcttgctgtgatgtgaggccacgaatttgccaataagtacctcgatttttctttagcgatttcacat

SEQ ID NO: 68411 - DNA, 650 bp, Zea Mays
aatgaatggtccttccgtgactatggagaatccgtcttgagacatttagagaatgcaatcagcaaagacccaaatctccgtaaagccccggtgaaccatgagggcgtaagggtttcaggatatggtgggtggttcttgctgaggctctctctgcatgatcctgttcttcccctaaacattgaggcacagagtaacgatgatgcgattaagctggggcttgcggttcttgctgctgtgaatgaatttccagcactggatgtgacggcactgaacaaattcgtgcatcagtgaatataagggacggacattggcatcataatgtgatcagcttcgcatggtgtcgtgttcgccccggtcgaacatgttctacatgtggcacgagtatcatacagaaatataccagtttattacttgcacaggctttttagtttggaaagacaagggagatttcagtgttgagatgattcttgtgtgtgtttataccagctatcagagtaagaatatgcgtgcgtactgttgaggctgatctttacttgagaataaggtttgagttacctgagtatttttttaaaaggatcaggaggcttgctgtgatgtgaggccacgaatttgccaataagtacctcgatttttctttagcgatttcacat

SEQ ID NO: 68412 - DNA, 2329 bp, Zea Mays
ccgctgctcgaatagatcgtctgcagtcgcgtgactcgactttaccccgctgctccgcttccctctctcgtgctcgccgccccacagctcgaagacgacgaggtggcctcagcacacgcgcgcgcaaccatggcagcattatcagcgaagaccatacaaaatgcattcttggcacaacacacacggaataggcatggtgcaagatatcccagtgatttttgttctctcaatacccgcagcatgcattccttccaggaatgtagattggcagtggctgattcttcagccaaatggttaaataccacatcgacgctatggactagcttcaacaaacaagcaggcattagctgcaatgctgctcaaggtggcactgttgtgtgttcatctgagaaagttgagtttctgaagcttcaaaatggcagtgatattcgtggtgttgctgttgctggggttgaaggtgagcctgtcaacctcacggaagatgtcactaaagctatagctgcagcttttgctgcatggctgttaaacaagaaaccagatggcttgagacgtttaagaatctctgttggacatgattcacgaatttctgcacataaattgcagaatgcagtcactcatggaatcactactgctggacacgatatcctacagtttggattggcttcaacgcctgcaatgttcaacagtacacttacagaagatgagagaagtcatttacctgttgatggagccataatgataacagcaagccatctcccctacaatcggaatggtctcaagttttttacaagtgatggtgggctaaataaagctgatatcaaagatatcctggagcgtgcttccaaaatatatgaggaatctgcacataataacctgaaagaacagggggaagcttcgaagggagttgtcactaatgtggactacatgtcaatttatgcttctgatcttgtacaagcagttcgtaaatctgctggagacaaagaaaaaccattggaggaactgcatatagtcgttgatgcagggaatggtgctggtggtttttttgtggataaggtactcaaaccattaggagctgttaccactggaagtcaattccttgagcctgatggtttgtttcccaatcacattcccaaccctgaggacaaaaccgcaatgaagtttattacacaagcagttcttgataacaaggcagacttaggcatcatatttgatactgatgttgacaggtctgcggctgttgattccaggggtcgtgagttgaatcgtaaccgattgattgctttgatggctgccatagttcttgaggaagaactacagttgtgacagatagtgtgacttcagatggattgactgtatttattgaaaataaacttggagggaagcatcaccgtttcaaacgagggtacaagaatgtaatagacgaggctattcgtctgaactctattggtgaggagtcacatttggccatggaaacaagtgggcatggagcgctgaaagagaaccactggcttgatgatggagcataccttatggtcaaacttttgaataaacttgctgctgctagaacactgggttcaagtattggtagtaaagttttgactgatttggttgagggccttgaggaagctgatgtgacagttgagataaggttaaagattgatcagaatcatgcagatttgaaaggagggtccttccgtgactatggagaatccgtcttgagacatttagagaatgcaatcagcaaagacccaaatctccgtaaagccccggtgaaccatgagggcgtaagggtttcaggatatggtgggtggttcttgctgaggctctctctgcatgatcctgttcttcccctaaacattgaggcacagagtaacgatgatgcgattaagctggggcttgcggttcttgctgctgtgaatgaatttccagcactggatgtgacggcactgaacaaattcgtgcatcagtgaatataagggacggacattggcatcataatgtgatcagcttcgcatggtgtcgtgttcgccccggtcgaacatgttctacatgtggcacgagtatcatacagaaatataccagtttattacttgcacaggctttttagtttggaaagacaagggagatttcagtgttgagatgattcttgtgtgtgtttataccagctatcagagtaagaatatgcgtgcgtactgttgaggctgatctttacttgagaataaggtttgagttacctgagtatttttttaaaaggatcaggaggcttgctgtgatgtgaggccacgaatttgccaataagtacctcgatttttctttagcgatttcacat

SEQ ID NO: 68413 - DNA, 2329 bp, Zea Mays
ccgctgctcgaatagatcgtctgcagtcgcgtgactcgactttaccccgctgctccgcttccctctctcgtgctcgccgccccacagctcgaagacgacgaggtggcctcagcacacgcgcgcgcaaccatggcagcattatcagcgaagaccatacaaaatgcattcttggcacaacacacacggaataggcatggtgcaagatatcccagtgatttttgttctctcaatacccgcagcatgcattccttccaggaatgtagattggcagtggctgattcttcagccaaatggttaaataccacatcgacgctatggactagcttcaacaaacaagcaggcattagctgcaatgctgctcaaggtggcactgttgtgtgttcatctgagaaagttgagtttctgaagcttcaaaatggcagtgatattcgtggtgttgctgttgctggggttgaaggtgagcctgtcaacctcacggaagatgtcactaaagctatagctgcagcttttgctgcatggctgttaaacaagaaaccagatggcttgagacgtttaagaatctctgttggacatgattcacgaatttctgcacataaattgcagtcactcatggaatcactactgctggacacgatatcctacagtttggattggcttcaacgcctgcaatgttcaacagtacacttacagaagatgagagaagtcatttacctgttgatggagccataatgataacagcaagccatctcccctacaatcggaatggtctcaagttttttacaagtgatggtgggctaaataaagctgatatcaaagatatcctggagcgtgcttccaaaatatatgaggaatctgcacataataacctgaaagaacagggggaagcttcgaagggagttgtcactaatgtggactacatgtcaatttatgcttctgatcttgtacaagcagttcgtaaatctgctggagacaaagaaaaaccattggaggaactgcatatagtcgttgatgcagggaatggtgctggtggtttttttgtggataaggtactcaaaccattaggagctgttaccactggaagtcaattccttgagcctgatggtttgtttcccaatcacattcccaaccctgaggacaaaaccgcaatgaagtttattacacaagcagttcttgataacaaggcagacttaggcatcatatttgatactgatgttgacaggtctgcggctgttgattccaggggtcgtgagttgaatcgtaaccgattgattgctttgatggctgccatagttcttgaggaacatccaggaactacagttgtgacagatagtgtgacttcagatggattgactgtatttattgaaaataaacttggagggaagcatcaccgtttcaaacgagggtacaagaatgtaatagacgaggctattcgtctgaactctattggtgaggagtcacatttggccatggaaacaagtgggcatggagcgctgaaagagaaccactggcttgatgatggagcataccttatggtcaaacttttgaataaacttgctgctgctagaacactgggttcaagtattggtagtaaagttttgactgatttggttgagggccttgaggaagctgatgtgacagttgagataaggttaaagattgatcagaatcatgcagatttgaaaggagggtccttccgtgactatggagaatccgtcttgagacatttagagaatgcaatcagcaaagacccaaatctccgtaaagccccggtgaaccatgagggcgtaagggtttcaggatatggtgggtggttcttgctgaggctctctctgcatgatcctgttcttcccctaaacattgaggcacagagtaacgatgatgcgattaagctggggcttgcggttcttgctgctgtgaatgaatttccagcactggatgtgacggcactgaacaaattcgtgcatcagtgaatataagggacggacattggcatcataatgtgatcagcttcgcatggtgtcgtgttcgccccggtcgaacatgttctacatgtggcacgagtatcatacagaaatataccagtttattacttgcacaggctttttagtttggaaagacaagggagatttcagtgttgagatgattcttgtgtgtgtttataccagctatcagagtaagaatatgcgtgcgtactgttgaggctgatctttacttgagaataaggtttgagttacctgagtatttttttaaaaggatcaggaggcttgctgtgatgtgaggccacgaatttgccaataagtacctcgatttttctttagcgatttcacat

SEQ ID NO: 68414 - DNA, 2110 bp, Zea Mays
ccgctgctcgaatagatcgtctgcagtcgcgtgactcgactttaccccgctgctccgcttccctctctcgtgctcgccgccccacagctcgaagacgacgaggtggcctcagcacacgcgcgcgcaaccatggcagctgctcaaggtggcactgttgtgtgttcatctgagaaagttgagtttctgaagcttcaaaatggcagtgatattcgtggtgttgctgttgctggggttgaaggtgagcctgtcaacctcacggaagatgtcactaaagctatagctgcagcttttgctgcatggctgttaaacaagaaaccagatggcttgagacgtttaagaatctctgttggacatgattcacgaatttctgcacataaattgcagaatgcagtcactcatggaatcactactgctggacacgatatcctacagtttggattggcttcaacgcctgcaatgttcaacagtacacttacagaagatgagagaagtcatttacctgttgatggagccataatgataacagcaagccatctcccctacaatcggaatggtctcaagttttttacaagtgatggtgggctaaataaagctgatatcaaagatatcctggagcgtgcttccaaaatatatgaggaatctgcacataataacctgaaagaacagggggaagcttcgaagggagttgtcactaatgtggactacatgtcaatttatgcttctgatcttgtacaagcagttcgtaaatctgctggagacaaagaaaaaccattggaggaactgcatatagtcgttgatgcagggaatggtgctggtggtttttttgtggataaggtactcaaaccattaggagctgttaccactggaagtcaattccttgagcctgatggtttgtttcccaatcacattcccaaccctgaggacaaaaccgcaatgaagtttattacacaagcagttcttgataacaaggcagacttaggcatcatatttgatactgatgttgacaggtctgcggctgttgattccaggggtcgtgagttgaatcgtaaccgattgattgctttgatggctgccatagttcttgaggaagaactacagttgtgacagatagtgtgacttcagatggattgactgtatttattgaaaataaacttggagggaagcatcaccgtttcaaacgagggtacaagaatgtaatagacgaggctattcgtctgaactctattggtgaggagtcacatttggccatggaaacaagtgggcatggagcgctgaaagagaaccactggcttgatgatggagcataccttatggtcaaacttttgaataaacttgctgctgctagaacactgggttcaagtattggtagtaaagttttgactgatttggttgagggccttgaggaagctgatgtgacagttgagataaggttaaagattgatcagaatcatgcagatttgaaaggagggtccttccgtgactatggagaatccgtcttgagacatttagagaatgcaatcagcaaagacccaaatctccgtaaagccccggtgaaccatgagggcgtaagggtttcaggatatggtgggtggttcttgctgaggctctctctgcatgatcctgttcttcccctaaacattgaggcacagagtaacgatgatgcgattaagctggggcttgcggttcttgctgctgtgaatgaatttccagcactggatgtgacggcactgaacaaattcgtgcatcagtgaatataagggacggacattggcatcataatgtgatcagcttcgcatggtgtcgtgttcgccccggtcgaacatgttctacatgtggcacgagtatcatacagaaatataccagtttattacttgcacaggctttttagtttggaaagacaagggagatttcagtgttgagatgattcttgtgtgtgtttataccagctatcagagtaagaatatgcgtgcgtactgttgaggctgatctttacttgagaataaggtttgagttacctgagtatttttttaaaaggatcaggaggcttgctgtgatgtgaggccacgaatttgccaataagtacctcgatttttctttagcgatttcacat

SEQ ID NO: 68415 - DNA, 1936 bp, Zea Mays
ccgctgctcgaatagatcgtctgcagtcgcgtgactcgactttaccccgctgctccgcttccctctctcgtgctcgccgccccacagctcgaagacgacgaggtggcctcagcacacgcgcgcgcaaccatggcagctgctcaaggtggcactgttgtgtgttcatctgagaaagttgagtttctgaagcttcaaaatggcagaatgcagtcactcatggaatcactactgctggacacgatatcctacagtttggattggcttcaacgcctgcaatgttcaacagtacacttacagaagatgagagaagtcatttacctgttgatggagccataatgataacagcaagccatctcccctacaatcggaatggtctcaagttttttacaagtgatggtgggctaaataaagctgatatcaaagatatcctggagcgtgcttccaaaatatatgaggaatctgcacataataacctgaaagaacagggggaagcttcgaagggagttgtcactaatgtggactacatgtcaatttatgcttctgatcttgtacaagcagttcgtaaatctgctggagacaaagaaaaaccattggaggaactgcatatagtcgttgatgcagggaatggtgctggtggtttttttgtggataaggtactcaaaccattaggagctgttaccactggaagtcaattccttgagcctgatggtttgtttcccaatcacattcccaaccctgaggacaaaaccgcaatgaagtttattacacaagcagttcttgataacaaggcagacttaggcatcatatttgatactgatgttgacaggtctgcggctgttgattccaggggtcgtgagttgaatcgtaaccgattgattgctttgatggctgccatagttcttgaggaacatccaggaactacagttgtgacagatagtgtgacttcagatggattgactgtatttattgaaaataaacttggagggaagcatcaccgtttcaaacgagggtacaagaatgtaatagacgaggctattcgtctgaactctattggtgaggagtcacatttggccatggaaacaagtgggcatggagcgctgaaagagaaccactggcttgatgatggagcataccttatggtcaaacttttgaataaacttgctgctgctagaacactgggttcaagtattggtagtaaagttttgactgatttggttgagggccttgaggaagctgatgtgacagttgagataaggttaaagattgatcagaatcatgcagatttgaaaggagggtccttccgtgactatggagaatccgtcttgagacatttagagaatgcaatcagcaaagacccaaatctccgtaaagccccggtgaaccatgagggcgtaagggtttcaggatatggtgggtggttcttgctgaggctctctctgcatgatcctgttcttcccctaaacattgaggcacagagtaacgatgatgcgattaagctggggcttgcggttcttgctgctgtgaatgaatttccagcactggatgtgacggcactgaacaaattcgtgcatcagtgaatataagggacggacattggcatcataatgtgatcagcttcgcatggtgtcgtgttcgccccggtcgaacatgttctacatgtggcacgagtatcatacagaaatataccagtttattacttgcacaggctttttagtttggaaagacaagggagatttcagtgttgagatgattcttgtgtgtgtttataccagctatcagagtaagaatatgcgtgcgtactgttgaggctgatctttacttgagaataaggtttgagttacctgagtatttttttaaaaggatcaggaggcttgctgtgatgtgaggccacgaatttgccaataagtacctcgatttttctttagcgatttcacat

SEQ ID NO: 68416 - DNA, 2168 bp, Zea Mays
gccgtcggagtcactatcatcggctccacctcctccgagggaagtacagatcccttcaccgctgctcgaatagatcgtctgcagtcgcgtgactcgactttaccccgctgctccgcttccctctctcgtgctcgccgccccacagctcgaagacgacgaggtggcctcagcacacgcgcgcgcaaccatggcagctgctcaaggtggcactgttgtgtgttcatctgagaaagttgagtttctgaagcttcaaaatggcagtgatattcgtggtgttgctgttgctggggttgaaggtgagcctgtcaacctcacggaagatgtcactaaagctatagctgcagcttttgctgcatggctgttaaacaagaaaccagatggcttgagacgtttaagaatctctgttggacatgattcacgaatttctgcacataaattgcagtcactcatggaatcactactgctggacacgatatcctacagtttggattggcttcaacgcctgcaatgttcaacagtacacttacagaagatgagagaagtcatttacctgttgatggagccataatgataacagcaagccatctcccctacaatcggaatggtctcaagttttttacaagtgatggtgggctaaataaagctgatatcaaagatatcctggagcgtgcttccaaaatatatgaggaatctgcacataataacctgaaagaacagggggaagcttcgaagggagttgtcactaatgtggactacatgtcaatttatgcttctgatcttgtacaagcagttcgtaaatctgctggagacaaagaaaaaccattggaggaactgcatatagtcgttgatgcagggaatggtgctggtggtttttttgtggataaggtactcaaaccattaggagctgttaccactggaagtcaattccttgagcctgatggtttgtttcccaatcacattcccaaccctgaggacaaaaccgcaatgaagtttattacacaagcagttcttgataacaaggcagacttaggcatcatatttgatactgatgttgacaggtctgcggctgttgattccaggggtcgtgagttgaatcgtaaccgattgattgctttgatggctgccatagttcttgaggaacatccaggaactacagttgtgacagatagtgtgacttcagatggattgactgtatttattgaaaataaacttggagggaagcatcaccgtttcaaacgagggtacaagaatgtaatagacgaggctattcgtctgaactctattggtgaggagtcacatttggccatggaaacaagtgggcatggagcgctgaaagagaaccactggcttgatgatggagcataccttatggtcaaacttttgaataaacttgctgctgctagaacactgggttcaagtattggtagtaaagttttgactgatttggttgagggccttgaggaagctgatgtgacagttgagataaggttaaagattgatcagaatcatgcagatttgaaaggagggtccttccgtgactatggagaatccgtcttgagacatttagagaatgcaatcagcaaagacccaaatctccgtaaagccccggtgaaccatgagggcgtaagggtttcaggatatggtgggtggttcttgctgaggctctctctgcatgatcctgttcttcccctaaacattgaggcacagagtaacgatgatgcgattaagctggggcttgcggttcttgctgctgtgaatgaatttccagcactggatgtgacggcactgaacaaattcgtgcatcagtgaatataagggacggacattggcatcataatgtgatcagcttcgcatggtgtcgtgttcgccccggtcgaacatgttctacatgtggcacgagtatcatacagaaatataccagtttattacttgcacaggctttttagtttggaaagacaagggagatttcagtgttgagatgattcttgtgtgtgtttataccagctatcagagtaagaatatgcgtgcgtactgttgaggctgatctttacttgagaataaggtttgagttacctgagtatttttttaaaaggatcaggaggcttgctgtgatgtgaggccacgaatttgccaataagtacctcgatttttctttagcgatttcacat

SEQ ID NO: 68417 - DNA, 836 bp, Zea Mays
ctgaagcagataagccgtacgccgtccccttgcacagcaaacatccatggcgactgcccgcttgccctctcgctccttcctgtccccggctcagcaatcctatccacggcttcccgcctccgtccgcctctgcctctctcatcacgagcaacctcccaccggccccaagcggcaccgacgcgccgccacttcgcatcctgccttttctgcagccgcgcggggtcgtgccaagaagattcccatcgcggacaccgatgagcccgccgccggagtccgcgtcaccgatcgcggcatctcttaccgcctcgatggcgcgccatttgagtttcagtatagctacactgaggccccacgcgcacgccccgtagcgctccgtgaggccccgttcatgccgttcgggcccgaggccacgccacgcccctggacgggaaggaagccgctgccaaagagccgcaaggagcttccggagtttgactcgttcgtgctgccagcaccggggaagaagggggtgaagcccgtgcagtcaccgggtccgttcctcgccggtatggagccgagataccaatcggtgtccagggaggacatactcggggagcccctaaccaaggaagaggtctccgaactcgtgaaagggagcctcaaatccaaacggcaactcaatatgggcagggatggtttgacacacaatatgttggagaacattcattcacattggaagaggaaaagagtttgcaagataaagtgcaaaggtgtctgtacaatagatatggataatatctgccatcagctagagggtactagtggtgctagtattggaggatctcatgagagtttgg

SEQ ID NO: 68418 - DNA, 814 bp, Zea Mays
ctgaagcagataagccgtacgccgtccccttgcacagcaaacatccatggcgactgcccgcttgccctctcgctccttcctgtccccggctcagcaatcctatccacggcttcccgcctccgtccgcctctgcctctctcatcacgagcaacctcccaccggccccaagcggcaccgacgcgccgccacttcgcatcctgccttttctgcagccgcgcggggtcgtgccaagaagattcccatcgcggacaccgatgagcccgccgccggagtccgcgtcaccgatcgcggcatctcttaccgcctcgatggcgcgccatttgagtttcagtatagctacactgaggccccacgcgcacgccccgtagcgctccgtgaggccccgttcatgccgttcgggcccgaggccacgccacgcccctggacgggaaggaagccgctgccaaagagccgcaaggagcttccggagtttgactcgttcgtgctgccagcaccggggaagaagggggtgaagcccgtgcagtcaccgggtccgttcctcgccggtatggagccgagataccaatcggtgtccagggaggacatactcggggagcccctaaccaaggaagaggtctccgaactcgtgaaagggagcctcaaatccaaacggcaactcaatatgggcagggatggtttgacacacaatatgttggagaacattcattcacattggaagaggaaaagagtttgcaagataaagtgcaaaggtgtctgtacaatagatatggataatatctgccatcagctagaggtcctcggaagccgtgcaagg

SEQ ID NO: 68419 - DNA, 371 bp, Zea Mays
gtgggctaccgtggccgggaaccgtactacttaaaccaccggtcaagaacaggtaccacaggataaggcgcatggaggatgctgcgatgtgttcgtgagagatctaggtcgtcgtctctcagtcaactttgggttgttggaccgttttctccttttgatgtaattatttatttattttgtatagaactcctattatatagtaaagatgtgatattcgatcatgtgccatgattcatcatatgtgtgagacttggtcctagcacacctggtgattatgttcgcgcccgagttttggacccctaaaacccgggtgtgacacattctctctggtacacacaggcatgtttgtcagctcgatgtcttgatctttg

SEQ ID NO: 68420 - DNA, 93 bp, Zea Mays
cagtgggctaccgtggccgggaaccgtactacttaaaccaccgcggtgaggacacgagtcatctgaagagcaagttggtacctggaatctcaa

SEQ ID NO: 68421 - DNA, 679 bp, Zea Mays
aacatggttccttggtgttgcgggtgtgctccagccccaagtgtccgagtctttccggcgaagggtttcggacagagaagatggcgacggcggcggcagggttggctccggcaaaggaggtggtggagaagaaggtggaactcctgaaggagatacgggcgcacgaggtggcgatcgcggagctagacaacctgaatccctcccgagtcagcctcttcccctctgtctccctcccttgcttgcggcggtgtaccagaaagctggcaacatcttcttccgtaagagcgtcaaatcggtgatcacaacggagcagaagcaacttgaccaagccaaggctcggctgagcaagctgaaccaagcttgatgggcagcacgctacaaatgttgaccttgaacaaaatagagcatgcagatttgaatggacttctcgttgctcattaattctgcagttgggcgttgtggacataatccatgtgtaatgctactttctttttcatgagatgtatggctagtgtggtcgtgaagtttggttaagccttttgagcccgattcagtgttaaaaatctagaatttcaactaaaggagtacatgagctgaatagatttctaaaaatctatggatttctctagtttaatctcaaatctcttcttaccctacgtcttttagatttctgtcatcc

SEQ ID NO: 68422 - DNA, 632 bp, Zea Mays
ctagatgggcctcccatgtgactagtagctgactggatgggcctcaacatggttccttggtgttgcgggtgtgctccagccccaagtgtccgagtctttccggcgaagggtttcggacagagaagatggcgacggcggcggcagggttggctccggcaaaggaggtggtggagaagaaggtggaactcctgaaggaggcggtgtaccagaaagctggcaacatcttcttccgtaagagcgtcaaatcggtgatcacaacggagcagaagcaacttgaccaagccaaggctcggctgagcaagctgaaccaagcttgatgggcagcacgctacaaatgttgaccttgaacaaaatagagcatgcagatttgaatggacttctcgttgctcattaattctgcagttgggcgttgtggacataatccatgtgtaatgctactttctttttcatgagatgtatggctagtgtggtcgtgaagtttggttaagccttttgagcccgattcagtgttaaaaatctagaatttcaactaaaggagtacatgagctgaatagatttctaaaaatctatggatttctctagtttaatctcaaatctcttcttaccctacgtcttttagatttctgtcatcc

SEQ ID NO: 68423 - DNA, 1772 bp, Zea Mays
aaattagtgactaaaaccaaacgcgccttatcttcgtctgttcctagattctactaggacgagcccaaatccaaatcgtcctgaggaaagggtaaagaaagtgaagcaaggggctgcctggcttagggtttcttgacggctccttgccctctccgccatggacgcgcagcgagccctccttgacgagctcatgggcacagctcgtaacctaacggaggaggagaagaaggggcacaaggagctgaagtgggacgatccggacgtgtgcggcccctacatggtccggttctgtccccacgaccttttcgtcaacaccaagagcaatctcgggccgtgcttgaggatccatgatccgaagctcaaggaaagctttgagaaatctcccaggcatgatacttatatgcaaaggtttgaggcagagcttgcacaacaatgtgagaaattggtgagtcaacacttgctctttcaaaaaattctgagtagtacaattacctctgtttattctgttgcaggtaatggatttggatagaaagataagacgtggtcgagaaaggttggctcacgattctgctgtgccaatgccaatccctggaaaaatagctgagcagctttcagcgcgagaagaacaggtcaagaagctactggagcaaatcgaggagcttggtgaggctggtaaagtggatgaagctgaggcacttatgaaacgggttgacattctaaacgctgagaagacagctttatctaaccaagcagacagcaaagtggctatgcttgagaagaagatggagctttgcgaaacgtgtggatcattcttagttgctgatgatgctcttgagagaacccagtcccacgtgactgggaaacaacacattggatatggtatggttagagatttcctggtggaatacaaggcggcaatagagaagtcaaaagaggaagataggcttgcaagggagcagaaagcagaggagcgtcggaagcagagaggaaaagagtatgataatgggggcagggatagagataccagaagggagaagtctggggagcgtgactatgaccgtgatcgtcagtatgagcgaagccgtggaagagacaggtcttatgattacagagagagaggatcagagcaccgaagcaatctctacagaaatgggagggattccgaaagaggtggacacagatacaggagtggtgatatgacaaacgaccgggggagaatgaggagcagatcacgttctccaacaaggcatggctatggaagatctggaagtccaaatcattagctgaatatttagatagttttattcacagttgggactcatgagctctgttggaaccctacagtcttcctttttacatgagaaaaaaaaaattctcagttaaactcgtaaggccggtactggacttcatgtatggatgatgatgtttacagaattacagtctatagcagggagcttcgtcttcaaaatggaagttcttcctctataatgaaggcgtacaggatgaagatgtgatctgaagatgataagaacgaacgccgaagctattgccaaagagtaacaacttcggcttataatggtgatgaagactgaaaatgatgctggccgaaagggaaaaagactgtttagtccttaatgatacatgttatgattataagtaaatgtcaggggcataaatgtaattttacctgtgctgtgtcccgtgcctataaatagatgaatagtagcaccgtactacgctgaattgtattcgccgtcacgtcaacaccttcg

SEQ ID NO: 68424 - DNA, 1900 bp, Zea Mays
tatcttcgtctgttcctagattctactaggacgagcccaaatccaaatcgtcctgaggaaagggtaaagaaagtgaagcaaggggctgcctggcttagggtttcttgacggctccttgccctctccgccatggacgcgcagcgagccctccttgacgagctcatgggcacagctcgtaacctaacggaggaggagaagaaggggcacaaggagctgaagtgggacgatccggacgtgtgcggcccctacatggtccggttctgtccccacgaccttttcgtcaacaccaagagcaatctcgggccgtgcttgaggatccatgatccgaagctcaaggaaaggtgataccagttgtgaagcttaatatattgagatctttgagaaatctcccaggcatgatacttatatgcaaaggtttgaggcagagcttgcacaacaatgtgagaaattggtaatggatttggatagaaagataagacgtggtcgagaaaggttggctcacgattctgctgtgccaatgccaatccctggaaaaatagctgagcagctttcagcgcgagaagaacaggtcaagaagctactggagcaaatcgaggagcttggtgaggctggtaaagtggatgaagctgaggcacttatgaaacgggttgacattctaaacgctgagaagacagctttatctaaccaagcagacagcaaagtggctatgcttgagaagaagatggagctttgcgaaacgtgtggatcattcttagttgctgatgatgctcttgagagaacccagtcccacgtgactgggaaacaacacattggatatggtatggttagagatttcctggtggaatacaaggcggcaatagagaagtcaaaagaggaagataggcttgcaagggagcagaaagcagaggagcgtcggaagcagagaggaaaagagtatgataatgggggcagggatagagataccagaagggagaagtctggggagcgtgactatgaccgtgatcgtcagtatgagcgaagccgtggaagagacaggtcttatgattacagagagagaggatcagagcaccgaagcaatctctacagaaatgggagggattccgaaagaggtggacacagatacaggagtggtgatatgacaaacgaccgggggagaatgaggagcagatcacgttctccaacaaggcatggctatggaagatctggaagtccaaatcattagctgaatatttagatagttttattcacagttgggactcatgagctctgttggaaccctacagtcttcctttttacatgagaaaaaaaaaattctcaggtaggtatcaattttcattcccacaatttttgtgtttctgatattctatgtattctgaagctttgtttcgatatttggaatcgaaagttaaactcgtaaggccggtactggacttcatgtatggatgatgatgtttacagaattacagtctatagcagttgcttatgcaaatgatggagaaggttaggccagaagattctttggtggtaattgggaactaagaccgtgttcagcacgcattagaaccagctaaacctgtcttcagtcgtgcttgtgctcctcagagcatcgccgccgtggccatatcgtgcctgcaccacacacgtgtttaggtgctgacggaggtgtgcgggtgcagtcggtggcctcttcagcctctaggtaacctcatacgaactgagatgactagaaggtgtaaatgttagtggaatttgattgcactgtgactgtaaggaatgaatcagatcagtctggggttggatttggactgtaatggaaccagttgagtgcagatcattggttaaaacgagcttagcgcacgacgcacacaaaatcatccatgtaagtccgttgcatggggag

SEQ ID NO: 68425 - DNA, 1786 bp, Zea Mays
cgcgccttatcttcgtctgttcctagattctactaggacgagcccaaatccaaatcgtcctgaggaaagggtaaagaaagtgaagcaaggggctgcctggcttagggtttcttgacggctccttgccctctccgccatggacgcgcagcgagccctccttgacgagctcatgggcacagctcgtaacctaacggaggaggagaagaaggggcacaaggagctgaagtgggacgatccggacgtgtgcggcccctacatggtccggttctgtccccacgaccttttcgtcaacaccaagagcaatctcgggccgtgcttgaggatccatgatccgaagctcaaggaaagctttgagaaatctcccaggcatgatacttatatgcaaaggtttgaggcagagcttgcacaacaatgtgagaaattggtaatggatttggatagaaagataagacgtggtcgagaaaggttggctcacgattctgctgtgccaatgccaatccctggaaaaatagctgagcagctttcagcgcgagaagaacaggtcaagaagctactggagcaaatcgaggagcttggtgaggctggtaaagtggatgaagctgaggcacttatgaaacgggttgacattctaaacgctgagaagacagctttatctaaccaagcagacagcaaagtggctatgcttgagaagaagatggagctttgcgaaacgtgtggatcattcttagttgctgatgatgctcttgagagaacccagtcccacgtgactgggaaacaacacattggatatggtatggttagagatttcctggtggaatacaaggcggcaatagagaagtcaaaagaggaagataggcttgcaagggagcagaaagcagaggagcgtcggaagcagagaggaaaagagtatgataatgggggcagggatagagataccagaagggagaagtctggggagcgtgactatgaccgtgatcgtcagtatgagcgaagccgtggaagagacaggtcttatgattacagagagagaggatcagagcaccgaagcaatctctacagaaatgggagggattccgaaagaggtggacacagatacaggagtggtgatatgacaaacgaccgggggagaatgaggagcagatcacgttctccaacaaggcatggctatggaagatctggaagtccaaatcattagctgaatatttagatagttttattcacagttgggactcatgagctctgttggaaccctacagtcttcctttttacatgagaaaaaaaaaattctcagttaaactcgtaaggccggtactggacttcatgtatggatgatgatgtttacagaattacagtctatagcagttgcttatgcaaatgatggagaaggttaggccagaagattctttggtggtaattgggaactaagaccgtgttcagcacgcattagaaccagctaaacctgtcttcagtcgtgcttgtgctcctcagagcatcgccgccgtggccatatcgtgcctgcaccacacacgtgtttaggtgctgacggaggtgtgcgggtgcagtcggtggcctcttcagcctctaggtaacctcatacgaactgagatgactagaaggtgtaaatgttagtggaatttgattgcactgtgactgtaaggaatgaatcagatcagtctggggttggatttggactgtaatggaaccagttgagtgcagatcattggttaaaacgagcttagcgcacgacgcacacaaaatcatccatgtaagtccgttgcatggggag

SEQ ID NO: 68426 - DNA, 2010 bp, Zea Mays
tatcttcgtctgttcctagattctactaggacgagcccaaatccaaatcgtcctgaggaaagggtaaagaaagtgaagcaaggggctgcctggcttagggtttcttgacggctccttgccctctccgccatggacgcgcagcgagccctccttgacgagctcatgggcacagctcgtaacctaacggaggaggagaagaaggggcacaaggagctgaagtgggacgatccggacgtgtgcggcccctacatggtccggttctgtccccacgaccttttcgtcaacaccaagagcaatctcgggccgtgcttgaggatccatgatccgaagctcaaggaaagctttgagaaatctcccaggcatgatacttatatgcaaaggtttgaggcagagcttgcacaacaatgtgagaaattggtaatggatttggatagaaagataagacgtggtcgagaaaggttggctcacgattctgctgtgccaatgccaatccctggaaaaatagctgagcagctttcagcgcgagaagaacaggtcaagaagctactggagcaaatcgaggagcttggtgaggctggtaaagtggatgaagctgaggcacttatgaaacggttttggtttacaggttgacattctaaacgctgagaagacagctttatctaaccaagcagacagcaaagtggctatgcttgagaagaagatggagctttgcgaaacgtgtggatcattcttagttgctgatgatgctcttgagagaacccagtcccacgtgactgggaaacaacacattggatatggtatggttagagatttcctggtggaatacaaggcggcaatagagaagtcaaaagaggaagataggcttgcaagggagcagaaagcagaggagcgtcggaagcagagaggaaaagagtatgataatgggggcagggatagagataccagaagggagaagtctggggagcgtgactatgaccgtgatcgtcagtatgagcgaagccgtggaagagacaggtcttatgattacagagagagaggatcagagcaccgaagcaatctctacagaaatgggagggattccgaaagaggtggacacagatacaggagtggtgatatgacaaacgaccgggggagaatgaggagcagatcacgttctccaacaaggcatggctatggaagatctggaagtccaaatcattagctgaatatttagatagttttattcacagttgggactcatgagctctgttggaaccctacagtcttcctttttacatgagaaaaaaaaaattctcagttaaactcgtaaggccggtactggacttcatgtatggatgatgatgtttacagaattacagtctatagcaggtaaaccttgaacatcaatgtttcgtgttacacatttttttatttcccttgacaactctgctagaaaccttagtcctgctctttggcttagattttttacactactcaggccaggtatcttttttttaccaaaatttatgtgcataaattatgagttatgtacctttaatagttgactagttatcaatttgtcatgaagtagtattgtgttcaggaagaacaatcagacaaaatgatccagtcattgacaaccatcaacaaattctttttctggaaccgttgtagtgtacaagagatcaagctttggttttgtacataatggtgccctggttagacctatttcctgactgtagttattggcttgaagtctagtttggggaaggttctgtttgccagctaccttgcagttgcggtatttgagcagatagtgtattctaactatgcaaactaatagatgacaggcttcggtgtttttgacatatttttatgttttggatcaattggcgtcatgatctcggtgggggcaatgtccactgatgttatgttgtttgcatgacattcctgcgcctttttacacttgacataacaacatgtttttccataattgagttgtgcgtgggtgacttcgacgagactgaggtc

SEQ ID NO: 68427 - DNA, 1772 bp, Zea Mays
tatcttcgtctgttcctagattctactaggacgagcccaaatccaaatcgtcctgaggaaagggtaaagaaagtgaagcaaggggctgcctggcttagggtttcttgacggctccttgccctctccgccatggacgcgcagcgagccctccttgacgagctcatgggcacagctcgtaacctaacggaggaggagaagaaggggcacaaggagctgaagtgggacgatccggacgtgtgcggcccctacatggtccggttctgtccccacgaccttttcgtcaacaccaagagcaatctcgggccgtgcttgaggatccatgatccgaagctcaaggaaagctttgagaaatctcccaggcatgatacttatatgcaaaggtttgaggcagagcttgcacaacaatgtaatggatttggatagaaagataagacgtggtcgagaaaggttggctcacgattctgctgtgccaatgccaatccctggaaaaatagctgagcagctttcagcgcgagaagaacaggtcaagaagctactggagcaaatcgaggagcttggtgaggctggtaaagtggatgaagctgaggcacttatgaaacgggttgacattctaaacgctgagaagacagctttatctaaccaagcagacagcaaagtggctatgcttgagaagaagatggagctttgcgaaacgtgtggatcattcttagttgctgatgatgctcttgagagaacccagtcccacgtgactgggaaacaacacattggatatggtatggttagagatttcctggtggaatacaaggcggcaatagagaagtcaaaagaggaagataggcttgcaagggagcagaaagcagaggagcgtcggaagcagagaggaaaagagtatgataatgggggcagggatagagataccagaagggagaagtctggggagcgtgactatgaccgtgatcgtcagtatgagcgaagccgtggaagagacaggtcttatgattacagagagagaggatcagagcaccgaagcaatctctacagaaatgggagggattccgaaagaggtggacacagatacaggagtggtgatatgacaaacgaccgggggagaatgaggagcagatcacgttctccaacaaggcatggctatggaagatctggaagtccaaatcattagctgaatatttagatagttttattcacagttgggactcatgagctctgttggaaccctacagtcttcctttttacatgagaaaaaaaaaattctcagttaaactcgtaaggccggtactggacttcatgtatggatgatgatgtttacagaattacagtctatagcaggaagaacaatcagacaaaatgatccagtcattgacaaccatcaacaaattctttttctggaaccgttgtagtgtacaagagatcaagctttggttttgtacataatggtgccctggttagacctatttcctgactgtagttattggcttgaagtctagtttggggaaggttctgtttgccagctaccttgcagttgcggtatttgagcagatagtgtattctaactatgcaaactaatagatgacaggcttcggtgtttttgacatatttttatgttttggatcaattggcgtcatgatctcggtgggggcaatgtccactgatgttatgttgtttgcatgacattcctgcgcctttttacacttgacataacaacatgtttttccataattgagttgtgcgtgggtgacttcgacgagactgaggtc

SEQ ID NO: 68428 - DNA, 1990 bp, Zea Mays
gccttatcttcgtctgttcctagattctactaggacgagcccaaatccaaatcgtcctgaggaaagggtaaagaaagtgaagcaaggggctgcctggcttagggtttcttgacggctccttgccctctccgccatggacgcgcagcgagccctccttgacgagctcatgggcacagctcgtaacctaacggaggaggagaagaaggggcacaaggagctgaagtgggacgatccggacgtgtgcggcccctacatggtccggttctgtccccacgaccttttcgtcaacaccaagagcaatctcgggccgtgcttgaggatccatgatccgaagctcaaggaaagctttgagaaatctcccaggcatgatacttatatgcaaaggtttgaggcagagcttgcacaacaatgtaatggatttggatagaaagataagacgtggtcgagaaaggttggctcacgattctgctgtgccaatgccaatccctggaaaaatagctgagcagctttcagcgcgagaagaacaggtcaagaagctactggagcaaatcgaggagcttggtgaggctggtaaagtggatgaagctgaggcacttatgaaacgggttgacattctaaacgctgagaagacagctttatctaaccaagcagacagcaaagtggctatgcttgagaagaagatggagctttgcgaaacgtgtggatcattcttagttgctgatgatgctcttgagagaacccagtcccacgtgactgggaaacaacacattggatatggtatggttagagatttcctggtggaatacaaggcggcaatagagaagtcaaaagaggaagataggcttgcaagggagcagaaagcagaggagcgtcggaagcagagaggaaaagagtatgataatgggggcagggatagagataccagaagggagaagtctggggagcgtgactatgaccgtgatcgtcagtatgagcgaagccgtggaagagacaggtcttatgattacagagagagaggatcagagcaccgaagcaatctctacagaaatgggagggattccgaaagaggtggacacagatacaggagtggtgatatgacaaacgaccgggggagaatgaggagcagatcacgttctccaacaaggcatggctatggaagatctggaagtccaaatcattagctgaatatttagatagttttattcacagttgggactcatgagctctgttggaaccctacagtcttcctttttacatgagaaaaaaaaaattctcagttaaactcgtaaggccggtactggacttcatgtatggatgatgatgtttacagaattacagtctatagcaggtaaaccttgaacatcaatgtttcgtgttacacatttttttatttcccttgacaactctgctagaaaccttagtcctgctctttggcttagattttttacactactcaggccaggtatcttttttttaccaaaatttatgtgcataaattatgagttatgtacctttaatagttgactagttatcaatttgtcatgaagtagtattgtgttcaggaagaacaatcagacaaaatgatccagtcattgacaaccatcaacaaattctttttctggaaccgttgtagtgtacaagagatcaagctttggttttgtacataatggtgccctggttagacctatttcctgactgtagttattggcttgaagtctagtttggggaaggttctgtttgccagctaccttgcagttgcggtatttgagcagatagtgtattctaactatgcaaactaatagatgacaggcttcggtgtttttgacatatttttatgttttggatcaattggcgtcatgatctcggtgggggcaatgtccactgatgttatgttgtttgcatgacattcctgcgcctttttacacttgacataacaacatgtttttccataattgagttgtgcgtgggtgacttcgacgagactgaggtc

SEQ ID NO: 68429 - DNA, 2001 bp, Zea Mays
gccttatcttcgtctgttcctagattctactaggacgagcccaaatccaaatcgtcctgaggaaagggtaaagaaagtgaagcaaggggctgcctggcttagggtttcttgacggctccttgccctctccgccatggacgcgcagcgagccctccttgacgagctcatgggcacagctcgtaacctaacggaggaggagaagaaggggcacaaggagctgaagtgggacgatccggacgtgtgcggcccctacatggtccggttctgtccccacgaccttttcgtcaacaccaagagcaatctcgggccgtgcttgaggatccatgatccgaagctcaaggaaagctttgagaaatctcccaggcatgatacttatatgcaaaggtttgaggcagagcttgcacaacaatgtgagaaattggtaatggatttggatagaaagataagacgtggtcgagaaaggttggctcacgattctgctgtgccaatgccaatccctggaaaaatagctgagcagctttcagcgcgagaagaacaggtcaagaagctactggagcaaatcgaggagcttggtgaggctggtaaagtggatgaagctgaggcacttatgaaacgggttgacattctaaacgctgagaagacagctttatctaaccaagcagacagcaaagtggctatgcttgagaagaagatggagctttgcgaaacgtgtggatcattcttagttgctgatgatgctcttgagagaacccagtcccacgtgactgggaaacaacacattggatatggtatggttagagatttcctggtggaatacaaggcggcaatagagaagtcaaaagaggaagataggcttgcaagggagcagaaagcagaggagcgtcggaagcagagaggaaaagagtatgataatgggggcagggatagagataccagaagggagaagtctggggagcgtgactatgaccgtgatcgtcagtatgagcgaagccgtggaagagacaggtcttatgattacagagagagaggatcagagcaccgaagcaatctctacagaaatgggagggattccgaaagaggtggacacagatacaggagtggtgatatgacaaacgaccgggggagaatgaggagcagatcacgttctccaacaaggcatggctatggaagatctggaagtccaaatcattagctgaatatttagatagttttattcacagttgggactcatgagctctgttggaaccctacagtcttcctttttacatgagaaaaaaaaaattctcagttaaactcgtaaggccggtactggacttcatgtatggatgatgatgtttacagaattacagtctatagcaggtaaaccttgaacatcaatgtttcgtgttacacatttttttatttcccttgacaactctgctagaaaccttagtcctgctctttggcttagattttttacactactcaggccaggtatcttttttttaccaaaatttatgtgcataaattatgagttatgtacctttaatagttgactagttatcaatttgtcatgaagtagtattgtgttcaggaagaacaatcagacaaaatgatccagtcattgacaaccatcaacaaattctttttctggaaccgttgtagtgtacaagagatcaagctttggttttgtacataatggtgccctggttagacctatttcctgactgtagttattggcttgaagtctagtttggggaaggttctgtttgccagctaccttgcagttgcggtatttgagcagatagtgtattctaactatgcaaactaatagatgacaggcttcggtgtttttgacatatttttatgttttggatcaattggcgtcatgatctcggtgggggcaatgtccactgatgttatgttgtttgcatgacattcctgcgcctttttacacttgacataacaacatgtttttccataattgagttgtgcgtgggtgacttcgacgagactgaggtc

SEQ ID NO: 68430 - DNA, 1787 bp, Zea Mays
gccttatcttcgtctgttcctagattctactaggacgagcccaaatccaaatcgtcctgaggaaagggtaaagaaagtgaagcaaggggctgcctggcttagggtttcttgacggctccttgccctctccgccatggacgcgcagcgagccctccttgacgagctcatgggcacagctcgtaacctaacggaggaggagaagaaggggcacaaggagctgaagtgggacgatccggacgtgtgcggcccctacatggtccggttctgtccccacgaccttttcgtcaacaccaagagcaatctcgggccgtgcttgaggatccatgatccgaagctcaaggaaagctttgagaaatctcccaggcatgatacttatatgcaaaggtttgaggcagagcttgcacaacaatgtgagaaattggtaatggatttggatagaaagataagacgtggtcgagaaaggttggctcacgattctgctgtgccaatgccaatccctggaaaaatagctgagcagctttcagcgcgagaagaacaggtcaagaagctactggagcaaatcgaggagcttggtgaggctggtaaagtggatgaagctgaggcacttatgaaacgggttgacattctaaacgctgagaagacagctttatctaaccaagcagacagcaaagtggctatgcttgagaagaagatggagctttgcgaaacgtgtggatcattcttagttgctgatgatgctcttgagagaacccagtcccacgtgactgggaaacaacacattggatatggtatggttagagatttcctggtggaatacaaggcggcaatagagaagtcaaaagaggaagataggcttgcaagggagcagaaagcagaggagcgtcggaagcagagaggaaaagagtatgataatgggggcagggatagagataccagaagggagaagtctggggagcgtgactatgaccgtgatcgtcagtatgagcgaagccgtggaagagacaggtcttatgattacagagagagaggatcagagcaccgaagcaatctctacagaaatgggagggattccgaaagaggtggacacagatacaggagtggtgatatgacaaacgaccgggggagaatgaggagcagatcacgttctccaacaaggcatggctatggaagatctggaagtccaaatcattagctgaatatttagatagttttattcacagttgggactcatgagctctgttggaaccctacagtcttcctttttacatgagaaaaaaaaaattctcagttaaactcgtaaggccggtactggacttcatgtatggatgatgatgtttacagaattacagtctatagcaggaagaacaatcagacaaaatgatccagtcattgacaaccatcaacaaattctttttctggaaccgttgtagtgtacaagagatcaagctttggttttgtacataatggtgccctggttagacctatttcctgactgtagttattggcttgaagtctagtttggggaaggttctgtttgccagctaccttgcagttgcggtatttgagcagatagtgtattctaactatgcaaactaatagatgacaggcttcggtgtttttgacatatttttatgttttggatcaattggcgtcatgatctcggtgggggcaatgtccactgatgttatgttgtttgcatgacattcctgcgcctttttacacttgacataacaacatgtttttccataattgagttgtgcgtgggtgacttcgacgagactgaggtc

SEQ ID NO: 68431 - DNA, 1716 bp, Zea Mays
gccttatcttcgtctgttcctagattctactaggacgagcccaaatccaaatcgtcctgaggaaagggtaaagaaagtgaagcaaggggctgcctggcttagggtttcttgacggctccttgccctctccgccatggacgcgcagcgagccctccttgacgagctcatgggcacagctcgtaacctaacggaggaggagaagaaggggcacaaggagctgaagtgggacgatccggacgtgtgcggcccctacatggtccggttctgtccccacgaccttttcgtcaacaccaagagcaatctcgggccgtgcttgaggatccatgatccgaagctcaaggaaagctttgagaaatctcccaggcatgatacttatatgcaaaggtttgaggcagagcttgcacaacaatgtgagaaattggtaatggatttggatagaaagataagacgtggtcgagaaaggttggctcacgattctgctgtgccaatgccaatccctggaaaaatagctgagcagctttcagcgcgagaagaacaggtcaagaagctactggagcaaatcgaggagcttggtgaggctggtaaagtggatgaagctgaggcacttatgaaacgggttgacattctaaacgctgagaagacagctttatctaaccaagcagacagcaaagtggctatgcttgagaagaagatggagctttgcgaaacgtgtggatcattcttagttgctgatgatgctcttgagagaacccagtcccacgtgactgggaaacaacacattggatatggtatggttagagatttcctggtggaatacaaggcggcaatagagaagtcaaaagaggaagataggcttgcaagggagcagaaagcagaggagcgtcggaagcagagaggaaaagagtatgataatgggggcagggatagagataccagaagggagaagtctggggagcgtgactatgaccgtgatcgtcagtatgagcgaagccgtggaagagacaggtcttatgattacagagagagaggatcagagcaccgaagcaatctctacagaaatgggagggattccgaaagaggtggacacagatacaggagtggtgatatgacaaacgaccgggggagaatgaggagcagatcacgttctccaacaaggcatggctatggaagatctggaagtccaaatcattagctgaatatttagatagttttattcacagttgggactcatgagctctgttggaaccctacagtcttcctttttacatgagaaaaaaaaaattctcagttaaactcgtaaggccggtactggacttcatgtatggatgatgatgtttacagaattacagtctatagcagtgtacaagagatcaagctttggttttgtacataatggtgccctggttagacctatttcctgactgtagttattggcttgaagtctagtttggggaaggttctgtttgccagctaccttgcagttgcggtatttgagcagatagtgtattctaactatgcaaactaatagatgacaggcttcggtgtttttgacatatttttatgttttggatcaattggcgtcatgatctcggtgggggcaatgtccactgatgttatgttgtttgcatgacattcctgcgcctttttacacttgacataacaacatgtttttccataattgagttgtgcgtgggtgacttcgacgagactgaggtc

SEQ ID NO: 68432 - DNA, 1139 bp, Zea Mays
atttaaatcaatgtacacagaatagaaatgtagccaacgtaaacaaacccaccacaggcagctgactgggggaggtcgctagcctaaaccacgaactcatcgaagtcctggaactcctggagatccgcctcgacgctttcttctttacctgagcatatattgcaccaaaggcaacctagtgttttgtgaaagcaagggtgggtacacatcaacgtactcagcaaatgtcccgtttggctaaggtggactagctttatgtggggttaaggtcaagcagttgcttttagttggtcaggtatttattattagtggaagccaagttttagtaatagccaacccgtgaaccatttcctcatcgaggaaaaacattatcatcatcgagccaaaaccataaatagaacaattgtatctcagatcatctgcatctctaatctccattgaccactacctaggtggcctagcagggtatcactatgtagcctttacaaagactcctctggtgcatagctgctcgttaggtttcgctagtcgtacaaacgcagtacacctccccaaggtgggtgactaacaaaaccaaatcgaataaacctctgcaccccccttggtagagcgagcactacgcctcggcccccattgacggccctctgtcaaagccaactatacccccagtttcatataattaatcagctaagggcgtctcattccaccttcatggttgcactgttatctcgggttgtcactccccgaataggtccttacggagaggtactcaggaaaaatggcctgagtcccctaaagtgtcacaagaacatcatcataatcataataacagtatcgtatcataaatattcacatcatgttcattgattaaagtagagcaatagcatgaagctaaccataataacccaaaaggtaatcaaggacaaggtaaatagaaactagtcactccttaggtttcaattaagtaatacaggacaatgaattataagtagataggacataatgggtcagaggacacttgccttcaccaaacagatgctcagggtcttcaatctcgtggaactcgaagaactggatcacttggtcgccaacgcttgatctttgatccctccaagctcgaaaacggatcgcaatctatt

SEQ ID NO: 68433 - DNA, 2797 bp, Zea Mays
ttttctttccagtgcatgtgcaaagtgaaatcagaagacatgaaaatattataggccttaggagaggcggtgtccgccaaacttgacatggagaatcaataaaaagggactcgaaaggatggaatatacccagagaattgtcttcgacaaaaaatgcaaggaaaacagctatccaagtaccaacatggcgtccacccaatttcaatttgacactgggcgtaatgaaccatttgtatgatgtgatgtatgaatttagtttctcccttccccctgattatgcgttggtgataagagctcttggttctctagaagggactgcaaaagcactggatcctgagtttaaagttattgagagtgcatatccttttgtaattgggagactccttgcagaccccagccctgatatgaggaaaatattgcgggagcttcttatatgtgacgatggatccatcagatggaatcgactggaaaggctggtacatgcttaattattgttccttatcttgttatctcattgttatcacgattttttaccaaaatcatatgatgaaattaccaaaatcagtcttttaaataacaagaacatgctagggagttttgtttgtcatgatatacactcctgatttctctgttcgtatgtgtggaaacagtttcatggacctatcctttctgtgaacatgattactaatttgtggtagccctcttgacacatagaaccactaaggtaagattgaagggagtatccagcctatagatgtggaattattaacaacttttactgttgaccatctatttttttgggatcctgtattttgtttgggctgtatgatctgagctagctcagtttgtgggaatactcacaccactcaggttcgagttgtatttggcttgaatatgatcaacctgcaggggggtaagacaactccgggcattgcattaagaagaacttctcacacagagaggattttcctaaccctagactgaatatcctttcttgtgggagtcaaactcaggtcctgcagaggctatcaagtcacataaccatctcagctagagtccctttcacttatctgtttcttcttacttacaacatgacatggttccttctacttcggtcgactttttaaatatatattctgtgcaagtactgcagtgttgctcaaagaaaaatttgggttggtccagttctggtagtggtacctatgatctaagagccacttcataaactacagctatttgttctcctgttaacaccaatcaacgagttttcacaaccctgatggtagtgctgattggtcccaccccttagacagacaagtatgcatcaaccatcctgggtgtcctcatcacatccaggttgtctggaaggacagatgtaatcatgttgccatttaaaagggtgctaaagctgtagttttgtgttactatggtgcaatagttgcagttccttgaaactggtcctaggagttgaagtttgagttaggcacacaaaattgtattctgtgaaataatatggtgttaggatcgtaattgcaattttttaatcgtagtttattgagttaggcacacaaaattgtattctgtaaaataatatgatgataggattgtaattgcaatttttaatgttttaagcttcaaatatgcaacagaggagaaatttcgataatctgaaaattttaatgcaacaaattgggttatctttgctggaaatgggtcatggtctctatcctgttgttggttctaattcttgtgttgggtttgggtagtaacttagtgtgatgagaaattttacagatatttgttttttatttgttcctactaacaacatttggtttttagattgcagctatatctgaacagtcatcagaatcttcaagcgcatcaggagctgactccagtgagaacgccaatggaagtcctgagtggagatcatttgatatgcattctgtgattgcagctacagaagacctatttgatttcattttatcgaggaaaggatggcgggttcgggttttccttgtccaggacatcgttaatgcttcagacgtgttccttcaagaagcgacattcccatatgtatatgcgaaagtgggaaagataggggacctaaatccagagagaagtaagatgatcaggaggctggtgaatactgtgcaatcgttccgccaagctatcaatttggctccagatgcttggagcgccatgctaatccgcactttgttgaaacctgaatcacaaaaatttgttcttgatgtgtttttggccctggctaaccattccagttacaagattccagaaacattctggctatttatgtcaagatttctaaattacttggacaaacaagatatactttaggaacggttaatatatcaattcctttttttttgttatggcttgaatttatttattttagatcggtcgccactggccaatgttgacttaaaaagctgttgctgctgttctccggctggtgctgattccaaaattcatatttttttgtcctgtgataagtgcttttcttttatcatttacagatgatagcatttcctatctatgtagttttagaatgtgcttaatatttgggtaggtggattgcagccctggggaaactctattttattttttcaatattaaaagttgtcttgctttgcattgagatgactggccttttaccatttataacacacacgataaggggttttagtgattaatgacgacactattattgtgattaatacgttttgaaaaagtaacagagacaatttgatttaggtcgtagcaatggtgatttttt

SEQ ID NO: 68434 - DNA, 1390 bp, Zea Mays
ttcagcttaacaagctaagcattttttgcttgtacattatgttaatcgggactccttaggcttggcgaatgacttccattcactaggatttgttcctgagggaacagatttacttgcagttgcagatgcgttgcggttttcctttggtgatgtcaggaggcaatcaaatgatttccagggcgtaatgaaccatttgtatgatgtgatgtatgaatttagtttctcccttccccctgattatgcgttggtgataagagctcttggttctctagaagggactgcaaaagcactggatcctgagtttaaagttattgagagtgcatatccttttgtaattgggagactccttgcagaccccagccctgatatgaggaaaatattgcgggagcttcttatatgtgacgatggatccatcagatggaatcgactggaaaggctgctatatctgaacagtcatcagaatcttcaagcgcatcaggagctgactccagtgagaacgccaatggaagtcctgagtggagatcatttgatatgcattctgtgattgcagctacagaagacctatttgatttcattttatcgaggaaaggatggcgggttcgggttttccttgtccaggacatcgttaatgcttcagacgtgttccttcaagaagcgacattcccatatgtatatgcgaaagtgggaaagataggggacctaaatccagagagaagtaagatgatcaggaggctggtgaatactgtgcaatcgttccgccaagctatcaatttggctccagatgcttggagcgccatgctaatccgcactttgttgaaacctgaatcacaaaaatttgttcttgatgtgtttttggccctggctaaccattccagttacaagattccagaaacattctggctatttatgtcaagatttctaaattacttggacaaacaagatatactttaggaacggttaatatatcaattcctttttttttgttatggcttgaatttatttattttagatcggtcgccactggccaatgttgacttaaaaagctgttgctgctgttctccggctggtgctgattccaaaattcatatttttttgtcctgtgataagtgcttttcttttatcatttacagatgatagcatttcctatctatgtagttttagaatgtgcttaatatttgggtaggtggattgcagccctggggaaactctattttattttttcaatattaaaagttgtcttgctttgcattgagatgactggccttttaccatttataacacacacgataaggggttttagtgattaatgacgacactattattgtgattaatacgttttgaaaaagtaacagagacaatttgatttaggtcgtagcaatggtgatttttt

SEQ ID NO: 68435 - DNA, 2765 bp, Zea Mays
gtttggatcgtccgtggtggaaaatggcttaactatttttgtacgtttcagcttaacaagctaagcattttttgcttgtacattatgttaatcgggactccttaggcttggcgaatgacttccattcactaggatttgttcctgagggaacagatttacttgcagttgcagatgcgttgcggttttcctttggtgatgtcaggaggcaatcaaatgatttccagtttctcccttccccctgattatgcgttggtgataagagctcttggttctctagaagggactgcaaaagcactggatcctgagtttaaagttattgagagtgcatatccttttgtaattgggagactccttgcagaccccagccctgatatgaggaaaatattgcgggagcttcttatatgtgacgatggatccatcagatggaatcgactggaaaggctggtacatgcttaattattgttccttatcttgttatctcattgttatcacgattttttaccaaaatcatatgatgaaattaccaaaatcagtcttttaaataacaagaacatgctagggagttttgtttgtcatgatatacactcctgatttctctgttcgtatgtgtggaaacagtttcatggacctatcctttctgtgaacatgattactaatttgtggtagccctcttgacacatagaaccactaaggtaagattgaagggagtatccagcctatagatgtggaattattaacaacttttactgttgaccatctatttttttgggatcctgtattttgtttgggctgtatgatctgagctagctcagtttgtgggaatactcacaccactcaggttcgagttgtatttggcttgaatatgatcaacctgcaggggggtaagacaactccgggcattgcattaagaagaacttctcacacagagaggattttcctaaccctagactgaatatcctttcttgtgggagtcaaactcaggtcctgcagaggctatcaagtcacataaccatctcagctagagtccctttcacttatctgtttcttcttacttacaacatgacatggttccttctacttcggtcgactttttaaatatatattctgtgcaagtactgcagtgttgctcaaagaaaaatttgggttggtccagttctggtagtggtacctatgatctaagagccacttcataaactacagctatttgttctcctgttaacaccaatcaacgagttttcacaaccctgatggtagtgctgattggtcccaccccttagacagacaagtatgcatcaaccatcctgggtgtcctcatcacatccaggttgtctggaaggacagatgtaatcatgttgccatttaaaagggtgctaaagctgtagttttgtgttactatggtgcaatagttgcagttccttgaaactggtcctaggagttgaagtttgagttaggcacacaaaattgtattctgtgaaataatatggtgttaggatcgtaattgcaattttttaatcgtagtttattgagttaggcacacaaaattgtattctgtaaaataatatgatgataggattgtaattgcaatttttaatgttttaagcttcaaatatgcaacagaggagaaatttcgataatctgaaaattttaatgcaacaaattgggttatctttgctggaaatgggtcatggtctctatcctgttgttggttctaattcttgtgttgggtttgggtagtaacttagtgtgatgagaaattttacagatatttgttttttatttgttcctactaacaacatttggtttttagattgcagctatatctgaacagtcatcagaatcttcaagcgcatcaggagctgactccagtgagaacgccaatggaagtcctgagtggagatcatttgatatgcattctgtgattgcagctacagaagacctatttgatttcattttatcgaggaaaggatggcgggttcgggttttccttgtccaggacatcgttaatgcttcagacgtgttccttcaagaagcgacattcccatatgtatatgcgaaagtgggaaagataggggacctaaatccagagagaagtaagatgatcaggaggctggtgaatactgtgcaatcgttccgccaagctatcaatttggctccagatgcttggagcgccatgctaatccgcactttgttgaaacctgaatcacaaaaatttgttcttgatgtgtttttggccctggctaaccattccagttacaagattccagaaacattctggctatttatgtcaagatttctaaattacttggacaaacaagatatactttaggaacggttaatatatcaattcctttttttttgttatggcttgaatttatttattttagatcggtcgccactggccaatgttgacttaaaaagctgttgctgctgttctccggctggtgctgattccaaaattcatatttttttgtcctgtgataagtgcttttcttttatcatttacagatgatagcatttcctatctatgtagttttagaatgtgcttaatatttgggtaggtggattgcagccctggggaaactctattttattttttcaatattaaaagttgtcttgctttgcattgagatgactggccttttaccatttataacacacacgataaggggttttagtgattaatgacgacactattattgtgattaatacgttttgaaaaagtaacagagacaatttgatttaggtcgtagcaatggtgatttttt

SEQ ID NO: 68436 - DNA, 3005 bp, Zea Mays
ctcatgagtcttacgaagactgttgtttttcattctattgtaggaacttgaaaggtcagaatggtttatacttagacattgtgctgctaaatcatttgactactgtaccctctgtgttctgtacaatttgggcaccttttagcttggtcttttttttgtttgtttaactattctaatttcgttgttgatgagtaatgaagtttggatcgtccgtggtggaaaatggcttaactatttttgtacgtttcagcttaacaagctaagcattttttgcttgtacattatgttaatcgggactccttaggcttggcgaatgacttccattcactaggatttgttcctgagggaacagatttacttgcagttgcagatgcgttgcggttttcctttggtgatgtcaggaggcaatcaaatgatttccagggcgtaatgaaccatttgtatgatgtgatgtatgaatttagtttctcccttccccctgattatgcgttggtgataagagctcttggttctctagaagggactgcaaaagcactggatcctgagtttaaagttattgagagtgcatatccttttgtaattgggagactccttgcagaccccagccctgatatgaggaaaatattgcgggagcttcttatatgtgacgatggatccatcagatggaatcgactggaaaggctggtacatgcttaattattgttccttatcttgttatctcattgttatcacgattttttaccaaaatcatatgatgaaattaccaaaatcagtcttttaaataacaagaacatgctagggagttttgtttgtcatgatatacactcctgatttctctgttcgtatgtgtggaaacagtttcatggacctatcctttctgtgaacatgattactaatttgtggtagccctcttgacacatagaaccactaaggtaagattgaagggagtatccagcctatagatgtggaattattaacaacttttactgttgaccatctatttttttgggatcctgtattttgtttgggctgtatgatctgagctagctcagtttgtgggaatactcacaccactcaggttcgagttgtatttggcttgaatatgatcaacctgcaggggggtaagacaactccgggcattgcattaagaagaacttctcacacagagaggattttcctaaccctagactgaatatcctttcttgtgggagtcaaactcaggtcctgcagaggctatcaagtcacataaccatctcagctagagtccctttcacttatctgtttcttcttacttacaacatgacatggttccttctacttcggtcgactttttaaatatatattctgtgcaagtactgcagtgttgctcaaagaaaaatttgggttggtccagttctggtagtggtacctatgatctaagagccacttcataaactacagctatttgttctcctgttaacaccaatcaacgagttttcacaaccctgatggtagtgctgattggtcccaccccttagacagacaagtatgcatcaaccatcctgggtgtcctcatcacatccaggttgtctggaaggacagatgtaatcatgttgccatttaaaagggtgctaaagctgtagttttgtgttactatggtgcaatagttgcagttccttgaaactggtcctaggagttgaagtttgagttaggcacacaaaattgtattctgtgaaataatatggtgttaggatcgtaattgcaattttttaatcgtagtttattgagttaggcacacaaaattgtattctgtaaaataatatgatgataggattgtaattgcaatttttaatgttttaagcttcaaatatgcaacagaggagaaatttcgataatctgaaaattttaatgcaacaaattgggttatctttgctggaaatgggtcatggtctctatcctgttgttggttctaattcttgtgttgggtttgggtagtaacttagtgtgatgagaaattttacagatatttgttttttatttgttcctactaacaacatttggtttttagattgcagctatatctgaacagtcatcagaatcttcaagcgcatcaggagctgactccagtgagaacgccaatggaagtcctgagtggagatcatttgatatgcattctgtgattgcagctacagaagacctatttgatttcattttatcgaggaaaggatggcgggttcgggttttccttgtccaggacatcgttaatgcttcagacgtgttccttcaagaagcgacattcccatatgtatatgcgaaagtgggaaagataggggacctaaatccagagagaagtaagatgatcaggaggctggtgaatactgtgcaatcgttccgccaagctatcaatttggctccagatgcttggagcgccatgctaatccgcactttgttgaaacctgaatcacaaaaatttgttcttgatgtgtttttggccctggctaaccattccagttacaagattccagaaacattctggctatttatgtcaagatttctaaattacttggacaaacaagatatactttaggaacggttaatatatcaattcctttttttttgttatggcttgaatttatttattttagatcggtcgccactggccaatgttgacttaaaaagctgttgctgctgttctccggctggtgctgattccaaaattcatatttttttgtcctgtgataagtgcttttcttttatcatttacagatgatagcatttcctatctatgtagttttagaatgtgcttaatatttgggtaggtggattgcagccctggggaaactctattttattttttcaatattaaaagttgtcttgctttgcattgagatgactggccttttaccatttataacacacacgataaggggttttagtgattaatgacgacactattattgtgattaatacgttttgaaaaagtaacagagacaatttgatttaggtcgtagcaatggtgatttttt

SEQ ID NO: 68437 - DNA, 2935 bp, Zea Mays
tccattcaactcatgagtcttacgaagactgttgtttttcattctattgtaggaacttgaaaggtcagaatggtttatacttagacattgtgctgctaaatcatttgactactgtaccctctgtgttctgtacaatttgggcaccttttagcttggtcttttttttgtttgtttaactattctaatttcgttgttgatgagtaatgaagtttggatcgtccgtggtggaaaatggcttaactatttttgtacgtttcagcttaacaagctaagcattttttgatttacttgcagttgcagatgcgttgcggttttcctttggtgatgtcaggaggcaatcaaatgatttccagggcgtaatgaaccatttgtatgatgtgatgtatgaatttagtttctcccttccccctgattatgcgttggtgataagagctcttggttctctagaagggactgcaaaagcactggatcctgagtttaaagttattgagagtgcatatccttttgtaattgggagactccttgcagaccccagccctgatatgaggaaaatattgcgggagcttcttatatgtgacgatggatccatcagatggaatcgactggaaaggctggtacatgcttaattattgttccttatcttgttatctcattgttatcacgattttttaccaaaatcatatgatgaaattaccaaaatcagtcttttaaataacaagaacatgctagggagttttgtttgtcatgatatacactcctgatttctctgttcgtatgtgtggaaacagtttcatggacctatcctttctgtgaacatgattactaatttgtggtagccctcttgacacatagaaccactaaggtaagattgaagggagtatccagcctatagatgtggaattattaacaacttttactgttgaccatctatttttttgggatcctgtattttgtttgggctgtatgatctgagctagctcagtttgtgggaatactcacaccactcaggttcgagttgtatttggcttgaatatgatcaacctgcaggggggtaagacaactccgggcattgcattaagaagaacttctcacacagagaggattttcctaaccctagactgaatatcctttcttgtgggagtcaaactcaggtcctgcagaggctatcaagtcacataaccatctcagctagagtccctttcacttatctgtttcttcttacttacaacatgacatggttccttctacttcggtcgactttttaaatatatattctgtgcaagtactgcagtgttgctcaaagaaaaatttgggttggtccagttctggtagtggtacctatgatctaagagccacttcataaactacagctatttgttctcctgttaacaccaatcaacgagttttcacaaccctgatggtagtgctgattggtcccaccccttagacagacaagtatgcatcaaccatcctgggtgtcctcatcacatccaggttgtctggaaggacagatgtaatcatgttgccatttaaaagggtgctaaagctgtagttttgtgttactatggtgcaatagttgcagttccttgaaactggtcctaggagttgaagtttgagttaggcacacaaaattgtattctgtgaaataatatggtgttaggatcgtaattgcaattttttaatcgtagtttattgagttaggcacacaaaattgtattctgtaaaataatatgatgataggattgtaattgcaatttttaatgttttaagcttcaaatatgcaacagaggagaaatttcgataatctgaaaattttaatgcaacaaattgggttatctttgctggaaatgggtcatggtctctatcctgttgttggttctaattcttgtgttgggtttgggtagtaacttagtgtgatgagaaattttacagatatttgttttttatttgttcctactaacaacatttggtttttagattgcagctatatctgaacagtcatcagaatcttcaagcgcatcaggagctgactccagtgagaacgccaatggaagtcctgagtggagatcatttgatatgcattctgtgattgcagctacagaagacctatttgatttcattttatcgaggaaaggatggcgggttcgggttttccttgtccaggacatcgttaatgcttcagacgtgttccttcaagaagcgacattcccatatgtatatgcgaaagtgggaaagataggggacctaaatccagagagaagtaagatgatcaggaggctggtgaatactgtgcaatcgttccgccaagctatcaatttggctccagatgcttggagcgccatgctaatccgcactttgttgaaacctgaatcacaaaaatttgttcttgatgtgtttttggccctggctaaccattccagttacaagattccagaaacattctggctatttatgtcaagatttctaaattacttggacaaacaagatatactttaggaacggttaatatatcaattcctttttttttgttatggcttgaatttatttattttagatcggtcgccactggccaatgttgacttaaaaagctgttgctgctgttctccggctggtgctgattccaaaattcatatttttttgtcctgtgataagtgcttttcttttatcatttacagatgatagcatttcctatctatgtagttttagaatgtgcttaatatttgggtaggtggattgcagccctggggaaactctattttattttttcaatattaaaagttgtcttgctttgcattgagatgactggccttttaccatttataacacacacgataaggggttttagtgattaatgacgacactattattgtgattaatacgttttgaaaaagtaacagagacaatttgatttaggtcgtagcaatggtgatttttt

SEQ ID NO: 68438 - DNA, 1691 bp, Zea Mays
cttgaatgtaaattacatttcaacattaggcctgtcctttgtctcttgtgtgattctaatgtagggccatatatttcacccttaaaagatcattagcttgaatttttggctagaacataagtgtagccatctctatgagatgtgctttactgtgtttaggggtctctattgctcattgcgacaactgcttgaagaagggtttttccatgcagacccccatcctggtaatctagttgcaactgaaggtggatctctagcatattttgactttggtatgatgggagatattccgaggcactatcgtgtggggcttatacaaatgcttgtacattatgttaatcgggactccttaggcttggcgaatgacttccattcactaggatttgttcctgagggaacagatttacttgcagttgcagatgcgttgcggttttcctttggtgatgtcaggaggcaatcaaatgatttccagggcgtaatgaaccatttgtatgatgtgatgtatgaatttagtttctcccttccccctgattatgcgttggtgataagagctcttggttctctagaagggactgcaaaagcactggatcctgagtttaaagttattgagagtgcatatccttttgtaattgggagactccttgcagaccccagccctgatatgaggaaaatattgcgggagcttcttatatgtgacgatggatccatcagatggaatcgactggaaaggctgattgcagctatatctgaacagtcatcagaatcttcaagcgcatcaggagctgactccagtgagaacgccaatggaagtcctgagtggagatcatttgatatgcattctgtgattgcagctacagaagacctatttgatttcattttatcgaggaaaggatggcgggttcgggttttccttgtccaggacatcgttaatgcttcagacgtgttccttcaagaagcgacattcccatatgtatatgcgaaagtgggaaagataggggacctaaatccagagagaagtaagatgatcaggaggctggtgaatactgtgcaatcgttccgccaagctatcaatttggctccagatgcttggagcgccatgctaatccgcactttgttgaaacctgaatcacaaaaatttgttcttgatgtgtttttggccctggctaaccattccagttacaagattccagaaacattctggctatttatgtcaagatttctaaattacttggacaaacaagatatactttaggaacggttaatatatcaattcctttttttttgttatggcttgaatttatttattttagatcggtcgccactggccaatgttgacttaaaaagctgttgctgctgttctccggctggtgctgattccaaaattcatatttttttgtcctgtgataagtgcttttcttttatcatttacagatgatagcatttcctatctatgtagttttagaatgtgcttaatatttgggtaggtggattgcagccctggggaaactctattttattttttcaatattaaaagttgtcttgctttgcattgagatgactggccttttaccatttataacacacacgataaggggttttagtgattaatgacgacactattattgtgattaatacgttttgaaaaagtaacagagacaatttgatttaggtcgtagcaatggtgatttttt

SEQ ID NO: 68439 - DNA, 1801 bp, Zea Mays
cagacttgttgatgtcagacacatgtttgacgagattgattatattttagaaggaaaaaatgctgaaaggtttgctactctttattcacatgttgattttctggcaggttcaagtggggtcaattctgaagctagtacaagtatcaaggtcccaaaagtttactggaactatacatgtaaaaccatattgacactggaatggattgatggaattaagctaactgatgctgagcgcatcagcaaagccaatttgaacaggaaaagaatgatagatgagggtctctattgctcattgcgacaactgcttgaagaagggtttttccatgcagacccccatcctggtaatctagttgcaactgaaggtggatctctagcatattttgactttggtatgatgggagatattccgaggcactatcgtgtggggcttatacaaatgcttgtacattatgttaatcgggactccttaggcttggcgaatgacttccattcactaggatttgttcctgagggaacagatttacttgcagttgcagatgcgttgcggttttcctttggtgatgtcaggaggcaatcaaatgatttccagggcgtaatgaaccatttgtatgatgtgatgtatgaatttagtttctcccttccccctgattatgcgttggtgataagagctcttggttctctagaagggactgcaaaagcactggatcctgagtttaaagttattgagagtgcatatccttttgtaattgggagactccttgcagaccccagccctgatatgaggaaaatattgcgggagcttcttatatgtgacgatggatccatcagatggaatcgactggaaaggctgctatatctgaacagtcatcagaatcttcaagcgcatcaggagctgactccagtgagaacgccaatggaagtcctgagtggagatcatttgatatgcattctgtgattgcagctacagaagacctatttgatttcattttatcgaggaaaggatggcgggttcgggttttccttgtccaggacatcgttaatgcttcagacgtgttccttcaagaagcgacattcccatatgtatatgcgaaagtgggaaagataggggacctaaatccagagagaagtaagatgatcaggaggctggtgaatactgtgcaatcgttccgccaagctatcaatttggctccagatgcttggagcgccatgctaatccgcactttgttgaaacctgaatcacaaaaatttgttcttgatgtgtttttggccctggctaaccattccagttacaagattccagaaacattctggctatttatgtcaagatttctaaattacttggacaaacaagatatactttaggaacggttaatatatcaattcctttttttttgttatggcttgaatttatttattttagatcggtcgccactggccaatgttgacttaaaaagctgttgctgctgttctccggctggtgctgattccaaaattcatatttttttgtcctgtgataagtgcttttcttttatcatttacagatgatagcatttcctatctatgtagttttagaatgtgcttaatatttgggtaggtggattgcagccctggggaaactctattttattttttcaatattaaaagttgtcttgctttgcattgagatgactggccttttaccatttataacacacacgataaggggttttagtgattaatgacgacactattattgtgattaatacgttttgaaaaagtaacagagacaatttgatttaggtcgtagcaatggtgatttttt

SEQ ID NO: 68440 - DNA, 3069 bp, Zea Mays
gaaccagacttgttgatgtcagacacatgtttgacgagattgattatattttagaaggaaaaaatgctgaaaggtttgctactctttattcacatggttcaagtggggtcaattctgaagctagtacaagtatcaaggtcccaaaagtttactggaactatacatgtaaaaccatattgacactggaatggattgatggaattaagctaactgatgctgagcgcatcagcaaagccaatttgaacaggaaaagaatgatagatgagggtctctattgctcattgcgacaactgcttgaagaagggtttttccatgcagacccccatcctggtaatctagttgcaactgaaggtggatctctagcatattttgactttggtatgatgggagatattccgaggcactatcgtgtggggcttatacaaatgttgcagatgcgttgcggttttcctttggtgatgtcaggaggcaatcaaatgatttccagggcgtaatgaaccatttgtatgatgtgatgtatgaatttagtttctcccttccccctgattatgcgttggtgataagagctcttggttctctagaagggactgcaaaagcactggatcctgagtttaaagttattgagagtgcatatccttttgtaattgggagactccttgcagaccccagccctgatatgaggaaaatattgcgggagcttcttatatgtgacgatggatccatcagatggaatcgactggaaaggctggtacatgcttaattattgttccttatcttgttatctcattgttatcacgattttttaccaaaatcatatgatgaaattaccaaaatcagtcttttaaataacaagaacatgctagggagttttgtttgtcatgatatacactcctgatttctctgttcgtatgtgtggaaacagtttcatggacctatcctttctgtgaacatgattactaatttgtggtagccctcttgacacatagaaccactaaggtaagattgaagggagtatccagcctatagatgtggaattattaacaacttttactgttgaccatctatttttttgggatcctgtattttgtttgggctgtatgatctgagctagctcagtttgtgggaatactcacaccactcaggttcgagttgtatttggcttgaatatgatcaacctgcaggggggtaagacaactccgggcattgcattaagaagaacttctcacacagagaggattttcctaaccctagactgaatatcctttcttgtgggagtcaaactcaggtcctgcagaggctatcaagtcacataaccatctcagctagagtccctttcacttatctgtttcttcttacttacaacatgacatggttccttctacttcggtcgactttttaaatatatattctgtgcaagtactgcagtgttgctcaaagaaaaatttgggttggtccagttctggtagtggtacctatgatctaagagccacttcataaactacagctatttgttctcctgttaacaccaatcaacgagttttcacaaccctgatggtagtgctgattggtcccaccccttagacagacaagtatgcatcaaccatcctgggtgtcctcatcacatccaggttgtctggaaggacagatgtaatcatgttgccatttaaaagggtgctaaagctgtagttttgtgttactatggtgcaatagttgcagttccttgaaactggtcctaggagttgaagtttgagttaggcacacaaaattgtattctgtgaaataatatggtgttaggatcgtaattgcaattttttaatcgtagtttattgagttaggcacacaaaattgtattctgtaaaataatatgatgataggattgtaattgcaatttttaatgttttaagcttcaaatatgcaacagaggagaaatttcgataatctgaaaattttaatgcaacaaattgggttatctttgctggaaatgggtcatggtctctatcctgttgttggttctaattcttgtgttgggtttgggtagtaacttagtgtgatgagaaattttacagatatttgttttttatttgttcctactaacaacatttggtttttagattgcagctatatctgaacagtcatcagaatcttcaagcgcatcaggagctgactccagtgagaacgccaatggaagtcctgagtggagatcatttgatatgcattctgtgattgcagctacagaagacctatttgatttcattttatcgaggaaaggatggcgggttcgggttttccttgtccaggacatcgttaatgcttcagacgtgttccttcaagaagcgacattcccatatgtatatgcgaaagtgggaaagataggggacctaaatccagagagaagtaagatgatcaggaggctggtgaatactgtgcaatcgttccgccaagctatcaatttggctccagatgcttggagcgccatgctaatccgcactttgttgaaacctgaatcacaaaaatttgttcttgatgtgtttttggccctggctaaccattccagttacaagattccagaaacattctggctatttatgtcaagatttctaaattacttggacaaacaagatatactttaggaacggttaatatatcaattcctttttttttgttatggcttgaatttatttattttagatcggtcgccactggccaatgttgacttaaaaagctgttgctgctgttctccggctggtgctgattccaaaattcatatttttttgtcctgtgataagtgcttttcttttatcatttacagatgatagcatttcctatctatgtagttttagaatgtgcttaatatttgggtaggtggattgcagccctggggaaactctattttattttttcaatattaaaagttgtcttgctttgcattgagatgactggccttttaccatttataacacacacgataaggggttttagtgattaatgacgacactattattgtgattaatacgttttgaaaaagtaacagagacaatttgatttaggtcgtagcaatggtgatttttt

SEQ ID NO: 68441 - DNA, 1963 bp, Zea Mays
ttttgaaccagacttgttgatgtcagacacatgtttgacgagattgattatattttagaaggaaaaaatgctgaaaggtttgctactctttattcacatggttcaagtggggtcaattctgaagctagtacaagtatcaaggtcccaaaagtttactggaactatacatgtaaaaccatattgacactggaatggattgatggaattaagctaactgatgctgagcgcatcagcaaagccaatttgaacaggaaaagaatgatagatgagggtctctattgctcattgcgacaactgcttgaagaagggtttttccatgcagacccccatcctggtaatctagttgcaactgaaggtggatctctagcatattttgactttggtatgatgggagatattccgaggcactatcgtgtggggcttatacaaatgatttacttgcagttgcagatgcgttgcggttttcctttggtgatgtcaggaggcaatcaaatgatttccagggcgtaatgaaccatttgtatgatgtgatgtatgaatttagtttctcccttccccctgattatgcgttggtgataagagctcttggttctctagaagggactgcaaaagcactggatcctgagtttaaagttattgagagtgcatatccttttgtaattgggagactccttgcagaccccagccctgatatgaggaaaatattgcgggagcttcttatatgtgacgatggatccatcagatggaatcgactggaaaggctggtacatgcttaattattgttccttatcttgttatctcattgttatcacgattttttaccaaaatcatatgatgaaattaccaaaatcagtcttttaaataacaagaacatgctagggagttttgtttgtcatgatatacactcctgatttctctgttcgtatgtgtggaaacagtttcatggacctatcctttctgtgaacatgattactaatttgtggtagccctcttgacacatagaaccactaagctatatctgaacagtcatcagaatcttcaagcgcatcaggagctgactccagtgagaacgccaatggaagtcctgagtggagatcatttgatatgcattctgtgattgcagctacagaagacctatttgatttcattttatcgaggaaaggatggcgggttcgggttttccttgtccaggacatcgttaatgcttcagacgtgttccttcaagaagcgacattcccatatgtatatgcgaaagtgggaaagataggggacctaaatccagagagaagtaagatgatcaggaggctggtgaatactgtgcaatcgttccgccaagctatcaatttggctccagatgcttggagcgccatgctaatccgcactttgttgaaacctgaatcacaaaaatttgttcttgatgtgtttttggccctggctaaccattccagttacaagattccagaaacattctggctatttatgtcaagatttctaaattacttggacaaacaagatatactttaggaacggttaatatatcaattcctttttttttgttatggcttgaatttatttattttagatcggtcgccactggccaatgttgacttaaaaagctgttgctgctgttctccggctggtgctgattccaaaattcatatttttttgtcctgtgataagtgcttttcttttatcatttacagatgatagcatttcctatctatgtagttttagaatgtgcttaatatttgggtaggtggattgcagccctggggaaactctattttattttttcaatattaaaagttgtcttgctttgcattgagatgactggccttttaccatttataacacacacgataaggggttttagtgattaatgacgacactattattgtgattaatacgttttgaaaaagtaacagagacaatttgatttaggtcgtagcaatggtgatttttt

SEQ ID NO: 68442 - DNA, 4076 bp, Zea Mays
gcttcgcgtctgccgcgcactagctattcaagtgcatttacaagtgtacatggagagaggccttcatcagaatatgcaaagatcaggaaggagtcactggaaacccagtttggaagaatattgggttcaagttcacgcaggcattttgctgaccgtggctttggtccattccttgctctatacagggctgctactatctcctttcatgttgtaaaactcactatttggcatttgttgctcaatgatatgcataaaagagcagaaaagtttcgagagaccttgatacgcttgggtcctttttatatcaaggtatgccgattgaaatagatctgtagaatgtagcaccgatcttttctattaaattttgatgcttaacttttcagtatgtctccttgttaaggtggaagcaacatcaatgtaacatgtcttatgaccatcaaaatcactgcagctatcactatggttttgtgacatgattgttatcatccttaagcatctgtacaaaatcaatcacattggtggttgtgttgactgcatatttagtgtgccattgttgtgtccatatcctgtttttgaactacaatacttcgttagctaccaggtcgtgggttcgaagcagcctctcagcatttgcggggaatggctttcctcctcggtttatctcttccccagaccccattcatgtgggagcctctggcactgggtctgtctgtcctgcaataatttgttagctaatattgtcttaggtgtaatattgtcttattacaactggggatgatatgctgttttatcaattttctttcaccgcacagcttggccaagcattgagcacacgccctgatatacttcctagtgcgtactgtcaggagcttgcaaagctacaggatcaaataccaccgtttccaactcgcattgcactcaggaccatagagtctcagttgggttctcgaatttctgatttgtttgctgatatcagcccagagccgattgcagcagcatcactggggcaggtttacaaagtaatgcagctcatctacgatctggagagcttgttgcagtcaaagttcaaaggcctggaatggcgcccttgctgactctagatgcacttttgttccacatgattggaggacaaatgaaacgatttgctaaggctcgcaaagacctattggtggccgttaatgagattgtcagacacatgtttgacgagattgattatattttagaaggaaaaaatgctgaaaggtttgctactctttattcacatggttcaagtggggtcaattctgaagctagtacaagtatcaaggtcccaaaagtttactggaactatacatgtaaaaccatattgacactggaatggattgatggaattaagctaactgatgctgagcgcatcagcaaagccaatttgaacaggaaaagaatgatagatgagggtctctattgctcattgcgacaactgcttgaagaagggtttttccatgcagacccccatcctggtaatctagttgcaactgaaggtggatctctagcatattttgactttggtatgatgggagatattccgaggcactatcgtgtggggcttatacaaatgatttacttgcagttgcagatgcgttgcggttttcctttggtgatgtcaggaggcaatcaaatgatttccagggcgtaatgaaccatttgtatgatgtgatgtatgaatttagtttctcccttccccctgattatgcgttggtgataagagctcttggttctctagaagggactgcaaaagcactggatcctgagtttaaagttattgagagtgcatatccttttgtaattgggagactccttgcagaccccagccctgatatgaggaaaatattgcgggagcttcttatatgtgacgatggatccatcagatggaatcgactggaaaggctgtttcatggacctatcctttctgtgaacatgattactaatttgtggtagccctcttgacacatagaaccactaaggtaagattgaagggagtatccagcctatagatgtggaattattaacaacttttactgttgaccatctatttttttgggatcctgtattttgtttgggctgtatgatctgagctagctcagtttgtgggaatactcacaccactcaggttcgagttgtatttggcttgaatatgatcaacctgcaggggggtaagacaactccgggcattgcattaagaagaacttctcacacagagaggattttcctaaccctagactgaatatcctttcttgtgggagtcaaactcaggtcctgcagaggctatcaagtcacataaccatctcagctagagtccctttcacttatctgtttcttcttacttacaacatgacatggttccttctacttcggtcgactttttaaatatatattctgtgcaagtactgcagtgttgctcaaagaaaaatttgggttggtccagttctggtagtggtacctatgatctaagagccacttcataaactacagctatttgttctcctgttaacaccaatcaacgagttttcacaaccctgatggtagtgctgattggtcccaccccttagacagacaagtatgcatcaaccatcctgggtgtcctcatcacatccaggttgtctggaaggacagatgtaatcatgttgccatttaaaagggtgctaaagctgtagttttgtgttactatggtgcaatagttgcagttccttgaaactggtcctaggagttgaagtttgagttaggcacacaaaattgtattctgtgaaataatatggtgttaggatcgtaattgcaattttttaatcgtagtttattgagttaggcacacaaaattgtattctgtaaaataatatgatgataggattgtaattgcaatttttaatgttttaagcttcaaatatgcaacagaggagaaatttcgataatctgaaaattttaatgcaacaaattgggttatctttgctggaaatgggtcatggtctctatcctgttgttggttctaattcttgtgttgggtttgggtagtaacttagtgtgatgagaaattttacagatatttgttttttatttgttcctactaacaacatttggtttttagattgcagctatatctgaacagtcatcagaatcttcaagcgcatcaggagctgactccagtgagaacgccaatggaagtcctgagtggagatcatttgatatgcattctgtgattgcagctacagaagacctatttgatttcattttatcgaggaaaggatggcgggttcgggttttccttgtccaggacatcgttaatgcttcagacgtgttccttcaagaagcgacattcccatatgtatatgcgaaagtgggaaagataggggacctaaatccagagagaagtaagatgatcaggaggctggtgaatactgtgcaatcgttccgccaagctatcaatttggctccagatgcttggagcgccatgctaatccgcactttgttgaaacctgaatcacaaaaatttgttcttgatgtgtttttggccctggctaaccattccagttacaagattccagaaacattctggctatttatgtcaagatttctaaattacttggacaaacaagatatactttaggaacggttaatatatcaattcctttttttttgttatggcttgaatttatttattttagatcggtcgccactggccaatgttgacttaaaaagctgttgctgctgttctccggctggtgctgattccaaaattcatatttttttgtcctgtgataagtgcttttcttttatcatttacagatgatagcatttcctatctatgtagttttagaatgtgcttaatatttgggtaggtggattgcagccctggggaaactctattttattttttcaatattaaaagttgtcttgctttgcattgagatgactggccttttaccatttataacacacacgataaggggttttagtgattaatgacgacactattattgtgattaatacgttttgaaaaagtaacagagacaatttgatttaggtcgtagcaatggtgatttttt

SEQ ID NO: 68443 - DNA, 3690 bp, Zea Mays
accagcttcgcgtctgccgcgcactagctattcaagtgcatttacaagtgtacatggagagaggccttcatcagaatatgcaaagatcaggaaggagtcactggaaacccagtttggaagaatattgggttcaagttcacgcaggcattttgctgaccgtggctttggtccattccttgctctatacagggctgctactatctcctttcatgttgtaaaactcactatttggcatttgttgctcaatgatatgcataaaagagcagaaaaggtagttttcctgactttgttggtggaggaactgagcatcatgtctctgattatcatttccttatttcagtttcgagagaccttgatacgcttgggtcctttttatatcaagcttggccaagcattgagcacacgccctgatatacttcctagtgcgtactgtcaggagcttgcaaagctacaggatcaaataccaccgtttccaactcgcattgcactcaggaccatagagtctcagttgggttctcgaatttctgatttgtttgctgatatcagcccagagccgattgcagcagcatcactggggcaggtttacaaagacctgagttctccaagttgaaatgcattcctttgatacttcaagtaatgcagctcatctacgatctggagagcttgttgcagtcaaagttcaaaggcctggaatggcgcccttgctgactctagatgcacttttgttccacatgattggaggacaaatgaaacgatttgctaaggctcgcaaagacctattggtggccgttaatgagattgtcagacacatgtttgacgagattgattatattttagaaggaaaaaatgctgaaaggtttgctactctttattcacatggttcaagtggggtcaattctgaagctagtacaagtatcaaggtcccaaaagtttactggaactatacatgtaaaaccatattgacactggaatggattgatggaattaagctaactgatgctgagcgcatcagcaaagccaatttgaacaggaaaagaatgatagatgagggtctctattgctcattgcgacaactgcttgaagaagggtttttccatgcagacccccatcctggtaatctagttgcaactgaaggtggatctctagcatattttgactttggtatgatgggagatattccgaggcactatcgtgtggggcttatacaaatgatttacttgcagttgcagatgcgttgcggttttcctttggtgatgtcaggaggcaatcaaatgatttccagggcgtaatgaaccatttgtatgatgtgatgtatgaatttagtttctcccttccccctgattatgcgttggtgataagagctcttggttctctagaagggactgcaaaagcactggatcctgagtttaaagttattgagagtgcatatccttttgtaattgggagactccttgcagaccccagccctgatatgaggaaaatattgcgggagcttcttatatgtgacgatggatccatcagatggaatcgactggaaaggctgtttcatggacctatcctttctgtgaacatgattactaatttgtggtagccctcttgacacatagaaccactaaggtaagattgaagggagtatccagcctatagatgtggaattattaacaacttttactgttgaccatctatttttttgggatcctgtattttgtttgggctgtatgatctgagctagctcagtttgtgggaatactcacaccactcaggttcgagttgtatttggcttgaatatgatcaacctgcaggggggtaagacaactccgggcattgcattaagaagaacttctcacacagagaggattttcctaaccctagactgaatatcctttcttgtgggagtcaaactcaggtcctgcagaggctatcaagtcacataaccatctcagctagagtccctttcacttatctgtttcttcttacttacaacatgacatggttccttctacttcggtcgactttttaaatatatattctgtgcaagtactgcagtgttgctcaaagaaaaatttgggttggtccagttctggtagtggtacctatgatctaagagccacttcataaactacagctatttgttctcctgttaacaccaatcaacgagttttcacaaccctgatggtagtgctgattggtcccaccccttagacagacaagtatgcatcaaccatcctgggtgtcctcatcacatccaggttgtctggaaggacagatgtaatcatgttgccatttaaaagggtgctaaagctgtagttttgtgttactatggtgcaatagttgcagttccttgaaactggtcctaggagttgaagtttgagttaggcacacaaaattgtattctgtgaaataatatggtgttaggatcgtaattgcaattttttaatcgtagtttattgagttaggcacacaaaattgtattctgtaaaataatatgatgataggattgtaattgcaatttttaatgttttaagcttcaaatatgcaacagaggagaaatttcgataatctgaaaattttaatgcaacaaattgggttatctttgctggaaatgggtcatggtctctatcctgttgttggttctaattcttgtgttgggtttgggtagtaacttagtgtgatgagaaattttacagatatttgttttttatttgttcctactaacaacatttggtttttagattgcagctatatctgaacagtcatcagaatcttcaagcgcatcaggagctgactccagtgagaacgccaatggaagtcctgagtggagatcatttgatatgcattctgtgattgcagctacagaagacctatttgatttcattttatcgaggaaaggatggcgggttcgggttttccttgtccaggacatcgttaatgcttcagacgtgttccttcaagaagcgacattcccatatgtatatgcgaaagtgggaaagataggggacctaaatccagagagaagtaagatgatcaggaggctggtgaatactgtgcaatcgttccgccaagctatcaatttggctccagatgcttggagcgccatgctaatccgcactttgttgaaacctgaatcacaaaaatttgttcttgatgtgtttttggccctggctaaccattccagttacaagattccagaaacattctggctatttatgtcaagatttctaaattacttggacaaacaagatatactttaggaacggttaatatatcaattcctttttttttgttatggcttgaatttatttattttagatcggtcgccactggccaatgttgacttaaaaagctgttgctgctgttctccggctggtgctgattccaaaattcatatttttttgtcctgtgataagtgcttttcttttatcatttacagatgatagcatttcctatctatgtagttttagaatgtgcttaatatttgggtaggtggattgcagccctggggaaactctattttattttttcaatattaaaagttgtcttgctttgcattgagatgactggccttttaccatttataacacacacgataaggggttttagtgattaatgacgacactattattgtgattaatacgttttgaaaaagtaacagagacaatttgatttaggtcgtagcaatggtgatttttt

SEQ ID NO: 68444 - DNA, 3438 bp, Zea Mays
gttggttgtgcattactgcattgcatccagtaaaaaaactacagctcaaccaaatttagccgagcggagacgcacaagccggcgtgggctgcattacacgagacgatcaacaagggcagcggcccagcagcaacgaaccaccgcacaagcgccaggccgccagctcgcactctggtccagccacgcggcgccgctgccaccttcctctcaccgtgtacgtcttcggcgtacacgtctctctctctctctctcctcccctaaaccctacgctgcccttctttccctccccgtctctccctcccgtgcgggcggcggagctgatgagatcccggccatggcgggccccacctcgcggctcctcatcctcgcccgccgcgccgaccgacgcagatgcctcccttttctcgttccccgcgccttgcaggccgcccccccgaccttttctccggcgttgccgctacctccctgcctccccgcctcaacgccggtgatgagctattcaagtgcatttacaagtgtacatggagagaggccttcatcagaatatgcaaagatcaggaaggagtcactggaaacccagtttggaagaatattgggttcaagttcacgcaggcattttgctgaccgtggctttggtccattccttgctctatacagggctgctactatctcctttcatgttgtaaaactcactatttggcatttgttgctcaatgatatgcataaaagagcagaaaagtttcgagagaccttgatacgcttgggtcctttttatatcaaggtatgccgattgaaatagatctgtagaatgtagcaccgatcttttctattaaattttgatgcttaacttttcagtatgtctccttgttaaggtggaagcaacatcaatgtaacatgtcttatgaccatcaaaatcactgcagctatcactatggttttgtgacatgattgttatcatccttaagcatctgtacaaaatcaatcacattggtggttgtgttgactgcatatttagtgtgccattgttgtgtccatatcctgtttttgaactacaatacttcgttagctaccaggtcgtgggttcgaagcagcctctcagcatttgcggggaatggctttcctcctcggtttatctcttccccagaccccattcatgtgggagcctctggcactgggtctgtctgtcctgcaataatttgttagctaatattgtcttaggtgtaatattgtcttattacaactggggatgatatgctgttttatcaattttctttcaccgcacagcttggccaagcattgagcacacgccctgatatacttcctagtgcgtactgtcaggagcttgcaaagctacaggatcaaataccaccgtttccaactcgcattgcactcaggaccatagagtctcagttgggttctcgaatttctgatttgtttgctgatatcagcccagagccgattgcagcagcatcactggggcaggtttacaaagtaatgcagctcatctacgatctggagagcttgttgcagtcaaagttcaaaggcctggaatggcgcccttgctgactctagatgcacttttgttccacatgattggaggacaaatgaaacgatttgctaaggctcgcaaagacctattggtggccgttaatgagattgtcagacacatgtttgacgagattgattatattttagaaggaaaaaatgctgaaaggtttgctactctttattcacatggttcaagtggggtcaattctgaagctagtacaagtatcaaggtcccaaaagtttactggaactatacatgtaaaaccatattgacactggaatggattgatggaattaagctaactgatgctgagcgcatcagcaaagccaatttgaacaggaaaagaatgatagatgagggtctctattgctcattgcgacaactgcttgaagaagggtttttccatgcagacccccatcctggtaatctagttgcaactgaaggtggatctctagcatattttgactttggtatgatgggagatattccgaggcactatcgtgtggggcttatacaaatgcttgtacattatgttaatcgggactccttaggcttggcgaatgacttccattcactaggatttgttcctgagggaacagatttacttgcagttgcagatgcgttgcggttttcctttggtgatgtcaggaggcaatcaaatgatttccagggcgtaatgaaccatttgtatgatgtgatgtatgaatttagtttctcccttccccctgattatgcgttggtgataagagctcttggttctctagaagggactgcaaaagcactggatcctgagtttaaagttattgagagtgcatatccttttgtaattgggagactccttgcagaccccagccctgatatgaggaaaatattgcgggagcttcttatatgtgacgatggatccatcagatggaatcgactggaaaggctgattgcagctatatctgaacagtcatcagaatcttcaagcgcatcaggagctgactccagtgagaacgccaatggaagtcctgagtggagatcatttgatatgcattctgtgattgcagctacagaagacctatttgatttcattttatcgaggaaaggatggcgggttcgggttttccttgtccaggacatcgttaatgcttcagacgtgttccttcaagaagcgacattcccatatgtatatgcgaaagtgggaaagataggggacctaaatccagagagaagtaagatgatcaggaggctggtgaatactgtgcaatcgttccgccaagctatcaatttggctccagatgcttggagcgccatgctaatccgcactttgttgaaacctgaatcacaaaaatttgttcttgatgtgtttttggccctggctaaccattccagttacaagattccagaaacattctggctatttatgtcaagatttctaaattacttggacaaacaagatatactttaggaacggttaatatatcaattcctttttttttgttatggcttgaatttatttattttagatcggtcgccactggccaatgttgacttaaaaagctgttgctgctgttctccggctggtgctgattccaaaattcatatttttttgtcctgtgataagtgcttttcttttatcatttacagatgatagcatttcctatctatgtagttttagaatgtgcttaatatttgggtaggtggattgcagccctggggaaactctattttattttttcaatattaaaagttgtcttgctttgcattgagatgactggccttttaccatttataacacacacgataaggggttttagtgattaatgacgacactattattgtgattaatacgttttgaaaaagtaacagagacaatttgatttaggtcgtagcaatggtgatttttt

SEQ ID NO: 68445 - DNA, 2928 bp, Zea Mays
gttggttgtgcattactgcattgcatccagtaaaaaaactacagctcaaccaaatttagccgagcggagacgcacaagccggcgtgggctgcattacacgagacgatcaacaagggcagcggcccagcagcaacgaaccaccgcacaagcgccaggccgccagctcgcactctggtccagccacgcggcgccgctgccaccttcctctcaccgtgtacgtcttcggcgtacacgtctctctctctctctctcctcccctaaaccctacgctgcccttctttccctccccgtctctccctcccgtgcgggcggcggagctgatgagatcccggccatggcgggccccacctcgcggctcctcatcctcgcccgccgcgccgaccgacgcagatgcctcccttttctcgttccccgcgccttgcaggccgcccccccgaccttttctccggcgttgccgctacctccctgcctccccgcctcaacgccggtgatgagctattcaagtgcatttacaagtgtacatggagagaggccttcatcagaatatgcaaagatcaggaaggagtcactggaaacccagtttggaagaatattgggttcaagttcacgcaggcattttgctgaccgtggctttggtccattccttgctctatacagggctgctactatctcctttcatgttgtaaaactcactatttggcatttgttgctcaatgatatgcataaaagagcagaaaagtttcgagagaccttgatacgcttgggtcctttttatatcaagcttggccaagcattgagcacacgccctgatatacttcctagtgcgtactgtcaggagcttgcaaagctacaggatcaaataccaccgtttccaactcgcattgcactcaggaccatagagtctcagttgggttctcgaatttctgatttgtttgctgatatcagcccagagccgattgcagcagcatcactggggcaggtttacaaagtaatgcagctcatctacgatctggagagcttgttgcagtcaaagttcaaaggcctggaatggcgcccttgctgactctagatgcacttttgttccacatgattggaggacaaatgaaacgatttgctaaggctcgcaaagacctattggtggccgttaatgagattgtcagacacatgtttgacgagattgattatattttagaaggaaaaaatgctgaaaggtttgctactctttattcacatggttcaagtggggtcaattctgaagctagtacaagtatcaaggtcccaaaagtttactggaactatacatgtaaaaccatattgacactggaatggattgatggaattaagctaactgatgctgagcgcatcagcaaagccaatttgaacaggaaaagaatgatagatgagggtctctattgctcattgcgacaactgcttgaagaagggtttttccatgcagacccccatcctggtaatctagttgcaactgaaggtggatctctagcatattttgactttggtatgatgggagatattccgaggcactatcgtgtggggcttatacaaatgcttgtacattatgttaatcgggactccttaggcttggcgaatgacttccattcactaggatttgttcctgagggaacagatttacttgcagttgcagatgcgttgcggttttcctttggtgatgtcaggaggcaatcaaatgatttccagggcgtaatgaaccatttgtatgatgtgatgtatgaatttagtttctcccttccccctgattatgcgttggtgataagagctcttggttctctagaagggactgcaaaagcactggatcctgagtttaaagttattgagagtgcatatccttttgtaattgggagactccttgcagaccccagccctgatatgaggaaaatattgcgggagcttcttatatgtgacgatggatccatcagatggaatcgactggaaaggctgctatatctgaacagtcatcagaatcttcaagcgcatcaggagctgactccagtgagaacgccaatggaagtcctgagtggagatcatttgatatgcattctgtgattgcagctacagaagacctatttgatttcattttatcgaggaaaggatggcgggttcgggttttccttgtccaggacatcgttaatgcttcagacgtgttccttcaagaagcgacattcccatatgtatatgcgaaagtgggaaagataggggacctaaatccagagagaagtaagatgatcaggaggctggtgaatactgtgcaatcgttccgccaagctatcaatttggctccagatgcttggagcgccatgctaatccgcactttgttgaaacctgaatcacaaaaatttgttcttgatgtgtttttggccctggctaaccattccagttacaagattccagaaacattctggctatttatgtcaagatttctaaattacttggacaaacaagatatactttaggaacggttaatatatcaattcctttttttttgttatggcttgaatttatttattttagatcggtcgccactggccaatgttgacttaaaaagctgttgctgctgttctccggctggtgctgattccaaaattcatatttttttgtcctgtgataagtgcttttcttttatcatttacagatgatagcatttcctatctatgtagttttagaatgtgcttaatatttgggtaggtggattgcagccctggggaaactctattttattttttcaatattaaaagttgtcttgctttgcattgagatgactggccttttaccatttataacacacacgataaggggttttagtgattaatgacgacactattattgtgattaatacgttttgaaaaagtaacagagacaatttgatttaggtcgtagcaatggtgatttttt

SEQ ID NO: 68446 - DNA, 2605 bp, Zea Mays
gttggttgtgcattactgcattgcatccagtaaaaaaactacagctcaaccaaatttagccgagcggagacgcacaagccggcgtgggctgcattacacgagacgatcaacaagggcagcggcccagcagcaacgaaccaccgcacaagcgccaggccgccagctcgcactctggtccagccacgcggcgccgctgccaccttcctctcaccgtggctgctactatctcctttcatgttgtaaaactcactatttggcatttgttgctcaatgatatgcataaaagagcagaaaaggtagttttcctgactttgttggtggaggaactgagcatcatgtctctgattatcatttccttatttcagtttcgagagaccttgatacgcttgggtcctttttatatcaagcttggccaagcattgagcacacgccctgatatacttcctagtgcgtactgtcaggagcttgcaaagctacaggatcaaataccaccgtttccaactcgcattgcactcaggaccatagagtctcagttgggttctcgaatttctgatttgtttgctgatatcagcccagagccgattgcagcagcatcactggggcaggtttacaaagacctgagttctccaagttgaaatgcattcctttgatacttcaagtaatgcagctcatctacgatctggagagcttgttgcagtcaaagttcaaaggcctggaatggcgcccttgctgactctagatgcacttttgttccacatgattggaggacaaatgaaacgatttgctaaggctcgcaaagacctattggtggccgttaatgagattgtcagacacatgtttgacgagattgattatattttagaaggaaaaaatgctgaaaggtttgctactctttattcacatggttcaagtggggtcaattctgaagctagtacaagtatcaaggtcccaaaagtttactggaactatacatgtaaaaccatattgacactggaatggattgatggaattaagctaactgatgctgagcgcatcagcaaagccaatttgaacaggaaaagaatgatagatgagggtctctattgctcattgcgacaactgcttgaagaagggtttttccatgcagacccccatcctggtaatctagttgcaactgaaggtggatctctagcatattttgactttggtatgatgggagatattccgaggcactatcgtgtggggcttatacaaatgcttgtacattatgttaatcgggactccttaggcttggcgaatgacttccattcactaggatttgttcctgagggaacagatttacttgcagttgcagatgcgttgcggttttcctttggtgatgtcaggaggcaatcaaatgatttccagggcgtaatgaaccatttgtatgatgtgatgtatgaatttagtttctcccttccccctgattatgcgttggtgataagagctcttggttctctagaagggactgcaaaagcactggatcctgagtttaaagttattgagagtgcatatccttttgtaattgggagactccttgcagaccccagccctgatatgaggaaaatattgcgggagcttcttatatgtgacgatggatccatcagatggaatcgactggaaaggctgattgcagctatatctgaacagtcatcagaatcttcaagcgcatcaggagctgactccagtgagaacgccaatggaagtcctgagtggagatcatttgatatgcattctgtgattgcagctacagaagacctatttgatttcattttatcgaggaaaggatggcgggttcgggttttccttgtccaggacatcgttaatgcttcagacgtgttccttcaagaagcgacattcccatatgtatatgcgaaagtgggaaagataggggacctaaatccagagagaagtaagatgatcaggaggctggtgaatactgtgcaatcgttccgccaagctatcaatttggctccagatgcttggagcgccatgctaatccgcactttgttgaaacctgaatcacaaaaatttgttcttgatgtgtttttggccctggctaaccattccagttacaagattccagaaacattctggctatttatgtcaagatttctaaattacttggacaaacaagatatactttaggaacggttaatatatcaattcctttttttttgttatggcttgaatttatttattttagatcggtcgccactggccaatgttgacttaaaaagctgttgctgctgttctccggctggtgctgattccaaaattcatatttttttgtcctgtgataagtgcttttcttttatcatttacagatgatagcatttcctatctatgtagttttagaatgtgcttaatatttgggtaggtggattgcagccctggggaaactctattttattttttcaatattaaaagttgtcttgctttgcattgagatgactggccttttaccatttataacacacacgataaggggttttagtgattaatgacgacactattattgtgattaatacgttttgaaaaagtaacagagacaatttgatttaggtcgtagcaatggtgatttttt

SEQ ID NO: 68447 - DNA, 3053 bp, Zea Mays
gttggttgtgcattactgcattgcatccagtaaaaaaactacagctcaaccaaatttagccgagcggagacgcacaagccggcgtgggctgcattacacgagacgatcaacaagggcagcggcccagcagcaacgaaccaccgcacaagcgccaggccgccagctcgcactctggtccagccacgcggcgccgctgccaccttcctctcaccgtgtacgtcttcggcgtacacgtctctctctctctctctcctcccctaaaccctacgctgcccttctttccctccccgtctctccctcccgtgcgggcggcggagctgatgagatcccggccatggcgggccccacctcgcggctcctcatcctcgcccgccgcgccgaccgacgcagatgcctcccttttctcgttccccgcgccttgcaggccgcccccccgaccttttctccggcgttgccgctacctccctgcctccccgcctcaacgccggtgatgagctattcaagtgcatttacaagtgtacatggagagaggccttcatcagaatatgcaaagatcaggaaggagtcactggaaacccagtttggaagaatattgggttcaagttcacgcaggcattttgctgaccgtggctttggtccattccttgctctatacagggctgctactatctcctttcatgttgtaaaactcactatttggcatttgttgctcaatgatatgcataaaagagcagaaaagtttcgagagaccttgatacgcttgggtcctttttatatcaagcttggccaagcattgagcacacgccctgatatacttcctagtgcgtactgtcaggagcttgcaaagctacaggatcaaataccaccgtttccaactcgcattgcactcaggaccatagagtctcagttgggttctcgaatttctgatttgtttgctgatatcagcccagagccgattgcagcagcatcactggggcaggtttacaaagacctgagttctccaagttgaaatgcattcctttgatacttcaagtaatgcagctcatctacgatctggagagcttgttgcagtcaaagttcaaaggcctggaatggcgcccttgctgactctagatgcacttttgttccacatgattggaggacaaatgaaacgatttgctaaggctcgcaaagacctattggtggccgttaatgagattgtcagacacatgtttgacgagattgattatattttagaaggaaaaaatgctgaaaggtttgctactctttattcacatggttcaagtggggtcaattctgaagctagtacaagtatcaaggtcccaaaagtttactggaactatacatgtaaaaccatattgacactggaatggattgatggaattaagctaactgatgctgagcgcatcagcaaagccaatttgaacaggaaaagaatgatagatgagggtctctattgctcattgcgacaactgcttgaagaagggtttttccatgcagacccccatcctggtaatctagttgcaactgaaggtggatctctagcatattttgactttggtatgatgggagatattccgaggcactatcgtgtggggcttatacaaatgcttgtacattatgttaatcgggactccttaggcttggcgaatgacttccattcactaggatttgttcctgagggaacagatttacttgcagttgcagatgcgttgcggttttcctttggtgatgtcaggaggcaatcaaatgatttccagggcgtaatgaaccatttgtatgatgtgatgtatgaatttagtttctcccttccccctgattatgcgttggtgataagagctcttggttctctagaagggactgcaaaagcactggatcctgagtttaaagttattgagagtgcatatccttttgtaattgggagactccttgcagaccccagccctgatatgaggaaaatattgcgggagcttcttatatgtgacgatggatccatcagatggaatcgactggaaaggctgtttcatggacctatcctttctgtgaacatgattactaatttgtggtagccctcttgacacatagaaccactaagattgcagctatatctgaacagtcatcagaatcttcaagcgcatcaggagctgactccagtgagaacgccaatggaagtcctgagtggagatcatttgatatgcattctgtgattgcagctacagaagacctatttgatttcattttatcgaggaaaggatggcgggttcgggttttccttgtccaggacatcgttaatgcttcagacgtgttccttcaagaagcgacattcccatatgtatatgcgaaagtgggaaagataggggacctaaatccagagagaagtaagatgatcaggaggctggtgaatactgtgcaatcgttccgccaagctatcaatttggctccagatgcttggagcgccatgctaatccgcactttgttgaaacctgaatcacaaaaatttgttcttgatgtgtttttggccctggctaaccattccagttacaagattccagaaacattctggctatttatgtcaagatttctaaattacttggacaaacaagatatactttaggaacggttaatatatcaattcctttttttttgttatggcttgaatttatttattttagatcggtcgccactggccaatgttgacttaaaaagctgttgctgctgttctccggctggtgctgattccaaaattcatatttttttgtcctgtgataagtgcttttcttttatcatttacagatgatagcatttcctatctatgtagttttagaatgtgcttaatatttgggtaggtggattgcagccctggggaaactctattttattttttcaatattaaaagttgtcttgctttgcattgagatgactggccttttaccatttataacacacacgataaggggttttagtgattaatgacgacactattattgtgattaatacgttttgaaaaagtaacagagacaatttgatttaggtcgtagcaatggtgatttttt

SEQ ID NO: 68448 - DNA, 1091 bp, Zea Mays
agcgcaacgagccaacgcccgtccagtagcggctgccaggtgcaccccacccgtctgccgcattcgttaggttttcccgcatccgtccagtaggcgcgtacccaccccgaaatgccaaaaaagcgaagctttgcagcactccacaccgacaccgcgacacgcgaccgcactgcctttaaactactcactcaagtacctccccggactactagctcacaccagcggtacccagcccacaccggcagatcagctgcgagctagtagacatcgaccggaccgaccaacaggagcagcaagccgggctagctcgctcgctcgctcgcaatggcttccatcatcgtgcaggcggtggtcatcctcctggacgtcatcgccttcggcctgggcgtcgccgccgagcagcgccgcagccgggccaccgtcaccccggacgccgccaaggagtacgactactgcgtctacgactccgacatcgccacgggctacggcgtcggcgcgctgctcctcctcgccgccgcgcagggtgaccttcctcatcgcggaggcgtgcctgctggcgggatcagtacgcaacgcgtaccacacccggtacaggggcgtattctacggcgagtccctctcatgcgagacggtgcggaagggcgtcttcgctgctggcgcggcatttaccttcttcacggccatcctgggcgaggtatactacctcagctactccaaatcccgagatgccgctggtggtgctggctccagcattggcatgggcccttacaactaaaggagcttgatcgaggcaggcaggcagcccccgtgttttcaactctgcttcgtggtggatgaatgcagtgttctttttaacattaccttagtagggacggtgtaattggttgttggatccgcggttttttcctctctctttaggttcttgtatgaggttactcggttgggccgtatactgtttggattattgggctggattctggacatggtatacacgtattcgtagtatgctatgctgtttatatgtatgtgaaagaaataatagaagcgttgcatcgtctatccaaacaggacttggagttaaggtatagtac

SEQ ID NO: 68449 - DNA, 1307 bp, Zea Mays
cttactagccttccgagaagaggatgcagatgaaggcaacaacgaatcagcccaatggagccgcagtgcaacgtcggtatgttcacgcgcgccgagctgctggaggccagcgtggagcttcgtcatcacgccctcggctgcgtcaagtccacggccctccggtgcgctgtcaagctcggcgtcgccaacgccatccagcgccgtggcggcagggcctccgtcgaggacctgctcaccgagctctctctggacgcgagcagactccgctgcctgcacagcgtcatgcgcgcgctcgccgcgttgggcgtcttcaaggaggggagcgacggcgagtacggcctcactgccatttcctcgctgctcgtggacgacgacagcagcgtccgaggtagcctccggccgatcacgctcttgtacctggagcctgcattcgtggcgccagtgctcaacctggcagattgggcccttgctggtgtcgatggtagcgacgacgacaacaactgcagtgctcgaggaacggcgttcaagatgacgcacggcgaggacgtctgggatgtcctcgcgcgcgacgcctttctgggcgacttcttcaacggcgcgctcgcgtcagagactcggttcctcatggacatagccatccgcggatccccccaggtgttcgagggaatagcatcgctagtggacgccggcggtggcaccggcgcagcagcccaagcggtggctgcagcattcccggacacccggtgcacggtgctggagcttccgcaggtggtagacgctgctccgattgatgggccggttcgctttgtcggaggtgacatgacgaagttcatccctcctgctgatgccgttcttctaaaggaaacaccaaatatgttgaatacatacatacatagagggacgagatagggatattggaagcacagggcttccaatagttatagaaatccccaaacagagcacgcttcgggttcacaccactcaccctcgaccccaccaggagcatttgcgcaagttctgtcggatggggatgacccggttgagacacaggtgggtgcgctctgcatttgtaattgaagtgtaagatgctgtaagaaatgtagtaaaatccattgggaaatgcataaattaagatgatcaggattattattgacatgtaaatgatgaaaccataaaattccattagacatcatagtgagcatgatagatttgcaatgatgcatatattcaaatatactagggccaccatattatttgtacggctgtaatcatattcatgatcgtaaaatccacaagtttgagtgtaa

SEQ ID NO: 68450 - DNA, 2073 bp, Zea Mays
cgcggatctccctgtcgcccccaaccaccttccatccctcgtgacctgttcatgccgtcgccgcctcgatcctgtggatctccctgccgcctcccacgtccgtgctcatgacctgttccgcgtccgctgtcacccccagatcgcgcgaggcccatgtccacgcagtcatcgtcgccgccccctggccacgcgagatgccagcgccccctccaccttgcgtgagcgaccccttcatctaccttcaccaccatcttcaatccgcctctgcatcaccgccaaaaccctacccacttccctgctgcccaacaatgaatctgcctccgcaccaccgccaaaactctagcaactatggcagtgaacaacatccggtttcaagtctttggcagctatgctcatggaaaatacgtctatgttgatggtgaccgatctgttctcgcagaatcagcaaaggcttgatatcattgttgttttgctttatcatttgggcatttgaagcaaagctctatggagaaaaggcagggaaatgttgtctttctcatttttgcaggctgacgaatttaatgcagtggcaagagttggggttgctgctgaccatcgtggaatcatctgcagtcgtcgtgtgtccacactccctaacatgttgagcctcttgctgatcagatcaggcttgagaaggaaaatttggttttaataagtgttcttgtctggttcgattaaagaaagattcagtaattgtcttttttaggaacatagattcttcatctgtgtataatgtatttttattatctagattgtgatagttatttcaaggcctggtgatcgtatagcttgaccattgattgatgattatctgttgtcttaaggattggtacactgtatgtgttctttggtgttggtggtactttgctgacttctctatttatggtatcaaatatatctattgagtgttggtacttcaggtgcactatttagactattgggatcaatgctgtcagagctcataataaattggacgatatacgagaacaaggtcaattctaaaatatatgcagtattgcaatagtggatggaaacagaacaaaatagttgttccttgcaggtattgcaatatctcaaaccagataaaagtaaatttttactcaggtattttcacctatcttattacaattcatcaaggtattttcacctagcttattacaattcatcaatcttgcttcactacccatggtaacttgattattttcatgcactaactttttgacgtcctatttcttttcttttcccctttcacctcaaaacactcattttcatctcaaagcactaattaccagatacgccaatgtcatttaaattaattttcagcagtgctattattttttctgctatttgttttggaccgattaatattttgtgtactcttcctatttattcgtgggactgtaactgcaaagcttgtaactcaagtcatatgtgtcttgtgcctgctgttgtagctatggagcagaaaattcatgtgaacccactgaagatactaagccaaacgaagtgtacacatattcagaattctagctcaagctgccctaatcaactgaggaggataaggatgccgtggattttgagagggaggagcccgccaattgccagaagtctgtgcaagctgatgcaaatgcgacagctgccccgtctaaggctgttgacgatgacactatcatgcaaggcccactatcctctttgttgtcctctcatggatcctggtccagtggtggaggctgaggaatcagaaaggccctagatcatggccagtcatcgacgcaacggtggagcttatggctggaagtaatatgaagagtctatatctgacaaaaaatcatctaaaattaaatagtgagataagctttgaatagctgatgtaaaattatggagtaacattgtattagttgttgacaaaaaatgtgagaaatttaggtcaataataatatatgtattgtttgtttatatgtacttattgtgcactaatattttatcatataatttgtttgttgtcgtaacgcacgagcgtgcattccgacgtgg

SEQ ID NO: 68451 - DNA, 2134 bp, Zea Mays
cgcggatctccctgtcgcccccaaccaccttccatccctcgtgacctgttcatgccgtcgccgcctcgatcctgtggatctccctgccgcctcccacgtccgtgctcatgacctgttccgcgtccgctgtcacccccagatcgcgcgaggcccatgtccacgcagtcatcgtcgccgccccctggccacgcgagatgccagcgccccctccaccttgcgtgagcgaccccttcatctaccttcaccaccatcttcaatccgcctctgcatcaccgccaaaaccctacccacttccctgctgcccaacaatgaatctgcctccgcaccaccgccaaaactctagcaactatggcagtgaacaacatccggtttcaagtctttggcagctatgctcatggaaaatacgtctatgttgatggtgaccgatctgttctcgcagaatcagcaaaggcttgatatcattgttgttttgctttatcatttgggcatttgaagcaaagctctatggagaaaaggcagggaaatgttgtctttctcatttttgcaggctgacgaatttaatgcagtggcaagagttggggttgctgctgaccatcgtggaatcatctgcagtcgtcgtgtgtccacactccctaacatgttgagcctcttgctgatcagatcaggcttgagaaggaaaatttggttttaataagtgttcttgtctggttcgattaaagaaagattcagtaattgtcttttttaggaacatagattcttcatctgtgtataatgtatttttattatctagattgtgatagttatttcaaggcctggtgatcgtatagcttgaccattgattgatgattatctgttgtcttaaggattggtacactgtatgtgttctttggtgttggtggtactttgctgacttctctatttatggtatcaaatatatctattgagtgttggtacttcaggtgcactatttagactattgggatcaatgctgtcagagctcataataaattggacgatatacgagaacaaggtcaattctaaaatatatgcagtattgcaatagtggatggaaacagaacaaaatagttgttccttgcaggtattgcaatatctcaaaccagataaaagtaaatttttactcaggtattttcacctatcttattacaattcatcaaggtattttcacctagcttattacaattcatcaatcttgcttcactacccatggtaacttgattattttcatgcactaactttttgacgtcctatttcttttcttttcccctttcacctcaaaacactcattttcatctcaaagcactaattaccagatacgccaatgtcatttaaattaattttcagcagtgctattattttttctgctatttgttttggaccgattaatattttgtgtactcttcctatttattcgtgggactgtaactgcaaagcttgtaactcaagtcatatgtgtcttgtgcctgctgttgtagctatggagcagaaaattcatgtgaacccactgaagatactaagccaaacgaagtgtacacatattcagaattctagctcaagctgccctaatcaactgaggaggataaggatgccgtggattttgagagggaggagcccgccaattgccagaagtctgtgcaagctgatgcaaatgcgacagctgccccgtctaaggctgttggcttcttcgggaggacattatacaccacattaattctgcttgttgcgagccatccagatgtacgatgacactatcatgcaaggcccactatcctctttgttgtcctctcatggatcctggtccagtggtggaggctgaggaatcagaaaggccctagatcatggccagtcatcgacgcaacggtggagcttatggctggaagtaatatgaagagtctatatctgacaaaaaatcatctaaaattaaatagtgagataagctttgaatagctgatgtaaaattatggagtaacattgtattagttgttgacaaaaaatgtgagaaatttaggtcaataataatatatgtattgtttgtttatatgtacttattgtgcactaatattttatcatataatttgtttgttgtcgtaacgcacgagcgtgcattccgacgtgg

SEQ ID NO: 68452 - DNA, 1750 bp, Zea Mays
cgcggatctccctgtcgcccccaaccaccttccatccctcgtgacctgttcatgccgtcgccgcctcgatcctgtggatctccctgccgcctcccacgtccgtgctcatgacctgttccgcgtccgctgtcacccccagatcgcgcgaggcccatgtccacgcagtcatcgtcgccgccccctggccacgcgagatgccagcgccccctccaccttgcgtgagcgaccccttcatctaccttcaccaccatcttcaatccgcctctgcatcaccgccaaaaccctacccacttccctgctgcccaacaatgaatctgcctccgcaccaccgccaaaactctagcaactatggcagtgaacaacatccggtttcaagtctttggcagctatgctcatggaaaatacgtctatgttgatggtgaccgatctgttctcgcagaatcagcaaaggcttgatatcattgttgttttgctttatcatttgggcatttgaagcaaagctctatggagaaaaggcagggaaatgttgtctttctcatttttgcaggctgacgaatttaatgcagtggcaagagttggggttgctgctgaccatcgtggaatcatctgcagtcgtcgtgtgtccacactccctaacatgttgagcctcttgctgatcagatcaggcttgagaaggaaaatttggttttaataagtgttcttgtctggttcgattaaagaaagattcagtaattgtcttttttaggaacatagattcttcatctgtgtataatgtatttttattatctagattgtgatagttatttcaaggcctggtgatcgtatagcttgaccattgattgatgattatctgttgtcttaaggattggtacactgtgcactatttagactattgggatcaatgctgtcagagctcataataaattggacgatatacgagaacaaggtcaattctaaaatatatgcagtattgcaatagtggatggaaacagaacaaaatagttgttccttgcagctatggagcagaaaattcatgtgaacccactgaagatactaagccaaacgaagtgtacacatattcagaattctagctcaagctgccctaatcaactgaggaggataaggatgccgtggattttgagagggaggagcccgccaattgccagaagtctgtgcaagctgatgcaaatgcgacagctgccccgtctaaggctgttggcttcttcgggaggacattatacaccacattaattctgcttgttgcgagccatccagatgtgtatgagccatgtgatgatttctttgcccttgttgatgcactactctcagacaaagcacaacttttgacactacaaccaaggttatgtatgtagacgatgacactatcatgcaaggcccactatcctctttgttgtcctctcatggatcctggtccagtggtggaggctgaggaatcagaaaggccctagatcatggccagtcatcgacgcaacggtggagcttatggctggaagtaatatgaagagtctatatctgacaaaaaatcatctaaaattaaatagtgagataagctttgaatagctgatgtaaaattatggagtaacattgtattagttgttgacaaaaaatgtgagaaatttaggtcaataataatatatgtattgtttgtttatatgtacttattgtgcactaatattttatcatataatttgtttgttgtcgtaacgcacgagcgtgcattccgacgtgg

SEQ ID NO: 68453 - DNA, 2224 bp, Zea Mays
cgcggatctccctgtcgcccccaaccaccttccatccctcgtgacctgttcatgccgtcgccgcctcgatcctgtggatctccctgccgcctcccacgtccgtgctcatgacctgttccgcgtccgctgtcacccccagatcgcgcgaggcccatgtccacgcagtcatcgtcgccgccccctggccacgcgagatgccagcgccccctccaccttgcgtgagcgaccccttcatctaccttcaccaccatcttcaatccgcctctgcatcaccgccaaaaccctacccacttccctgctgcccaacaatgaatctgcctccgcaccaccgccaaaactctagcaactatggcagtgaacaacatccggtttcaagtctttggcagctatgctcatggaaaatacgtctatgttgatggtgaccgatctgttctcgcagaatcagcaaaggcttgatatcattgttgttttgctttatcatttgggcatttgaagcaaagctctatggagaaaaggcagggaaatgttgtctttctcatttttgcaggctgacgaatttaatgcagtggcaagagttggggttgctgctgaccatcgtggaatcatctgcagtcgtcgtgtgtccacactccctaacatgttgagcctcttgctgatcagatcaggcttgagaaggaaaatttggttttaataagtgttcttgtctggttcgattaaagaaagattcagtaattgtcttttttaggaacatagattcttcatctgtgtataatgtatttttattatctagattgtgatagttatttcaaggcctggtgatcgtatagcttgaccattgattgatgattatctgttgtcttaaggattggtacactgtatgtgttctttggtgttggtggtactttgctgacttctctatttatggtatcaaatatatctattgagtgttggtacttcaggtgcactatttagactattgggatcaatgctgtcagagctcataataaattggacgatatacgagaacaaggtcaattctaaaatatatgcagtattgcaatagtggatggaaacagaacaaaatagttgttccttgcaggtattgcaatatctcaaaccagataaaagtaaatttttactcaggtattttcacctatcttattacaattcatcaaggtattttcacctagcttattacaattcatcaatcttgcttcactacccatggtaacttgattattttcatgcactaactttttgacgtcctatttcttttcttttcccctttcacctcaaaacactcattttcatctcaaagcactaattaccagatacgccaatgtcatttaaattaattttcagcagtgctattattttttctgctatttgttttggaccgattaatattttgtgtactcttcctatttattcgtgggactgtaactgcaaagcttgtaactcaagtcatatgtgtcttgtgcctgctgttgtagctatggagcagaaaattcatgtgaacccactgaagatactaagccaaacgaagtgtacacatattcagaattctagctcaagctgccctaatcaactgaggaggataaggatgccgtggattttgagagggaggagcccgccaattgccagaagtctgtgcaagctgatgcaaatgcgacagctgccccgtctaaggctgttggcttcttcgggaggacattatacaccacattaattctgcttgttgcgagccatccagatgtgtatgagccatgtgatgatttctttgcccttgttgatgcactactctcagacaaagcacaacttttgacactacaaccaaggttatgtatacgatgacactatcatgcaaggcccactatcctctttgttgtcctctcatggatcctggtccagtggtggaggctgaggaatcagaaaggccctagatcatggccagtcatcgacgcaacggtggagcttatggctggaagtaatatgaagagtctatatctgacaaaaaatcatctaaaattaaatagtgagataagctttgaatagctgatgtaaaattatggagtaacattgtattagttgttgacaaaaaatgtgagaaatttaggtcaataataatatatgtattgtttgtttatatgtacttattgtgcactaatattttatcatataatttgtttgttgtcgtaacgcacgagcgtgcattccgacgtgg

SEQ ID NO: 68454 - DNA, 2560 bp, Zea Mays
cgcggatctccctgtcgcccccaaccaccttccatccctcgtgacctgttcatgccgtcgccgcctcgatcctgtggatctccctgccgcctcccacgtccgtgctcatgacctgttccgcgtccgctgtcacccccagatcgcgcgaggcccatgtccacgcagtcatcgtcgccgccccctggccacgcgagatgccagcgccccctccaccttgcgtgagcgaccccttcatctaccttcaccaccatcttcaatccgcctctgcatcaccgccaaaaccctacccacttccctgctgcccaacaatgaatctgcctccgcaccaccgccaaaactctagcaactatggcagtgaacaacatccggtttcaagtctttggcagctatgctcatggaaaatacgtctatgttgatggtgaccgatctgttctcgcagaatcagcaaaggcttgatatcattgttgttttgctttatcatttgggcatttgaagcaaagctctatggagaaaaggcagggaaatgttgtctttctcatttttgcaggctgacgaatttaatgcagtggcaagagttggggttgctgctgaccatcgtggaatcatctgcagtcgtcgtgtgtccacactccctaacatgttgagcctcttgctgatcagatcaggcttgagaaggaaaatttggttttaataagtgttcttgtctggttcgattaaagaaagattcagtaattgtcttttttaggaacatagattcttcatctgtgtataatgtatttttattatctagattgtgatagttatttcaaggcctggtgatcgtatagcttgaccattgattgatgattatctgttgtcttaaggattggtacactgtatgtgttctttggtgttggtggtactttgctgacttctctatttatggtatcaaatatatctattgagtgttggtacttcaggtgcactatttagactattgggatcaatgctgtcagagctcataataaattggacgatatacgagaacaaggtcaattctaaaatatatgcagtattgcaatagtggatggaaacagaacaaaatagttgttccttgcaggtattgcaatatctcaaaccagataaaagtaaatttttactcaggtattttcacctatcttattacaattcatcaaggtattttcacctagcttattacaattcatcaatcttgcttcactacccatggtaacttgattattttcatgcactaactttttgacgtcctatttcttttcttttcccctttcacctcaaaacactcattttcatctcaaagcactaattaccagatacgccaatgtcatttaaattaattttcagcagtgctattattttttctgctatttgttttggaccgattaatattttgtgtactcttcctatttattcgtgggactgtaactgcaaagcttgtaactcaagtcatatgtgtcttgtgcctgctgttgtagctatggagcagaaaattcatgtgaacccactgaagatactaagccaaacgaagtgtacacatattcagaattctagctcaagctgccctaatcaactgaggaggataaggatgccgtggattttgagagggaggagcccgccaattgccagaagtctgtgcaagctgatgcaaatgcgacagctgccccgtctaaggctgttggtaattatttttatttctttcttttttactgatttactattagcttgtttagtgaagacattctattggttgtagttatcatcaaatgattaggttcaaacatgtgataaggcttttaattcagtaaacgagacagaacatcagtgatatattaccttatagcttcccaccatgtgacattcaactaaagtgttggagtgctaaaaacatgttatccatttgtcatgtactattttgtttcattctaaccaactaatgtgcttgctttaaacgtagggaagtaatcaatatatttatttaagtgaatatccattatagttttatgacaaaaacttgtctttgtaggcttcttcgggaggacattatacaccacattaattctgcttgttgcgagccatccagatgtgtatgagccatgtgatgatttctttgcccttgttgatgcactactctcagacaaagcacaacttttgacactacaaccaagacgatgacactatcatgcaaggcccactatcctctttgttgtcctctcatggatcctggtccagtggtggaggctgaggaatcagaaaggccctagatcatggccagtcatcgacgcaacggtggagcttatggctggaagtaatatgaagagtctatatctgacaaaaaatcatctaaaattaaatagtgagataagctttgaatagctgatgtaaaattatggagtaacattgtattagttgttgacaaaaaatgtgagaaatttaggtcaataataatatatgtattgtttgtttatatgtacttattgtgcactaatattttatcatataatttgtttgttgtcgtaacgcacgagcgtgcattccgacgtgg

SEQ ID NO: 68455 - DNA, 2135 bp, Zea Mays
atccccgcggatctccctgtcgcccccaaccaccttccatccctcgtgacctgttcatgccgtcgccgcctcgatcctgtggatctccctgccgcctcccacgtccgtgctcatgacctgttccgcgtccgctgtcacccccagatcgcgcgaggcccatgtccacgcagtcatcgtcgccgccccctggccacgcgagatgccagcgccccctccaccttgcgtgagcgaccccttcatctaccttcaccaccatcttcaatccgcctctgcatcaccgccaaaaccctacccacttccctgctgcccaacaatgaatctgcctccgcaccaccgccaaaactctagcaactatggcagtgaacaacatccggtttcaagtctttggcagctatgctcatggaaaatacgtctatgttgatggtgaccgatctgttctcgcagaatcagcaaaggcttgatatcattgttgttttgctttatcatttgggcatttgaagcaaagctctatggagaaaaggcagggaaatgttgtctttctcatttttgcaggctgacgaatttaatgcagtggcaagagttggggttgctgctgaccatcgtggaatcatctgcagtcgtcgtgtgtccacactccctaacatgttgagcctcttgctgatcagatcaggcttgagaaggaaaatttggttttaataagtgttcttgtctggttcgattaaagaaagattcagtaattgtcttttttaggaacatagattcttcatctgtgtataatgtatttttattatctagattgtgatagttatttcaaggcctggtgatcgtatagcttgaccattgattgatgattatctgttgtcttaaggattggtacactgtgcactatttagactattgggatcaatgctgtcagagctcataataaattggacgatatacgagaacaaggtcaattctaaaatatatgcagtattgcaatagtggatggaaacagaacaaaatagttgttccttgcaggtattgcaatatctcaaaccagataaaagtaaatttttactcaggtattttcacctatcttattacaattcatcaaggtattttcacctagcttattacaattcatcaatcttgcttcactacccatggtaacttgattattttcatgcactaactttttgacgtcctatttcttttcttttcccctttcacctcaaaacactcattttcatctcaaagcactaattaccagatacgccaatgtcatttaaattaattttcagcagtgctattattttttctgctatttgttttggaccgattaatattttgtgtactcttcctatttattcgtgggactgtaactgcaaagcttgtaactcaagtcatatgtgtcttgtgcctgctgttgtagctatggagcagaaaattcatgtgaacccactgaagatactaagccaaacgaagtgtacacatattcagaattctagctcaagctgccctaatcaactgaggaggataaggatgccgtggattttgagagggaggagcccgccaattgccagaagtctgtgcaagctgatgcaaatgcgacagctgccccgtctaaggctgttggcttcttcgggaggacattatacaccacattaattctgcttgttgcgagccatccagatgtgtatgagccatgtgatgatttctttgcccttgttgatgcactactctcagacaaagcacaacttttgacactacaaccaaacgatgacactatcatgcaaggcccactatcctctttgttgtcctctcatggatcctggtccagtggtggaggctgaggaatcagaaaggccctagatcatggccagtcatcgacgcaacggtggagcttatggctggaagtaatatgaagagtctatatctgacaaaaaatcatctaaaattaaatagtgagataagctttgaatagctgatgtaaaattatggagtaacattgtattagttgttgacaaaaaatgtgagaaatttaggtcaataataatatatgtattgtttgtttatatgtacttattgtgcactaatattttatcatataatttgtttgttgtcgtaacgcacgagcgtgcattccgacgtgg

SEQ ID NO: 68456 - DNA, 1826 bp, Zea Mays
atccccgcggatctccctgtcgcccccaaccaccttccatccctcgtgacctgttcatgccgtcgccgcctcgatcctgtggatctccctgccgcctcccacgtccgtgctcatgacctgttccgcgtccgctgtcacccccagatcgcgcgaggcccatgtccacgcagtcatcgtcgccgccccctggccacgcgagatgccagcgccccctccaccttgcgtgagcgaccccttcatctaccttcaccaccatcttcaatccgcctctgcatcaccgccaaaaccctacccacttccctgctgcccaacaatgaatctgcctccgcaccaccgccaaaactctagcaactatggcagtgaacaacatccggtttcaagtctttggcagctatgctcatggaaaatacgtctatgttgatggtgaccgatctgttctcgcagaatcagcaaaggcttgatatcattgttgttttgctttatcatttgggcatttgaagcaaagctctatggagaaaaggcagggaaatgttgtctttctcatttttgcaggctgacgaatttaatgcagtggcaagagttggggttgctgctgaccatcgtggaatcatctgcagtcgtcgtgtgtccacactccctaacatgttgagcctcttgctgatcagatcaggcttgagaaggaaaatttggttttaataagtgttcttgtctggttcgattaaagaaagattcagtaattgtcttttttaggaacatagattcttcatctgtgtataatgtatttttattatctagattgtgatagttatttcaaggcctggtgatcgtatagcttgaccattgattgatgattatctgttgtcttaaggattggtacactgtatgtgttctttggtgttggtggtactttgctgacttctctatttatggtatcaaatatatctattgagtgttggtacttcaggtgcactatttagactattgggatcaatgctgtcagagctcataataaattggacgatatacgagaacaaggtcaattctaaaatatatgcagtattgcaatagtggatggaaacagaacaaaatagttgttccttgcagctatggagcagaaaattcatgtgaacccactgaagatactaagccaaacgaagtgtacacatattcagaattctagctcaagctgccctaatcaactgaggaggataaggatgccgtggattttgagagggaggagcccgccaattgccagaagtctgtgcaagctgatgcaaatgcgacagctgccccgtctaaggctgttggcttcttcgggaggacattatacaccacattaattctgcttgttgcgagccatccagatgtgtatgagccatgtgatgatttctttgcccttgttgatgcactactctcagacaaagcacaacttttgacactacaaccaagacgatgacactatcatgcaaggcccactatcctctttgttgtcctctcatggatcctggtccagtggtggaggctgaggaatcagaaaggccctagatcatggccagtcatcgacgcaacggtggagcttatggctggaagtaatatgaagagtctatatctgacaaaaaatcatctaaaattaaatagtgagataagctttgaatagctgatgtaaaattatggagtaacattgtattagttgttgacaaaaaatgtgagaaatttaggtcaataataatatatgtattgtttgtttatatgtacttattgtgcactaatattttatcatataatttgtttgttgtcgtaacgcacgagcgtgcattccgacgtgg

SEQ ID NO: 68457 - DNA, 2231 bp, Zea Mays
cgccccatccccgcggatctccctgtcgcccccaaccaccttccatccctcgtgacctgttcatgccgtcgccgcctcgatcctgtggatctccctgccgcctcccacgtccgtgctcatgacctgttccgcgtccgctgtcacccccagatcgcgcgaggcccatgtccacgcagtcatcgtcgccgccccctggccacgcgagatgccagcgccccctccaccttgcgtgagcgaccccttcatctaccttcaccaccatcttcaatccgcctctgcatcaccgccaaaaccctacccacttccctgctgcccaacaatgaatctgcctccgcaccaccgccaaaactctagcaactatggcagtgaacaacatccggtttcaagtctttggcagctatgctcatggaaaatacgtctatgttgatggtgaccgatctgttctcgcagaatcagcaaaggcttgatatcattgttgttttgctttatcatttgggcatttgaagcaaagctctatggagaaaaggcagggaaatgttgtctttctcatttttgcaggctgacgaatttaatgcagtggcaagagttggggttgctgctgaccatcgtggaatcatctgcagtcgtcgtgtgtccacactccctaacatgttgagcctcttgctgatcagatcaggcttgagaaggaaaatttggttttaataagtgttcttgtctggttcgattaaagaaagattcagtaattgtcttttttaggaacatagattcttcatctgtgtataatgtatttttattatctagattgtgatagttatttcaaggcctggtgatcgtatagcttgaccattgattgatgattatctgttgtcttaaggattggtacactgtatgtgttctttggtgttggtggtactttgctgacttctctatttatggtatcaaatatatctattgagtgttggtacttcaggtgcactatttagactattgggatcaatgctgtcagagctcataataaattggacgatatacgagaacaaggtcaattctaaaatatatgcagtattgcaatagtggatggaaacagaacaaaatagttgttccttgcaggtattgcaatatctcaaaccagataaaagtaaatttttactcaggtattttcacctatcttattacaattcatcaaggtattttcacctagcttattacaattcatcaatcttgcttcactacccatggtaacttgattattttcatgcactaactttttgacgtcctatttcttttcttttcccctttcacctcaaaacactcattttcatctcaaagcactaattaccagatacgccaatgtcatttaaattaattttcagcagtgctattattttttctgctatttgttttggaccgattaatattttgtgtactcttcctatttattcgtgggactgtaactgcaaagcttgtaactcaagtcatatgtgtcttgtgcctgctgttgtagctatggagcagaaaattcatgtgaacccactgaagatactaagccaaacgaagtgtacacatattcagaattctagctcaagctgccctaatcaactgaggaggataaggatgccgtggattttgagagggaggagcccgccaattgccagaagtctgtgcaagctgatgcaaatgcgacagctgccccgtctaaggctgttggcttcttcgggaggacattatacaccacattaattctgcttgttgcgagccatccagatgtgtatgagccatgtgatgatttctttgcccttgttgatgcactactctcagacaaagcacaacttttgacactacaaccaaggttatacgatgacactatcatgcaaggcccactatcctctttgttgtcctctcatggatcctggtccagtggtggaggctgaggaatcagaaaggccctagatcatggccagtcatcgacgcaacggtggagcttatggctggaagtaatatgaagagtctatatctgacaaaaaatcatctaaaattaaatagtgagataagctttgaatagctgatgtaaaattatggagtaacattgtattagttgttgacaaaaaatgtgagaaatttaggtcaataataatatatgtattgtttgtttatatgtacttattgtgcactaatattttatcatataatttgtttgttgtcgtaacgcacgagcgtgcattccgacgtgg

SEQ ID NO: 68458 - DNA, 2254 bp, Zea Mays
ccttactcggcaatctcgcagcggtgcccgccccatccccgcggatctccctgtcgcccccaaccaccttccatccctcgtgacctgttcatgccgtcgccgcctcgatcctgtggatctccctgccgcctcccacgtccgtgctcatgacctgttccgcgtccgctgtcacccccagatcgcgcgaggcccatgtccacgcagtcatcgtcgccgccccctggccacgcgagatgccagcgccccctccaccttgcgtgagcgaccccttcatctaccttcaccaccatcttcaatccgcctctgcatcaccgccaaaaccctacccacttccctgctgcccaacaatgaatctgcctccgcaccaccgccaaaactctagcaactatggcagtgaacaacatccggtttcaagtctttggcagctatgctcatggaaaatacgtctatgttgatggtgaccgatctgttctcgcagaatcagcaaaggcttgatatcattgttgttttgctttatcatttgggcatttgaagcaaagctctatggagaaaaggcagggaaatgttgtctttctcatttttgcaggctgacgaatttaatgcagtggcaagagttggggttgctgctgaccatcgtggaatcatctgcagtcgtcgtgtgtccacactccctaacatgttgagcctcttgctgatcagatcaggcttgagaaggaaaatttggttttaataagtgttcttgtctggttcgattaaagaaagattcagtaattgtcttttttaggaacatagattcttcatctgtgtataatgtatttttattatctagattgtgatagttatttcaaggcctggtgatcgtatagcttgaccattgattgatgattatctgttgtcttaaggattggtacactgtatgtgttctttggtgttggtggtactttgctgacttctctatttatggtatcaaatatatctattgagtgttggtacttcaggtgcactatttagactattgggatcaatgctgtcagagctcataataaattggacgatatacgagaacaaggtcaattctaaaatatatgcagtattgcaatagtggatggaaacagaacaaaatagttgttccttgcaggtattgcaatatctcaaaccagataaaagtaaatttttactcaggtattttcacctatcttattacaattcatcaaggtattttcacctagcttattacaattcatcaatcttgcttcactacccatggtaacttgattattttcatgcactaactttttgacgtcctatttcttttcttttcccctttcacctcaaaacactcattttcatctcaaagcactaattaccagatacgccaatgtcatttaaattaattttcagcagtgctattattttttctgctatttgttttggaccgattaatattttgtgtactcttcctatttattcgtgggactgtaactgcaaagcttgtaactcaagtcatatgtgtcttgtgcctgctgttgtagctatggagcagaaaattcatgtgaacccactgaagatactaagccaaacgaagtgtacacatattcagaattctagctcaagctgccctaatcaactgaggaggataaggatgccgtggattttgagagggaggagcccgccaattgccagaagtctgtgcaagctgatgcaaatgcgacagctgccccgtctaaggctgttggcttcttcgggaggacattatacaccacattaattctgcttgttgcgagccatccagatgtgtatgagccatgtgatgatttctttgcccttgttgatgcactactctcagacaaagcacaacttttgacactacaaccaagacgatgacactatcatgcaaggcccactatcctctttgttgtcctctcatggatcctggtccagtggtggaggctgaggaatcagaaaggccctagatcatggccagtcatcgacgcaacggtggagcttatggctggaagtaatatgaagagtctatatctgacaaaaaatcatctaaaattaaatagtgagataagctttgaatagctgatgtaaaattatggagtaacattgtattagttgttgacaaaaaatgtgagaaatttaggtcaataataatatatgtattgtttgtttatatgtacttattgtgcactaatattttatcatataatttgtttgttgtcgtaacgcacgagcgtgcattccgacgtgg

SEQ ID NO: 68459 - DNA, 2268 bp, Zea Mays
cccttactcggcaatctcgcagcggtgcccgccccatccccgcggatctccctgtcgcccccaaccaccttccatccctcgtgacctgttcatgccgtcgccgcctcgatcctgtggatctccctgccgcctcccacgtccgtgctcatgacctgttccgcgtccgctgtcacccccagatcgcgcgaggcccatgtccacgcagtcatcgtcgccgccccctggccacgcgagatgccagcgccccctccaccttgcgtgagcgaccccttcatctaccttcaccaccatcttcaatccgcctctgcatcaccgccaaaaccctacccacttccctgctgcccaacaatgaatctgcctccgcaccaccgccaaaactctagcaactatggcagtgaacaacatccggtttcaagtctttggcagctatgctcatggaaaatacgtctatgttgatggtgaccgatctgttctcgcagaatcagcaaaggcttgatatcattgttgttttgctttatcatttgggcatttgaagcaaagctctatggagaaaaggcagggaaatgttgtctttctcatttttgcaggctgacgaatttaatgcagtggcaagagttggggttgctgctgaccatcgtggaatcatctgcagtcgtcgtgtgtccacactccctaacatgttgagcctcttgctgatcagatcaggcttgagaaggaaaatttggttttaataagtgttcttgtctggttcgattaaagaaagattcagtaattgtcttttttaggaacatagattcttcatctgtgtataatgtatttttattatctagattgtgatagttatttcaaggcctggtgatcgtatagcttgaccattgattgatgattatctgttgtcttaaggattggtacactgtatgtgttctttggtgttggtggtactttgctgacttctctatttatggtatcaaatatatctattgagtgttggtacttcaggtgcactatttagactattgggatcaatgctgtcagagctcataataaattggacgatatacgagaacaaggtcaattctaaaatatatgcagtattgcaatagtggatggaaacagaacaaaatagttgttccttgcaggtattgcaatatctcaaaccagataaaagtaaatttttactcaggtattttcacctatcttattacaattcatcaaggtattttcacctagcttattacaattcatcaatcttgcttcactacccatggtaacttgattattttcatgcactaactttttgacgtcctatttcttttcttttcccctttcacctcaaaacactcattttcatctcaaagcactaattaccagatacgccaatgtcatttaaattaattttcagcagtgctattattttttctgctatttgttttggaccgattaatattttgtgtactcttcctatttattcgtgggactgtaactgcaaagcttgtaactcaagtcatatgtgtcttgtgcctgctgttgtagctatggagcagaaaattcatgtgaacccactgaagatactaagccaaacgaagtgtacacatattcagaattctagctcaagctgccctaatcaactgaggaggataaggatgccgtggattttgagagggaggagcccgccaattgccagaagtctgtgcaagctgatgcaaatgcgacagctgccccgtctaaggctgttggcttcttcgggaggacattatacaccacattaattctgcttgttgcgagccatccagatgtgtatgagccatgtgatgatttctttgcccttgttgatgcactactctcagacaaagcacaacttttgacactacaaccaaggttatgtatgtagacgatgacactatcatgcaaggcccactatcctctttgttgtcctctcatggatcctggtccagtggtggaggctgaggaatcagaaaggccctagatcatggccagtcatcgacgcaacggtggagcttatggctggaagtaatatgaagagtctatatctgacaaaaaatcatctaaaattaaatagtgagataagctttgaatagctgatgtaaaattatggagtaacattgtattagttgttgacaaaaaatgtgagaaatttaggtcaataataatatatgtattgtttgtttatatgtacttattgtgcactaatattttatcatataatttgtttgttgtcgtaacgcacgagcgtgcattccgacgtgg

SEQ ID NO: 68460 - DNA, 2604 bp, Zea Mays
atcaaatccttatcaccagctctggccgtcaaaaccccgctgccctctccatctcggctcctgggcatcagcccccacgccagaagctagggcatcgtccccttgatgtttcccatggccgcctccagctcctcccatggcgcctctcctgtatttctctggccgttagctgcggcgctcgccgtgggcgctgccgtgcccctgtctagttctccacgtcgtcgctgagctcgcccctgccttagtccggtcgcctctgttccctcctctctgtccgtctggtggcaagtcaccgtcgaccctgccatggtgttggctgccgcagcacctgcgtccttgcttcgccggtccgcgtaggtctgaccatggagctcgcccaactccctagccacctctgctcgcccctctctatctcagttcgagcagcagcacgccggggcaaacctatgtccgcgacactcaccaagtgctcgatgaaatactgcagcgagctccacctcgatctgtgcagccccaacccgtgacgtcacaatacccttaccctctgtcgatgtcgtgcatcgcgagctcgacaaaaatctcaagcccgtggacagcacacgcgcgacccgagtttgattctgccaggtacgttaattaatcacgtaaggcggaggaccagagctgagtcgaccacaagatgctattaagcatgggctacaccgcatggtgatgctgatggacgaccctggagatggaaaatctaaacaagtgccaaaacaaaaggatggtcgtcaagtgatcgtcggctaacaaacactaacgtagtgtttattccaggcaagccccggtgcatgcaatcccttccttgtgtttttaaatgatttttacacactttaagtctagtgaaatgtgcattaagtttataggagttgcttggaaaccctttgatgcattggctaccttgaaatccattccttttatagatacttatggtgaagtatcaaatatgatttacaaaattgcttagccctgcctagaggaaaatcttgcagatagagtttgtcctttgcactaatgcctaactcaggtttatcctaaggaaggatggctctacctacaagaatattttcaccaggatcattgggagatctaatgcaaggtttcctatgatgttttaatcatcctaaggaacacaaacaatcctaaggatggaagtacttaaatcgagacttgggctaggaacaggtgatgttctacccaggttgattaaggattatagggaatgtaggcttgttgatcgaggaccttttaactggccacatgcctcgtcatgggtaagctttgtctcggtcggaccaataccagaaaggccaccacacaatgtgagtggagagatggcgagaatagcgtgtaccctccgtggcaagaggctggacggtggtgtatttgtgctctcggttggcgtgaacccgttctggtcttgaaaaacctagtggcgtgttgacatatgcaagggttaagtgctacatatgtcgtgtggttggagatccccagctgggtattaatcgattcggatcgccgttacttctcggatatgaagacttggtcactgccctgcaatctaagtcatggatggaatcataatgagcaaaaatcatgttgtattgattaatgtgatgatgaaattagactagatacaaacaaggtctattaatacttaatctagcattaaaatgttgaaagtaaggactcattttagtaagctttcttcaaactattaatgttgattcttgctaaaagtctttccttcattcccaaatccagcatatccttgagagtctttttccttagtcggataagacttgcgaaagtacacttcgtactcagggttttcgaactcatgttgttgtaggtactagatttgtgctgttgttgatggtgctaagtgccggtgggctcggccttcttataggttctatacttcttattgaggattgtcattgagctagcatatatttcaaacttataaatagtttataacatttcaaattttatttctttgaatcacttctgtaatcactccgataaatataatgtaaatttgttgtaacttgtaacttttgtaataaagaaattccgctgcaaaaatgttggtgtgtgatttttgtttacttaatcttgcgatcttggttgtaagtggtttatccgaggtccttgggacacttggacggatcctgttaagttatctggtgcacatgtatagccgtctgaggtctttgagacgaggtcaggtgcatgtgggcccaataacttgggaggttctgccacaacagacatgcctccctgtttgagatataagaattatttctttttaatcttcataagaccagcaggaatatggtaaatctttgaattgagtggagaattctgcccaggtgatggtgttggcagcagcatgagcagtgcaatatgcatcccaccaatccgtagctgggccggtgaggcgacctgatgcatataacaccttctctctatcagagaactaagccatgttgagcatcttggccacagactttaaccagtcatcagtttgtagtggatccgaggggttagaaaatgtgg

SEQ ID NO: 68461 - DNA, 3098 bp, Zea Mays
caacgagatgcaaccaaatccccgtccactccaccagctctgcaatccgacaagagatttgccaattatttctcctagaaaaaccgatcgcatcagtccccatcctcttcgccgtggggtcggcaggcagggcaaggctaggcagcgcctctccgcgtgtggtccgtgtgcgagggtccgctcctcctcccctccgtgcacccggagggcagcggcgtctcttcttcctggtcgaatctccccgcggctgtgaataggaggaggtcgacgacgccatagcaaaaaacaaatccttggaatgctttcggagggtcggggattcgtcgccggctgcctgcactgatgcttggagcgcgcgaatctgctcaagttttgatcttggcgtgctcttgagtctggaatccgggcattcattggggctttgttctcagtttgcaaggctgcaaggccgtgctagtttgaacccatggagactactagcacaacaaatgaacagactgataggggggcgatgtgggagttggaaaggaatctcgatcagcccatggatgcagaggccggcagattgagaaatatgtacagggaaaagtcctaccctacacttgtgctgttacaacttgctttccaaagccttggtgtggtgtttggggatttaggcacatcacctttatatgtcttctccaacattttccctcatgaaattgaagacacggaacaaattattggagcactctcgcttgttatttactcccttaccctgattccacttgttaagtacgtgttcattgtcttgagggcaaatgataatggccaaggtggaacatttgctctttactcgttgctttgccggcatgcaaagataaacactattccgaatcagcatagaacagatgaagaactaacaacatacagccgccacacatatgatgagaaatctcttgctgcaaagatcaaaaggtggttagaggggcaccaattcagaaagaatgtcattcttattcttgttctttttggtacttgtatggcagttggagatggaatcctcactcctgcaatatcagttctttctgcaactggaggaatacaagtggaagagaaaaaaatgaaaaatggtacatgtgaaaactggaaatgcggttgtcatcgtctctgtggtcatattgattggattattcagcatgcagcactttggtactgataaagtcagttggctttttgcgccgatagtatttgtttggttcatactcattggagtcctgggcgctgtaaacatttccaaatatgaccaatctgttctcaaggcttttaatcctatctatgtatatcggtactttaagcgagggaagactagctgggcttctttgggaggaattatgcttagcattacaggaacagaagcactgtttgctgatctctcatatttccctgtacaagctattcagattgctttcacggtggttgtgtttccatgtcttcttttgcagtatacaggccaagctgcctatatagctcagaacaaagatcatgtctcccatgccttctatttttcccttccagattctgtactctggccatcattcattgttgcaacagctgctgcaatagttgctagtcaggcaactatatcgatgacatattcgattatcaagcaagcacttgctctagggtgcttccccagagtgagaattatccatacttccaagaagtatctaggccagatatacagtcccgatattaattggatccttctggtattctgcattgctgtcactgctggatttaaaaaccaaagccagatagcaaatgcatacggtactgccgtgataatggttatgcttgtgacaacatttctcatgatccctataatgctgttggtgtggcgcagccactggaccttggtcatcctgttcaccgtgctgtcactgtttgttgaaattccgtacttcaccgctgtggtgcggaagatcgaccagggtggctgggttccacttgtgtttgctgttgccttcctcatcatcatgtatgtatggcactatggtacgctcaagcggtatgagtttgagatgcacagcaaggtgtccatggcatggatcctaggccttggtccaagcctcggtctggtcagggtgcctggtgtgggcctggtgtacaccgagctggcaagtggtgttcctcacatcttctcacacttcatcaccaacctccctgccatccactccaccctggtctttgtgtgtgtgaaataccttcctgtctacactgtgccactggatgaaaggttccttgtgaagcgaattggtcccaagaacttccacatgtttagatgcgtggcgcggtatggctacaaggacatccacaagaaggatgatgacttcgagcagatgctcttcgacagcctgatgctattcgtcaggctggagagcatgatggaagagtacacggattctgatgagtacagcacccgtgagacgaacctgtcaggcagcgccaacccaagaatcaatggcatcagcgccggttcaaacatggatctcagctacacatcccatgactccattatacaggtgcagtccccaaattatacggggaacagccaggcggtgtcaccaggtcagctgtaccataccgtgggcgacgagattgcgttcctgaacgcgtgcagggacgccggggtggtgcacatcctcgggaacacagtcatcagggcccgcagagattcagggttcatcaagaagattgctatcaattacttgtatgctttccttaggaagatctgcagggagaacagcgccatcttcaatgttccccatgagagcctactgaatgttgggcaggtgttctatgtgtaagcactaaaaccaaacacatgtagtagatgagagttcagcttcggaaccactggagagaatctagctgtgttttgttcataggtaataggagtataatagttgaaagaattgtacagcaaaacagcatctttaatgtgaccatttggagcctgatcagtagtggctagggctggacgaaatacttgtggctcgataactcgctcgactcggctcgttttgattctgtagcgagccaagctagcattttag

SEQ ID NO: 68462 - DNA, 3038 bp, Zea Mays
caacgagatgcaaccaaatccccgtccactccaccagctctgcaatccgacaagagatttgccaattatttctcctagaaaaaccgatcgcatcagtccccatcctcttcgccgtggggtcggcaggcagggcaaggctaggcagcgcctctccgcgtgtggtccgtgtgcgagggtccgctcctcctcccctccgtgcacccggagggcagcggcgtctcttcttcctggtcgaatctccccgcggctgtgaataggaggaggtcgacgacgccatagcaaaaaacaaatccttggaatgctttcggagggtcggggattcgtcgccggctgcctgcactgatgcttggagcgcgcgaatctgctcaagttttgatcttggcgtgctcttgagtctggaatccgggcattcattggggctttgttctcagtttgcaaggctgcaaggccgtgctagtttgaacccatggagactactagcacaacaaatgaacagactgataggggggcgatgtgggagttggaaaggaatctcgatcagcccatggatgcagaggccggcagattgagaaatatgtacagggaaaagtcctaccctacacttgtgctgttacaacttgctttccaaagccttggtgtggtgtttggggatttaggcacatcacctttatatgtcttctccaacattttccctcatgaaattgaagacacggaacaaattattggagcactctcgcttgttatttactcccttaccctgattccacttgttaagtacgtgttcattgtcttgagggcaaatgataatggccaaggtggaacatttgctctttactcgttgctttgccggcatgcaaagataaacactattccgaatcagcatagaacagatgaagaactaacaacatacagccgccacacatatgatgagaaatctcttgctgcaaagatcaaaaggtggttagaggggcaccaattcagaaagaatgtcattcttattcttgttctttttggtacttgtatggcagttggagatggaatcctcactcctgcaatatcagttctttctgcaactggaggaatacaagtggaagagaaaaaaatgaaaaatgatgcggttgtcatcgtctctgtggtcatattgattggattattcagcatgcagcactttggtactgataaagtcagttggctttttgcgccgatagtatttgtttggttcatactcattggagtcctgggcgctgtaaacatttccaaatatgaccaatctgttctcaaggcttttaatcctatctatgtatatcggtactttaagcgagggaagactagctgggcttctttgggaggaattatgcttagcattacaggaacagaagcactgtttgctgatctctcatatttccctgtacaagctattcaggtaatgtcggacaagagggactcttggtttaccatgtatatgtgtttgcacgttgacacgattatttggtacagattctgtactctggccatcattcattgttgcaacagctgctgcaatagttgctagtcaggcaactatatcgatgacatattcgattatcaagcaagcacttgctctagggtgcttccccagagtgagaattatccatacttccaagaagtatctaggccagatatacagtcccgatattaattggatccttctggtattctgcattgctgtcactgctggatttaaaaaccaaagccagatagcaaatgcatacggtactgccgtgataatggttatgcttgtgacaacatttctcatgatccctataatgctgttggtgtggcgcagccactggaccttggtcatcctgttcaccgtgctgtcactgtttgttgaaattccgtacttcaccgctgtggtgcggaagatcgaccagggtggctgggttccacttgtgtttgctgttgccttcctcatcatcatgtatgtatggcactatggtacgctcaagcggtatgagtttgagatgcacagcaaggtgtccatggcatggatcctaggccttggtccaagcctcggtctggtcagggtgcctggtgtgggcctggtgtacaccgagctggcaagtggtgttcctcacatcttctcacacttcatcaccaacctccctgccatccactccaccctggtctttgtgtgtgtgaaataccttcctgtctacactgtgccactggatgaaaggttccttgtgaagcgaattggtcccaagaacttccacatgtttagatgcgtggcgcggtatggctacaaggacatccacaagaaggatgatgacttcgagcagatgctcttcgacagcctgatgctattcgtcaggctggagagcatgatggaagagtacacggattctgatgagtacagcacccgtgagacgaacctgtcaggcagcgccaacccaagaatcaatggcatcagcgccggttcaaacatggatctcagctacacatcccatgactccattatacaggtgcagtccccaaattatacggggaacagccaggcggtgtcaccaggtcagctgtaccataccgtgggcgacgagattgcgttcctgaacgcgtgcagggacgccggggtggtgcacatcctcgggaacacagtcatcagggcccgcagagattcagggttcatcaagaagattgctatcaattacttgtatgctttccttaggaagatctgcagggagaacagcgccatcttcaatgttccccatgagagcctactgaatgttgggcaggtgttctatgtgtaagcactaaaaccaaacacatgtagtagatgagagttcagcttcggaaccactggagagaatctagctgtgttttgttcataggtaataggagtataatagttgaaagaattgtacagcaaaacagcatctttaatgtgaccatttggagcctgatcagtagtggctagggctggacgaaatacttgtggctcgataactcgctcgactcggctcgttttgattctgtagcgagccaagctagcattttag

SEQ ID NO: 68463 - DNA, 3084 bp, Zea Mays
attagattattgctgatgctcctctattattgagtgcaaacggatcgcaacgagatgcaaccaaatccccgtccactccaccagctctgcaatccgacaagagatttgccaattatttctcctagaaaaaccgatcgcatcagtccccatcctcttcgccgtggggtcggcaggcagggcaaggctaggcagcgcctctccgcgtgtggtccgtgtgcgagggtccgctcctcctcccctccgtgcacccggagggcagcggcgtctcttcttcctggtcgaatctccccgcggctgtgaataggaggaggtcgacgacgccatagcaaaaaacaaatccttggaatgctttcggagggtcggggattcgtcgccggctgcctgcactgatgcttggagcgcgcgaatctgctcaagttttgatcttggcgtgctcttgagtctggaatccgggcattcattggggctttgttctcagtttgcaaggctgcaaggccgtgctagtttgaacccatggagactactagcacaacaaatgaacagactgataggggggcgatgtgggagttggaaaggaatctcgatcagcccatggatgcagaggccggcagattgagaaatatgtacagggaaaagtcctaccctacacttgtgctgttacaacttgctttccaaagccttggtgtggtgtttggggatttaggcacatcacctttatatgtcttctccaacattttccctcatgaaattgaagacacggaacaaattattggagcactctcgcttgttatttactcccttaccctgattccacttgttaagtacgtgttcattgtcttgagggcaaatgataatggccaaggtggaacatttgctctttactcgttgctttgccggcatgcaaagataaacactattccgaatcagcatagaacagatgaagaactaacaacatacagccgccacacatatgatgagaaatctcttgctgcaaagatcaaaaggtggttagaggggcaccaattcagaaagaatgtcattcttattcttgttctttttggtacttgtatggcagttggagatggaatcctcactcctgcaatatcagttctttctgcaactggaggaatacaagtggaagagaaaaaaatgaaaaatgatgcggttgtcatcgtctctgtggtcatattgattggattattcagcatgcagcactttggtactgataaagtcagttggctttttgcgccgatagtatttgtttggttcatactcattggagtcctgggcgctgtaaacatttccaaatatgaccaatctgttctcaaggcttttaatcctatctatgtatatcggtactttaagcgagggaagactagctgggcttctttgggaggaattatgcttagcattacaggaacagaagcactgtttgctgatctctcatatttccctgtacaagctattcagtatacaggccaagctgcctatatagctcagaacaaagatcatgtctcccatgccttctatttttcccttccagattctgtactctggccatcattcattgttgcaacagctgctgcaatagttgctagtcaggcaactatatcgatgacatattcgattatcaagcaagcacttgctctagggtgcttccccagagtgagaattatccatacttccaagaagtatctaggccagatatacagtcccgatattaattggatccttctggtattctgcattgctgtcactgctggatttaaaaaccaaagccagatagcaaatgcatacggtactgccgtgataatggttatgcttgtgacaacatttctcatgatccctataatgctgttggtgtggcgcagccactggaccttggtcatcctgttcaccgtgctgtcactgtttgttgaaattccgtacttcaccgctgtggtgcggaagatcgaccagggtggctgggttccacttgtgtttgctgttgccttcctcatcatcatgtatgtatggcactatggtacgctcaagcggtatgagtttgagatgcacagcaaggtgtccatggcatggatcctaggccttggtccaagcctcggtctggtcagggtgcctggtgtgggcctggtgtacaccgagctggcaagtggtgttcctcacatcttctcacacttcatcaccaacctccctgccatccactccaccctggtctttgtgtgtgtgaaataccttcctgtctacactgtgccactggatgaaaggttccttgtgaagcgaattggtcccaagaacttccacatgtttagatgcgtggcgcggtatggctacaaggacatccacaagaaggatgatgacttcgagcagatgctcttcgacagcctgatgctattcgtcaggctggagagcatgatggaagagtacacggattctgatgagtacagcacccgtgagacgaacctgtcaggcagcgccaacccaagaatcaatggcatcagcgccggttcaaacatggatctcagctacacatcccatgactccattatacaggtgcagtccccaaattatacggggaacagccaggcggtgtcaccaggtcagctgtaccataccgtgggcgacgagattgcgttcctgaacgcgtgcagggacgccggggtggtgcacatcctcgggaacacagtcatcagggcccgcagagattcagggttcatcaagaagattgctatcaattacttgtatgctttccttaggaagatctgcagggagaacagcgccatcttcaatgttccccatgagagcctactgaatgttgggcaggtgttctatgtgtaagcactaaaaccaaacacatgtagtagatgagagttcagcttcggaaccactggagagaatctagctgtgttttgttcataggtaataggagtataatagttgaaagaattgtacagcaaaacagcatctttaatgtgaccatttggagcctgatcagtagtggctagggctggacgaaatacttgtggctcgataactcgctcgactcggctcgttttgattctgtagcgagccaagctagcattttag

SEQ ID NO: 68464 - DNA, 868 bp, Zea Mays
agaattaacccttctatttttcttttatacagtgccgctggaccacatacgattgttgatggtaaagaagttgtgaactttgcatcagcaaactacctcggtttaattggcaacgaaaagattattgattcttgcatcagttcattggagaaatatggtgttggttcttgtggtccacgtggcttttatggaacaattgatgtccatcttgactgtgagtcaaagatagctaaatttttggggactccagactccattctttattcatatgggatttctacaatattcagtgtgatacatgccttctgtaagaaagaagatatcatagtcgcgtaagttcaccgtattaaaaaattatgaaattcacaagtattattggaaccttgacttgtttggtgtatcgaggtctgcatgcttggccttttagacataatatggatttatccagctcaactttaggctttagcacaacattgtcatctctttcttgtgtctattgatgagttgtttttcctctgtcagttaactgtacatgggtagtttgatgtgattgcagtaacgagggtgttgactgtttggtgaaatgcttgggacaaagtggccagcaagaatggagtcatggaacatcgacaggaggggtgaggcagcggcaaccgatgtatcccttggacaatctggttttgacatgatgcaaatcaatctgctgtacactgtattccgcacttgcatagattgtttggttaattacaagattatctcagtgttttggtttggatttagagtacacttatgtatgaaatattgattggtactcatgtatattatattaattatattattattaaatatatgtgtatgtatttctctt

SEQ ID NO: 68465 - DNA, 660 bp, Zea Mays
agaattaacccttctatttttcttttatacagtgccgctggaccacatacgattgttgatggtaaagaagttgtgaactttgcatcagcaaactacctcggtttaattggcaacgaaaagattattgattcttgcatcagttcattggagaaatatggtgttggttcttgtggtccacgtggcttttatggaacaattgatgtccatcttgactgtgagtcaaagatagctaaatttttggggactccagactccattctttattcatatgggatttctacaatattcagtgtgatacatgccttctgtaagaaagaagatatcatagtcgctttgatgtgattgcagtaacgagggtgttgactgtttggtgaaatgcttgggacaaagtggccagcaagaatggagtcatggaacatcgacaggaggggtgaggcagcggcaaccgatgtatcccttggacaatctggttttgacatgatgcaaatcaatctgctgtacactgtattccgcacttgcatagattgtttggttaattacaagattatctcagtgttttggtttggatttagagtacacttatgtatgaaatattgattggtactcatgtatattatattaattatattattattaaatatatgtgtatgtatttctctt

SEQ ID NO: 68466 - DNA, 1450 bp, Zea Mays
tcgttgcggacccgccactcaccgcttctctcgaccgcatctcttctccgcgccgccgctcgcctgcacttctacgtgtgaaacgcgtccgcgcctatggcctgcccgtgcccagctgccccctctccacgcgagcctctctaggcgtcaagcgtgccattaagcaaccgtggcccccacccctcctcggctctctgcgtgagcacaagcatgtctctgtagcccatgttcaacggatttgaaagttctaggtgtcagtgctagaggatttggaaaggcgctgtttgataagaagacaaacccgtgtcctggcaagtggatacctgtagcccgtatggaccagtttcttttatcattttaccttgtctctccatgtattgctcaatttggatactgcagagagaacacgagagaaactgttgttgaggagatctgcaatttcgatatatctttatatgttatctctagtctagtgatagtacaaatctcatcttaaatgaagcttgtttgacggtctgagtgaagtcaatgtatatagcaatataaagtttgctatattgagaaaaatatttaaaagcattatgggaaacaagtgaaagaatgtgggtattattaagtatgccggggccgacatacttattttgaataagtatgccaattttcagcccctggcgtacttaattttaaaaacatctgttaagcttgtacccacatacttctcatgttgagctgtatgtcagattagtcaaaattatggaattgtaatcctctgctcttaatcttctagtactatttgggatcaatttgttgcaagctagcaaacatttactgtctactatgatatagtaataaattatacgccattactgtgttgcagtgctgcttttttgggacatatttactgtacttgctattaaatttattgagagtgcatgcccaatagtagtttgtttttacaccgtacacaatttattcttgttttatacgaacggcaaatttggtgctgtcttaatcctgagtcttttgtgtcttgaaaaacattaagttatacctacggaagctcttattggctaataaattatgttcagttatcatgcaagccttttcttaagttttagcttggacaacatcaaggattgaaggtggattctacgcttgctgtgcagaatcaaaaacttcatattgccataacagttcacttaacttcttttaattaaatttgatccatgagctagcactccataggacgttttcctaagagtgtggtactaatccttgcttaggtattatgctatcagttagcatgtatttatgaatggagaatatggaattgtaattctctgcctaaaacttctagtagttctatctgggatctttttgaaatgtatttgttgctattttcttttctaaaactatattctaaattttattttcaggaaacaggtcaccc

SEQ ID NO: 68467 - DNA, 1460 bp, Zea Mays
cctaacccttcggccttcgttgcggacccgccactcaccgcttctctcgaccgcatctcttctccgcgccgccgctcgcctgcacttctacgtgtgaaacgcgtccgcgcctatggcctgcccgtgcccagctgccccctctccacgcgagcctctctaggcgtcaagcgtgccattaagcaaccgtggcccccacccctcctcggctctctgcgtgagcacaagcatgtctctgtagcccatgttcaacggatttgaaaggtgtcagtgctagaggatttggaaaggcgctgtttgataagaagacaaacccgtgtcctggcaagtggatacctgtagcccgtatggaccagtttcttttatcattttaccttgtctctccatgtattgctcaatttggatactgcagagagaacacgagagaaactgttgttgaggagatctgcaatttcgatatatctttatatgttatctctagtctagtgatagtacaaatctcatcttaaatgaagcttgtttgacggtctgagtgaagtcaatgtatatagcaatataaagtttgctatattgagaaaaatatttaaaagcattatgggaaacaagtgaaagaatgtgggtattattaagtatgccggggccgacatacttattttgaataagtatgccaattttcagcccctggcgtacttaattttaaaaacatctgttaagcttgtacccacatacttctcatgttgagctgtatgtcagattagtcaaaattatggaattgtaatcctctgctcttaatcttctagtactatttgggatcaatttgttgcaagctagcaaacatttactgtctactatgatatagtaataaattatacgccattactgtgttgcagtgctgcttttttgggacatatttactgtacttgctattaaatttattgagagtgcatgcccaatagtagtttgtttttacaccgtacacaatttattcttgttttatacgaacggcaaatttggtgctgtcttaatcctgagtcttttgtgtcttgaaaaacattaagttatacctacggaagctcttattggctaataaattatgttcagttatcatgcaagccttttcttaagttttagcttggacaacatcaaggattgaaggtggattctacgcttgctgtgcagaatcaaaaacttcatattgccataacagttcacttaacttcttttaattaaatttgatccatgagctagcactccataggacgttttcctaagagtgtggtactaatccttgcttaggtattatgctatcagttagcatgtatttatgaatggagaatatggaattgtaattctctgcctaaaacttctagtagttctatctgggatctttttgaaatgtatttgttgctattttcttttctaaaactatattctaaattttattttcaggaaacaggtcaccc

SEQ ID NO: 68468 - DNA, 275 bp, Zea Mays
cctaacccttcggccttcgttgcggacccgccactcaccgcttctctcgaccgcatctcttctccgcgccgccgctcgcctgcacttctacgtgtgaaacgcgtccgcgcctatggcctgcccgtgcccagctgccccctctccacgcgagcctctctaggcgtcaagcgtgccattaagcaaccgtggcccccacccctcctcggctctctgcgtgagcacaagcatgtctctgtagcccatgttcaacggatttgaaaggaaacaggtcaccc

SEQ ID NO: 68469 - DNA, 1759 bp, Zea Mays
cccaccctgctgtgcccggctcccgtccaatagaaatacaccgaccctgcgaggctgcgacgtcgcaagtaggacaccctccccgtcggattgggatcctcgccagtcgactggccgcggagcccatagccggccaattccgacgccatggccgaccacgacgacgctgccgtcctctcggacgtcgacgaggaccttctcccatcatcatccccctccatctcttctgcctcctcccacaaaaccctaccgcaagcccaacccctgccacagtccgatgcccaggcacaacagcagcggctgctggccctggccgcggagctcgaggaggagcgccgcctccgccacgcagccgaggcctccatcgcgggggccgagtcccgcgtcgcccgctacaaggccttcgcgcaggacgtgctccgcaagagcgacgccctcaccgccgaggccgcggactccgcgcggtccctcgccgcgctccaggccgaggccaccaccgcctcctccatgctctcctccggcttcgagaggatctccgccaaggcctccccttccgcggccgccgccccgctccccacctcccagaagtactcctccggcctcccggccctcgcgtacggcgtcctcaagcgcgccaacgacatcgtggacgacctcctagcccagatcaacgctgctaaccgcgaccgcgatcgcgcgcgcgagcagatggaacaccgcaactaccagatcgccatcgaggtctctgagctcgaggcgtcgctcgcatccaggtctgccgagggcgaatccctctccaagtcactctcccagcgagaagctgagatctccgagctccgtgacaaaatcacctctctcgaggggaagctcgatgcccagaggcccgtgctggcggagcagatcgaatgcacctcgaagctgtaccacgagatgcggcaggtggtcaagctggtcgatgctgaagctgccagtgccctgtccgattcggtttttgtctggaaggagtctgacgttgaggagagccttaaggtgtctctggaagggacgaaattggcctatgagcttgcggcaatggcccttgagaaggtcggagcttgtatcaatgacaaggagagcaagctgatgcgtttggaggacagggtggatgaactgattaaagagaaggagcacattagtgtgctgctccggagcgcgctgcaggcaaccaccagtgaggtgttaaaggttgcagaggatggactgagggaagctggcattgagattgggcttgatgagcgaaaggtgcacgggccagggaatgtggagaaggacgaggtctataccctggcaggggctctcgagaataccatgaaggaatcccaggtcaggatcattgagctccaacatcttgtcgaagcactaagaatctggtttacttagaacaaggctagaaggacaagaaaaggagattggtcagctaagaaagcaaataaagcacgttgaagagaaggaaagggtggcaaatgaaagtgttgagggtcttatgatggatgtgacagctgctgaagaggagattaaacggtggaagatggcagcagaggaagaagctgaagctggtagatcaattgagcaagagtttcaaattcagcctcgcaggcactgcagtaccgcaccagacggccagaccacaccggaggcagcctctccctagtttcagcttgtccaccgcgttcccttgggtgcataactaattgtagtatcgaaatgttatttcaacggg

SEQ ID NO: 68470 - DNA, 2658 bp, Zea Mays
cccaccctgctgtgcccggctcccgtccaatagaaatacaccgaccctgcgaggctgcgacgtcgcaagtaggacaccctccccgtcggattgggatcctcgccagtcgactggccgcggagcccatagccggccaattccgacgccatggccgaccacgacgacgctgccgtcctctcggacgtcgacgaggaccttctcccatcatcatccccctccatctcttctgcctcctcccacaaaaccctaccgcaagcccaacccctgccacagtccgatgcccaggcacaacagcagcggctgctggccctggccgcggagctcgaggaggagcgccgcctccgccacgcagccgaggcctccatcgcgggggccgagtcccgcgtcgcccgctacaaggccttcgcgcaggacgtgctccgcaagagcgacgccctcaccgccgaggccgcggactccgcgcggtccctcgccgcgctccaggccgaggccaccaccgcctcctccatgctctcctccggcttcgagaggatctccgccaaggcctccccttccgcggccgccgccccgctccccacctcccagaagtactcctccggcctcccggccctcgcgtacggcgtcctcaagcgcgccaacgacatcgtggacgacctcctagcccagatcaacgctgctaaccgcgaccgcgatcgcgcgcgcgagcagatggaacaccgcaactaccagatcgccatcgaggtctctgagctcgaggcgtcgctcgcatccaggtctgccgagggcgaatccctctccaagtcactctcccagcgagaagctgagatctccgagctccgtgacaaaatcacctctctcgaggggaagctcgatgcccagaggcccgtgctggcggagcagatcgaatgcacctcgaagctgtaccacgagatgcggcaggtggtcaagctggtcgatgctgaagctgccagtgccctgtccgattcggtttttgtctggaaggagtctgacgttgaggagagccttaaggtgtctctggaagggacgaaattggcctatgagcttgcggcaatggcccttgagaaggtcggagcttgtatcaatgacaaggagagcaagctgatgcgtttggaggacagggtggatgaactgattaaagagaaggagcacattagtgtgctgctccggagcgcgctgcaggcaaccaccagtgaggtgttaaaggttgcagaggatggactgagggaagctggcattgagattgggcttgatgagcgaaaggtgcacgggccagggaatgtggagaaggacgaggtctataccctggcaggggctctcgagaataccatgaaggaatcccaggtcaggatcattgagctccaacatcttgtcgaagcactaagaatctggtttacttagaacaaggctagaaggacaagaaaaggagattggtcagctaagaaagcaaataaagcacgttgaagagaaggaaagggtggcaaatgaaagtgttgagggtcttatgatggatgtgacagctgctgaagaggagattaaacggtggaagatggcagcagaggaagaagctgaagctggtagatcaattgagcaagagtttcaaattcagatatcatccctccgcaaggaattggacgaagctaaacaagctatggtggagctagaaaacaagctgaagttcaaggaagagacagctgctgctgcaatggcggcgcgcgatgctgcggagaagtctctaaagctagcagacatgcggtcgtccagactacgcgagaggctggaggagcttaacaggcagctcgaagaatcagatagtagaatagactcggtaaatcgcaatggccataggaggtacatgtgctggccatggcagtggttgggactgaactacaactacgtgcggttacctccagtggaggcagatgagacgtccaatgagatggagctatctgaacccctaataatataggtgctccggcctccacatttatacagatcccgctctttttcagtagataaaggggaacagtagacttttgttttttttggtttgggttcttgtgtagatgtttttttcctaatttattgatgcatgttttgcggaaaactgacgggtaattgtaaaaaggtaccacttgggacatacatagtagtgagatgatgagaagttcattctttgacgagactgttctggtttaagatgatggaacagatctcacttggtcttcagtgcgataaccatatgctacttagatggcacatggtaaagaggaaatctaagtttctataggtggacagtttgacttgagtgcacagatataaagttgtggatgtttcagaagctatttgtgggaccgcatggagttattttgaaccgagtgtccgtgaaggaataaaaacatgtcattctgtctcggcgcgcagagcaggcgagtcaagcccgtgtcgtggcacgcggattgcttccttccgtccaggcatcgatgttcctttcaagcaaaaatcttgttgatgcttctctgcagacaaaatgtggtcttgcttttgagtttcatcttaagccataatccggagtatcccaaggaggatgccagagtttcttacttgctagctaatccaggaacccaatcaccaatccag

SEQ ID NO: 68471 - DNA, 2663 bp, Zea Mays
cccaccctgctgtgcccggctcccgtccaatagaaatacaccgaccctgcgaggctgcgacgtcgcaagtaggacaccctccccgtcggattgggatcctcgccagtcgactggccgcggagcccatagccggccaattccgacgccatggccgaccacgacgacgctgccgtcctctcggacgtcgacgaggaccttctcccatcatcatccccctccatctcttctgcctcctcccacaaaaccctaccgcaagcccaacccctgccacagtccgatgcccaggcacaacagcagcggctgctggccctggccgcggagctcgaggaggagcgccgcctccgccacgcagccgaggcctccatcgcgggggccgagtcccgcgtcgcccgctacaaggccttcgcgcaggacgtgctccgcaagagcgacgccctcaccgccgaggccgcggactccgcgcggtccctcgccgcgctccaggccgaggccaccaccgcctcctccatgctctcctccggcttcgagaggatctccgccaaggcctccccttccgcggccgccgccccgctccccacctcccagaagtactcctccggcctcccggccctcgcgtacggcgtcctcaagcgcgccaacgacatcgtggacgacctcctagcccagatcaacgctgctaaccgcgaccgcgatcgcgcgcgcgagcagatggaacaccgcaactaccagatcgccatcgaggtctctgagctcgaggcgtcgctcgcatccaggtctgccgagggcgaatccctctccaagtcactctcccagcgagaagctgagatctccgagctccgtgacaaaatcacctctctcgaggggaagctcgatgcccagaggcccgtgctggcggagcagatcgaatgcacctcgaagctgtaccacgagatgcggcaggtggtcaagctggtcgatgctgaagctgccagtgccctgtccgattcggtttttgtctggaaggagtctgacgttgaggagagccttaaggtgtctctggaagggacgaaattggcctatgagcttgcggcaatggcccttgagaaggtcggagcttgtatcaatgacaaggagagcaagctgatgcgtttggaggacagggtggatgaactgattaaagagaaggagcacattagtgtgctgctccggagcgcgctgcaggcaaccaccagtgaggtgttaaaggttgcagaggatggactgagggaagctggcattgagattgggcttgatgagcgaaaggtgcacgggccagggaatgtggagaaggacgaggtctataccctggcaggggctctcgagaataccatgaaggaatcccaggtcaggatcattgagctccaacatcttgtcgaagcactaagggcagaatctggtttacttagaacaaggctagaaggacaagaaaaggagattggtcagctaagaaagcaaataaagcacgttgaagagaaggaaagggtggcaaatgaaagtgttgagggtcttatgatggatgtgacagctgctgaagaggagattaaacggtggaagatggcagcagaggaagaagctgaagctggtagatcaattgagcaagagtttcaaattcagatatcatccctccgcaaggaattggacgaagctaaacaagctatggtggagctagaaaacaagctgaagttcaaggaagagacagctgctgctgcaatggcggcgcgcgatgctgcggagaagtctctaaagctagcagacatgcggtcgtccagactacgcgagaggctggaggagcttaacaggcagctcgaagaatcagatagtagaatagactcggtaaatcgcaatggccataggaggtacatgtgctggccatggcagtggttgggactgaactacaactacgtgcggttacctccagtggaggcagatgagacgtccaatgagatggagctatctgaacccctaataatataggtgctccggcctccacatttatacagatcccgctctttttcagtagataaaggggaacagtagacttttgttttttttggtttgggttcttgtgtagatgtttttttcctaatttattgatgcatgttttgcggaaaactgacgggtaattgtaaaaaggtaccacttgggacatacatagtagtgagatgatgagaagttcattctttgacgagactgttctggtttaagatgatggaacagatctcacttggtcttcagtgcgataaccatatgctacttagatggcacatggtaaagaggaaatctaagtttctataggtggacagtttgacttgagtgcacagatataaagttgtggatgtttcagaagctatttgtgggaccgcatggagttattttgaaccgagtgtccgtgaaggaataaaaacatgtcattctgtctcggcgcgcagagcaggcgagtcaagcccgtgtcgtggcacgcggattgcttccttccgtccaggcatcgatgttcctttcaagcaaaaatcttgttgatgcttctctgcagacaaaatgtggtcttgcttttgagtttcatcttaagccataatccggagtatcccaaggaggatgccagagtttcttacttgctagctaatccaggaacccaatcaccaatccag

SEQ ID NO: 68472 - DNA, 1911 bp, Zea Mays
gagattagatcagattagattagttggtttgttaggcaaaaagataatgattagatcatattagttagggaagagataaggattagatcaaatttggttgataaggattggatcagattagttagagaagagataaagattagatcagatttgtttagttggaaagagataagtcagttgtctctataaaaggaacactattgtatcagttaagggtaaggaagaattagaagtacgccttcttcttgcctggccgtgggtagaggctctcgtccgacgttcctacaactacaactccctctccaattcctcaatcccattgtagtccataacagagcaataattattttatttaattgtgttaaccaggattcgagacctctagatctggtatcatattaaattgtatgcaccaactagttcaaccaaaaaacgtaagatgatggagagagttgagcaattcacttattctaacacatatatgatatatgagccatcccactattatgattgtttatatgggtttgtgtagtgaccccaagagtagctcaggactgcagttgaaagctgatatccctggctaaccaaacaaatggtggagacatggattagtgcttatgggaaaatcatccccaacagggattgaagtgacagccagggatccactcatcccctgggtggaaaaattcaggttgtggattggattgctagctaccgaacaagccctcagcgtgctaatttcaatggaatcttggtagacaccactgaacttcttggtttccaattaagttcgagcatagagatcgtcttctctcacactgagttgccagtttattccgaaggtccttcaagctaagttctgatgatggctaaggccaatggagcagtccatgcatccacgaaggaacccttgttttcttttggtgtcatagctgatgttcagtatgctgatatcccagatggtcgctcattcctcggtgtcccaagatactaccgccatagcatcactgtcctccaaagggccgtcaacaggtggaacgaacaaggcaacatcaagttctcaatcaattttggtgacattattgatggctactgcccaaaggacaaatcattgtgggcggtgcagaaggtccttgatgaatttgacaagtttgatggcccgacatatcacatgattggcaaccactgcctgtataaccttccgcgcagccagctggtgtctctgcttaagattgcaacagattctgatcgtgcctattatgacttctcgccatgccctgggttcagaatcgttgttctggatgcttatgacttcagttgccttggctggccccatgatcaccctgtgactatagcagcaatgaagctcctggatgagaagaatccaaacactgataagaacagccctgatggtctggttggtgttgataggcggttcgtgaagttcaatggtgcagttggcaaggagcaggtgtcctggctcaatgatgtcctccaggacgcatcgacgcaacatcaaaatgtcatcatatgcagccatctcccaatggatcccggggcgtcttccccagcagctctgatgtggaactacgatgaggtgatggctattgttcaccagtacaactgtgtcaaggcctgctttgccggtcatgaccacaagggtggccactctgtggactcacacggtgtgcaccaccgcacccttgaggctgccttggagtgtcctcctggtaccagcgcttttggtcacgtcgaagtgtatcctaacaggctgctgcttgtaggttttgacagaatggctgatacagaggtccgtttttgagccattaagcggctttaattcgtaccgacttctactacttctataatgtttttgtctatatagattacagctgcagcgaattccttacg

SEQ ID NO: 68473 - DNA, 1610 bp, Zea Mays
ataataaaagtgaaattccattaccttgctgtctcggtctgtcggccatcgccggttgcgcagcgggcagcggctcacgtcgacggggaagactccggaggccacgggcgttacattctcctgccgtatttttgcggtatgggaagtttagccttaacacaagtctaattctcccacaaaagatggtgatgcaactacgtaagacatatatgatcaaattgatcatgccatcaagctcatctccttcgtcaatcatgagcatccagcaaagatccctggctaaccaaacaaatggtggagacatggattagtgcttatgggaaaatcatccccaacagggattgaagtgacagccagggatccactcatcccctgggtggaaaaattcaggttgtggattggattgctagctaccgaacaagccctcagcgtgctaatttcaatggaatcttggtagacaccactgaacttcttggtttccaattaagttcgagcatagagatcgtcttctctcacactgagttgccagtttattccgaaggtccttcaagctaagttctgatgatggctaaggccaatggagcagtccatgcatccacgaaggaacccttgttttcttttggtgtcatagctgatgttcagtatgctgatatcccagatggtcgctcattcctcggtgtcccaagatactaccgccatagcatcactgtcctccaaagggccgtcaacaggtggaacgaacaaggcaacatcaagttctcaatcaattttggtgacattattgatggctactgcccaaaggacaaatcattgtgggcggtgcagaaggtccttgatgaatttgacaagtttgatggcccgacatatcacatgattggcaaccactgcctgtataaccttccgcgcagccagctggtgtctctgcttaagattgcaacagattctgatcgtgcctattatgacttctcgccatgccctgggttcagaatcgttgttctggatgcttatgacttcagttgccttggctggccccatgatcaccctgtgactatagcagcaatgaagctcctggatgagaagaatccaaacactgataagaacagccctgatggtctggttggtgttgataggcggttcgtgaagttcaatggtgcagttggcaaggagcaggtgtcctggctcaatgatgtcctccaggacgcatcgacgcaacatcaaaatgtcatcatatgcagccatctcccaatggatcccggggcgtcttccccagcagctctgatgtggaactacgatgaggtgatggctattgttcaccagtacaactgtgtcaaggcctgctttgccggtcatgaccacaagggtggccactctgtggactcacacggtgtgcaccaccgcacccttgaggctgccttggagtgtcctcctggtaccagcgcttttggtcacgtcgaagtgtatcctaacaggctgctgcttgtaggttttgacagaatggctgatacagaggtccgtttttgagccattaagcggctttaattcgtaccgacttctactacttctataatgtttttgtctatatagattacagctgcagcgaattccttacg

SEQ ID NO: 68474 - DNA, 1589 bp, Zea Mays
ataataaaagtgaaattccattaccttgctgtctcggtctgtcggccatcgccggttgcgcagcgggcagcggctcacgtcgacggggaagactccggaggccacgggcgttacattctcctgccgtatttttgcgatcaaggccttcggcaacgaagccgtcagcttcgtcccatgcctttgcagcatcaatgtttacgcggagctccgcagcttttcttcttcagtatgcaagttgcacctgccgaagatccctggctaaccaaacaaatggtggagacatggattagtgcttatgggaaaatcatccccaacagggattgaagtgacagccagggatccactcatcccctgggtggaaaaattcaggttgtggattggattgctagctaccgaacaagccctcagcgtgctaatttcaatggaatcttggtagacaccactgaacttcttggtttccaattaagttcgagcatagagatcgtcttctctcacactgagttgccagtttattccgaaggtccttcaagctaagttctgatgatggctaaggccaatggagcagtccatgcatccacgaaggaacccttgttttcttttggtgtcatagctgatgttcagtatgctgatatcccagatggtcgctcattcctcggtgtcccaagatactaccgccatagcatcactgtcctccaaagggccgtcaacaggtggaacgaacaaggcaacatcaagttctcaatcaattttggtgacattattgatggctactgcccaaaggacaaatcattgtgggcggtgcagaaggtccttgatgaatttgacaagtttgatggcccgacatatcacatgattggcaaccactgcctgtataaccttccgcgcagccagctggtgtctctgcttaagattgcaacagattctgatcgtgcctattatgacttctcgccatgccctgggttcagaatcgttgttctggatgcttatgacttcagttgccttggctggccccatgatcaccctgtgactatagcagcaatgaagctcctggatgagaagaatccaaacactgataagaacagccctgatggtctggttggtgttgataggcggttcgtgaagttcaatggtgcagttggcaaggagcaggtgtcctggctcaatgatgtcctccaggacgcatcgacgcaacatcaaaatgtcatcatatgcagccatctcccaatggatcccggggcgtcttccccagcagctctgatgtggaactacgatgaggtgatggctattgttcaccagtacaactgtgtcaaggcctgctttgccggtcatgaccacaagggtggccactctgtggactcacacggtgtgcaccaccgcacccttgaggctgccttggagtgtcctcctggtaccagcgcttttggtcacgtcgaagtgtatcctaacaggctgctgcttgtaggttttgacagaatggctgatacagaggtccgtttttgagccattaagcggctttaattcgtaccgacttctactacttctataatgtttttgtctatatagattacagctgcagcgaattccttacg

SEQ ID NO: 68475 - DNA, 1522 bp, Zea Mays
ataataaaagtgaaattccattaccttgctgtctcggtctgtcggccatcgccggttgcgcagcgggcagcggctcacgtcgacggggaagactccggaggccacgggcgttacattctcctgccgtatttttgcgatcaaggccttcggcaacgaagccgtcagcttcgtcccatgcctttgcagcatcaatgtttacgcggagctccgcagcttttcttcttcagtatgcaagttgcacctgccgaagggattgaagtgacagccagggatccactcatcccctgggtggaaaaattcaggttgtggattggattgctagctaccgaacaagccctcagcgtgctaatttcaatggaatcttggtagacaccactgaacttcttggtttccaattaagttcgagcatagagatcgtcttctctcacactgagttgccagtttattccgaaggtccttcaagctaagttctgatgatggctaaggccaatggagcagtccatgcatccacgaaggaacccttgttttcttttggtgtcatagctgatgttcagtatgctgatatcccagatggtcgctcattcctcggtgtcccaagatactaccgccatagcatcactgtcctccaaagggccgtcaacaggtggaacgaacaaggcaacatcaagttctcaatcaattttggtgacattattgatggctactgcccaaaggacaaatcattgtgggcggtgcagaaggtccttgatgaatttgacaagtttgatggcccgacatatcacatgattggcaaccactgcctgtataaccttccgcgcagccagctggtgtctctgcttaagattgcaacagattctgatcgtgcctattatgacttctcgccatgccctgggttcagaatcgttgttctggatgcttatgacttcagttgccttggctggccccatgatcaccctgtgactatagcagcaatgaagctcctggatgagaagaatccaaacactgataagaacagccctgatggtctggttggtgttgataggcggttcgtgaagttcaatggtgcagttggcaaggagcaggtgtcctggctcaatgatgtcctccaggacgcatcgacgcaacatcaaaatgtcatcatatgcagccatctcccaatggatcccggggcgtcttccccagcagctctgatgtggaactacgatgaggtgatggctattgttcaccagtacaactgtgtcaaggcctgctttgccggtcatgaccacaagggtggccactctgtggactcacacggtgtgcaccaccgcacccttgaggctgccttggagtgtcctcctggtaccagcgcttttggtcacgtcgaagtgtatcctaacaggctgctgcttgtaggttttgacagaatggctgatacagaggtccgtttttgagccattaagcggctttaattcgtaccgacttctactacttctataatgtttttgtctatatagattacagctgcagcgaattccttacg

SEQ ID NO: 68476 - DNA, 1724 bp, Zea Mays
ataataaaagtgaaattccattaccttgctgtctcggtctgtcggccatcgccggttgcgcagcgggcagcggctcacgtcgacggggaagactccggaggccacgggcgttacattctcctgccgtatttttgcggtatgggaagtttagccttaacacaagtctaattctcccacaaaagatggtgatgcaactacgtaagacatatatgatcaaattgatcatgccatcaagctcatctccttcgtcaatcatgagcatccagcaaagatcaaggccttcggcaacgaagccgtcagcttcgtcccatgcctttgcagcatcaatgtttacgcggagctccgcagcttttcttcttcagtatgcaagttgcacctgccgaagatccctggctaaccaaacaaatggtggagacatggattagtgcttatgggaaaatcatccccaacagggattgaagtgacagccagggatccactcatcccctgggtggaaaaattcaggttgtggattggattgctagctaccgaacaagccctcagcgtgctaatttcaatggaatcttggtagacaccactgaacttcttggtttccaattaagttcgagcatagagatcgtcttctctcacactgagttgccagtttattccgaaggtccttcaagctaagttctgatgatggctaaggccaatggagcagtccatgcatccacgaaggaacccttgttttcttttggtgtcatagctgatgttcagtatgctgatatcccagatggtcgctcattcctcggtgtcccaagatactaccgccatagcatcactgtcctccaaagggccgtcaacaggtggaacgaacaaggcaacatcaagttctcaatcaattttggtgacattattgatggctactgcccaaaggacaaatcattgtgggcggtgcagaaggtccttgatgaatttgacaagtttgatggcccgacatatcacatgattggcaaccactgcctgtataaccttccgcgcagccagctggtgtctctgcttaagattgcaacagattctgatcgtgcctattatgacttctcgccatgccctgggttcagaatcgttgttctggatgcttatgacttcagttgccttggctggccccatgatcaccctgtgactatagcagcaatgaagctcctggatgagaagaatccaaacactgataagaacagccctgatggtctggttggtgttgataggcggttcgtgaagttcaatggtgcagttggcaaggagcaggtgtcctggctcaatgatgtcctccaggacgcatcgacgcaacatcaaaatgtcatcatatgcagccatctcccaatggatcccggggcgtcttccccagcagctctgatgtggaactacgatgaggtgatggctattgttcaccagtacaactgtgtcaaggcctgctttgccggtcatgaccacaagggtggccactctgtggactcacacggtgtgcaccaccgcacccttgaggctgccttggagtgtcctcctggtaccagcgcttttggtcacgtcgaagtgtatcctaacaggctgctgcttgtaggttttgacagaatggctgatacagaggtccgtttttgagccattaagcggctttaattcgtaccgacttctactacttctataatgtttttgtctatatagattacagctgcagcgaattccttacg

SEQ ID NO: 68477 - DNA, 3176 bp, Zea Mays
atggtcacaaggaacaagcgctcagttcctaaccactacagcttgtgttgggataaccctagtaatcagatgcaaggagttatgcagctgaaagctactaacagtggaatgcccatgaaggttgcacaaagaatcgatgtttcaaagtttatgtcatacatcaaagttagtagaacacagctcaaccatataaagagactgaagcaatctggggatggtattcagaccaagcatgtttcacgtgtaattggcggccttgataaatctcatgtgaaaccttatggagctttattagaggatgaacagaggagactgcgcgagcattggctggaaatgtcttgcaatgatttacctgctgcctttgaggttcttagggaaaggaaggtgctgatggagaaatcaataaagttattaggccttgagcttcagcagaagaatgtatctgtcttgagaaaggttcgctgtgacttgtccttcaattctttttcttaagtctctaatttttgtcttgagggaagtgatttacttgaatgtgtaaaaaatacagtggatgagaataccgttgtatgcttacttctgttatgtatcttccccatttacaatgtatcatagcattcgccactatagatgagaataccatgactataaagatactgaattgtaatagaggcatctagtatgaaagccataggcagtatttcattatgaatggtgaattgccctgcagtgttatcttatttgtataagctaatatattgtcacatttttgtaagtatactttgttgtaatcttcataatgaaaataaattcttataaaaaacaatcttaatttgtttttaatacccaatagatgattatggtttatttatgtttgtttatgatgagaaggcagaccagttaacagacataatgaaagggctaggacaacctggtgctagtgaaaatgatggtaccccagtttttcaaaatgaccaggtagaatgctcaccccaaagtatattgcaaggtgggcatgttcagagcacatctcttcaccatcaggatgatgagcagtctgtttaccatattcaccgtatgaatgtggaagatcatgatctcatggtagtcaggggtatagacataactagtcagagtgagaaaaactctgatgtgccagatcaaagtcgtaatggtatcagctgcgtagataaaggcatttactgctgtgccaacaaccctgataagcagagtgatgttctcatggacatcaaattatgtaaaggtggactggttgtttacaatcctgactgcaaaaatacgcaactagaagatcttgatggagtttcttacaaaggtccatcagttcatgcttgtgaccaagatcaggacctggaaagcatcggccatgctgttgtgaaccacaattgtcacaatagtccaaatatttcttcggaaatgagtcatccgacgacgaacgctgtaattgaccaggaaactgagaatgttatggaaccatcttgcagttcttcacaactacctaagtcgtctggagaacaaatgcatgtggaagattttctgtatctaaatgaccaagcagcaaaatttgagaaagtcagtgggcagttggcaggccctcttggccctccagagaatatgatgtataatgactcaggtgacttgcagattaaacagacttatctctcttcaggacaacatttttcttcagtttacttgaataatggcattttaagccatcagcaacctcaacttgccacaccagcttttgctttggacaatccagcatcatttattgagcctttctcaaatctgcagagcaatcgtcagcccgagacagaaaaggacattggagcagtcttctatccctttcgacacgcaactaacatcaaacagtcagcgagtttgcattgtttagtgaataaaggcttggctcaatctgcttcatttcccaggttgttgcaagagcggcatcagttaatcgatcagagtgacagtgacctctatgcacaacctcatgaggattactgcacagatgtgagttgtccaactaaagtgaaccttcatatctccgaacagcattcttatactgcttttgcttcgatggatcataggtataactggttccccgagggctgtcagtcacataataataatgataatctgttggggttgcagtcaggtaacttcttaccccaggccttaccaagtggaagcagcaccgatggagctctgttcagcaccgcatcccagtacaatcagccatcagtacacatgggacatggtgggtcaaaccgcagccaactcattgagccaaggaatcaatttggcccacctcagaattttctttctaagagtcaagacacaaaccctatgtttccggatatgtatggcttcacccagaatatagccagtggcacaagcagtcaggtagcacctatagggtctctggattgctcacattggacaaatttcatacaacaaaattctggaatgccgtctgactttacaaacaggccatctcgagggccttggaccagataactctatgacaccctggactggatgtactagattggttggttttaggcgccacctaagttggttaataaggaaactggggcaggttggaacagaatgttttccagcatccatgacttatgtcatgtagtggttttgatctgtttgaatggtgtggtttcaggaattgcttttgcaccatacctgtctgaacgcaagcgctgggaatctggagtcaaagctgaggattcccgcttttgctgtcttgccctgctgattttttttttattttgataataagctgtgccccagtttccatgtgtagtctgcctatggtgccctcagcaaaacatgatgctgtgttgttctcaattattttgttatttttttttgggttgacatgccagttatatatgaagacaagatatgtataccagtcgggatgccattttaggtatcaagagcgggcagttcgaaatgaacaagtacctttccttttggttgggaggcactaggatttctttattcaggcgtgtttacattccgtttgattagttggccgcaccgtttcgtcctaagtcacttagtgtattgactttatctaaatgtttgtttggttgtctgtacatagtgatgtataaagcgtatagcgtagatttagc

SEQ ID NO: 68478 - DNA, 4336 bp, Zea Mays
ccgcgactgcagcgtcggcggctgggaccagcggatgtgcgttcctctctctagaagctccgtccgtcttcacagccttttcctcccaacaacgcataatattagctagggtttcaacgcatctgacggcggaagctagggcgtcgccaccgtcaatgtcttggcactcccgctctgttcatcaatcgcatcgacaggagcccatcccctcctccctcaaacgacgccgggtgacaagcaggaaaagtagtaatgacgacatgcttccaaatcactttcaacagtttcttctacttctttttgtttgccttatgatgattatctactgtcagttactcagttttatgatttgactagttactttggtttgtggagctggatggaacaatctttcagggtgcttcaccattagattgtgcttatatattgagctgaaaatttaacctatatatgtcctgttttaggtgctccatgattctctataacatccgaaataaattaggattaaagcaagaataggaagttattcaaaactcaaaagtaaagggtttccggtcttccagttaaatgaccaaatgacctgtagaatgacagcaagcaagcaaaataaacggcagacaaattgcaccaactcagagcagtgcaggccagggaagaaagcaaaatttgacacatctcattgtctagtaagtttgaagcctcatatcagtcttaaatgggatcaatatctgaggaaagttgtgccagagaaggaacaagttggaattttgtggtcagacttggcccctttcatggaaagccagaaacactgttcaggccttgctgatgttatgtatgttcctccagagattttctctcttaagagcctgaaaggtgtgctatcctatgaggcatggtctacatctcttacagaagccgagagaaaatttctcatacaattccttccaagcgagactgatgcagaagaaaatgtaaaattgttgcttacgggacaaaatcatcactttggaaatcctttccttagctggtcatcttctctttgctatggtgatattcatccggatgcactacttaacaaggagaagcacataaaaaaggatgagaaggcatatcatgttaacttgcttaattaccattccaacatggttgaaaccttgaagagttggaggaagagatggctaagttgcggtgatacagagaatttgttcagggataaccctagtaatcagatgcaaggagttatgcagctgaaagctactaacagtggaatgcccatgaaggttgcacaaagaatcgatgtttcaaagtttatgtcatacatcaaagttagtagaacacagctcaaccatataaagagactgaagcaatctggggatggtattcagaccaagcatgtttcacgtgtaattggcggccttgataaatctcatgtgaaaccttatggagctttattagaggatgaacagaggagactgcgcgagcattggctggaaatgtcttgcaatgatttacctgctgcctttgaggttcttagggaaaggaaggtgctgatggagaaatcaataaagttattaggccttgagcttcagcagaagaatgtatctgtcttgagaaaggttcgctgtgacttgtccttcaattctttttcttaagtctctaatttttgtcttgagggaagtgatttacttgaatgtgtaaaaaatacagtggatgagaataccgttgtatgcttacttctgttatgtatcttccccatttacaatgtatcatagcattcgccactatagatgagaataccatgactataaagatactgaattgtaatagaggcatctagtatgaaagccataggcagtatttcattatgaatggtgaattgccctgcagtgttatcttatttgtataagctaatatattgtcacatttttgtaagtatactttgttgtaatcttcataatgaaaataaattcttataaaaaacaatcttaatttgtttttaatacccaatagatgattatggtttatttatgtttgtttatgatgagaaggcagaccagttaacagacataatgaaagggctaggacaacctggtgctagtgaaaatgatggtaccccagtttttcaaaatgaccaggtagaatgctcaccccaaagtatattgcaaggtgggcatgttcagagcacatctcttcaccatcaggatgatgagcagtctgtttaccatattcaccgtatgaatgtggaagatcatgatctcatggtagtcaggggtatagacataactagtcagagtgagaaaaactctgatgtgccagatcaaagtcgtaatggtatcagctgcgtagataaaggcatttactgctgtgccaacaaccctgataagcagagtgatgttctcatggacatcaaattatgtaaaggtggactggttgtttacaatcctgactgcaaaaatacgcaactagaagatcttgatggagtttcttacaaaggtccatcagttcatgcttgtgaccaagatcaggacctggaaagcatcggccatgctgttgtgaaccacaattgtcacaatagtccaaatatttcttcggaaatgagtcatccgacgacgaacgctgtaattgaccaggaaactgagaatgttatggaaccatcttgcagttcttcacaactacctaagtcgtctggagaacaaatgcatgtggaagattttctgtatctaaatgaccaagcagcaaaatttgagaaagtcagtgggcagttggcaggccctcttggccctccagagaatatgatgtataatgactcaggtgacttgcagattaaacagacttatctctcttcaggacaacatttttcttcagtttacttgaataatggcattttaagccatcagcaacctcaacttgccacaccagcttttgctttggacaatccagcatcatttattgagcctttctcaaatctgcagagcaatcgtcagcccgagacagaaaaggacattggagcagtcttctatccctttcgacacgcaactaacatcaaacagtcagcgagtttgcattgtttagtgaataaaggcttggctcaatctgcttcatttcccaggttgttgcaagagcggcatcagttaatcgatcagagtgacagtgacctctatgcacaacctcatgaggattactgcacagatgtgagttgtccaactaaagtgaaccttcatatctccgaacagcattcttatactgcttttgcttcgatggatcataggtataactggttccccgagggctgtcagtcacataataataatgataatctgttggggttgcagtcaggtaacttcttaccccaggccttaccaagtggaagcagcaccgatggagctctgttcagcaccgcatcccagtacaatcagccatcagtacacatgggacatggtgggtcaaaccgcagccaactcattgagccaaggaatcaatttggcccacctcagaattttctttctaagagtcaagacacaaaccctatgtttccggatatgtatggcttcacccagaatatagccagtggcacaagcagtcaggtagcacctatagggtctctggattgctcacattggacaaatttcatacaacaaaattctggaatgccgtctgactttacaaacaggccatctcgagggccttggaccagataactctatgacaccctggactggatgtactagattggttggttttaggcgccacctaagttggttaataaggaaactggggcaggttggaacagaatgttttccagcatccatgacttatgtcatgtagtggttttgatctgtttgaatggtgtggtttcaggaattgcttttgcaccatacctgtctgaacgcaagcgctgggaatctggagtcaaagctgaggattcccgcttttgctgtcttgccctgctgattttttttttattttgataataagctgtgccccagtttccatgtgtagtctgcctatggtgccctcagcaaaacatgatgctgtgttgttctcaattattttgttatttttttttgggttgacatgccagttatatatgaagacaagatatgtataccagtcgggatgccattttaggtatcaagagcgggcagttcgaaatgaacaagtacctttccttttggttgggaggcactaggatttctttattcaggcgtgtttacattccgtttgattagttggccgcaccgtttcgtcctaagtcacttagtgtattgactttatctaaatgtttgtttggttgtctgtacatagtgatgtataaagcgtatagcgtagatttagc

SEQ ID NO: 68479 - DNA, 3521 bp, Zea Mays
ccgcgactgcagcgtcggcggctgggaccagcggatgtgcgttcctctctctagaagctccgtccgtcttcacagccttttcctcccaacaacgcataatattagctagggtttcaacgcatctgacggcggaagctagggcgtcgccaccgtcaatgtcttggcactcccgctctgttcatcaatcgcatcgacagttaaatgaccaaatgacctgtagaatgacagcaagcaagcaaaataaacggcagacaaattgcaccaactcagagcagtgcaggccagggaagaaagcaaaatttgacacatctcattgtctagtaagtttgaagcctcatatcagtcttaaatgggatcaatatctgaggaaagttgtgccagagaaggaacaagttggaattttgtggtcagacttggcccctttcatggaaagccagaaacactgttcaggccttgctgatgttatgtatgttcctccagagattttctctcttaagagcctgaaaggcatggtctacatctcttacagaagccgagagaaaatttctcatacaattccttccaagcgagactgatgcagaagaaaatgtaaaattgttgcttacgggacaaaatcatcactttggaaatcctttccttagctggtcatcttctctttgctatggtgatattcatccggatgcactacttaacaaggagaagcacataaaaaaggatgagaaggcatatcatgttaacttgcttaattaccattccaacatggttgaaaccttgaagagttggaggaagagatggctaagttgcggtgatacagagaatttgttcagggataaccctagtaatcagatgcaaggagttatgcagctgaaagctactaacagtggaatgcccatgaaggttgcacaaagaatcgatgtttcaaagtttatgtcatacatcaaagttagtagaacacagctcaaccatataaagagactgaagcaatctggggatggtattcagaccaagcatgtttcacgtgtaattggcggccttgataaatctcatgtgaaaccttatggagctttattagaggatgaacagaggagactgcgcgagcattggctggaaatgtcttgcaatgatttacctgctgcctttgaggttcttagggaaaggaaggtgctgatggagaaatcaataaagttattaggccttgagcttcagcagaagaatgtatctgtcttgagaaaggcagaccagttaacagacataatgaaagggctaggacaacctggtgctagtgaaaatgatggtaccccagtttttcaaaatgaccaggtagaatgctcaccccaaagtatattgcaaggtgggcatgttcagagcacatctcttcaccatcaggatgatgagcagtctgtttaccatattcaccgtatgaatgtggaagatcatgatctcatggtagtcaggggtatagacataactagtcagagtgagaaaaactctgatgtgccagatcaaagtcgtaatggtatcagctgcgtagataaaggcatttactgctgtgccaacaaccctgataagcagagtgatgttctcatggacatcaaattatgtaaaggtggactggttgtttacaatcctgactgcaaaaatacgcaactagaagatcttgatggagtttcttacaaaggtccatcagttcatgcttgtgaccaagatcaggacctggaaagcatcggccatgctgttgtgaaccacaattgtcacaatagtccaaatatttcttcggaaatgagtcatccgacgacgaacgctgtaattgaccaggaaactgagaatgttatggaaccatcttgcagttcttcacaactacctaagtcgtctggagaacaaatgcatgtggaagattttctgtatctaaatgaccaagcagcaaaatttgagaaagtcagtgggcagttggcaggccctcttggccctccagagaatatgatgtataatgactcaggtgacttgcagattaaacagacttatctctcttcaggacaacatttttcttcagtttacttgaataatggcattttaagccatcagcaacctcaacttgccacaccagcttttgctttggacaatccagcatcatttattgagcctttctcaaatctgcagagcaatcgtcagcccgagacagaaaaggacattggagcagtcttctatccctttcgacacgcaactaacatcaaacagtcagcgagtttgcattgtttagtgaataaaggcttggctcaatctgcttcatttcccaggttgttgcaagagcggcatcagttaatcgatcagagtgacagtgacctctatgcacaacctcatgaggattactgcacagatgtgagttgtccaactaaagtgaaccttcatatctccgaacagcattcttatactgcttttgcttcgatggatcataggtataactggttccccgagggctgtcagtcacataataataatgataatctgttggggttgcagtcaggtaacttcttaccccaggccttaccaagtggaagcagcaccgatggagctctgttcagcaccgcatcccagtacaatcagccatcagtacacatgggacatggtgggtcaaaccgcagccaactcattgagccaaggaatcaatttggcccacctcagaattttctttctaagagtcaagacacaaaccctatgtttccggatatgtatggcttcacccagaatatagccagtggcacaagcagtcaggtagcacctatagggtctctggattgctcacattggacaaatttcatacaacaaaattctggaatgccgtctgactttacaaacaggccatctcgagggccttggaccagataactctatgacaccctggactggatgtactagattggttggttttaggcgccacctaagttggttaataaggaaactggggcaggttggaacagaatgttttccagcatccatgacttatgtcatgtagtggttttgatctgtttgaatggtgtggtttcaggaattgcttttgcaccatacctgtctgaacgcaagcgctgggaatctggagtcaaagctgaggattcccgcttttgctgtcttgccctgctgattttttttttattttgataataagctgtgccccagtttccatgtgtagtctgcctatggtgccctcagcaaaacatgatgctgtgttgttctcaattattttgttatttttttttgggttgacatgccagttatatatgaagacaagatatgtataccagtcgggatgccattttaggtatcaagagcgggcagttcgaaatgaacaagtacctttccttttggttgggaggcactaggatttctttattcaggcgtgtttacattccgtttgattagttggccgcaccgtttcgtcctaagtcacttagtgtattgactttatctaaatgtttgtttggttgtctgtacatagtgatgtataaagcgtatagcgtagatttagc

SEQ ID NO: 68480 - DNA, 3737 bp, Zea Mays
ccgcgactgcagcgtcggcggctgggaccagcggatgtgcgttcctctctctagaagctccgtccgtcttcacagccttttcctcccaacaacgcataatattagctagggtttcaacgcatctgacggcggaagctagggcgtcgccaccgtcaatgtcttggcactcccgctctgttcatcaatcgcatcgacaggagccctatcctcaatcatgtctttcccgccgagctacacaccttcaggagcccatcccctcctccctcaaacgacgccgggtgacaagcaggaaaagtagtgctccatgattctctataacatccgaaataaattaggattaaagcaagaataggaagttattcaaaactcaaaagtaaagggtttccggtcttccagttaaatgaccaaatgacctgtagaatgacagcaagcaagcaaaataaacggcagacaaattgcaccaactcagagcagtgcaggccagggaagaaagcaaaatttgacacatctcattgtctagtaagtttgaagcctcatatcagtcttaaatgggatcaatatctgaggaaagttgtgccagagaaggaacaagttggaattttgtggtcagacttggcccctttcatggaaagccagaaacactgttcaggccttgctgatgttatgtatgttcctccagagattttctctcttaagagcctgaaaggtgtgctatcctatgaggcatggtctacatctcttacagaagccgagagaaaatttctcatacaattccttccaagcgagactgatgcagaagaaaatgtaaaattgttgcttacgggacaaaatcatcactttggaaatcctttccttagctggtcatcttctctttgctatggtgatattcatccggatgcactacttaacaaggagaagcacataaaaaaggatgagaaggcatatcatgttaacttgcttaattaccattccaacatggttgaaaccttgaagagttggaggaagagatggctaagttgcggtgatacagagaatttgttcagggataaccctagtaatcagatgcaaggagttatgcagctgaaagctactaacagtggaatgcccatgaaggttgcacaaagaatcgatgtttcaaagtttatgtcatacatcaaagttagtagaacacagctcaaccatataaagagactgaagcaatctggggatggtattcagaccaagcatgtttcacgtgtaattggcggccttgataaatctcatgtgaaaccttatggagctttattagaggatgaacagaggagactgcgcgagcattggctggaaatgtcttgcaatgatttacctgctgcctttgaggttcttagggaaaggaaggtgctgatggagaaatcaataaagttattaggccttgagcttcagcagaagaatgtatctgtcttgagaaaggcagaccagttaacagacataatgaaagggctaggacaacctggtgctagtgaaaatgatggtaccccagtttttcaaaatgaccaggtagaatgctcaccccaaagtatattgcaaggtgggcatgttcagagcacatctcttcaccatcaggatgatgagcagtctgtttaccatattcaccgtatgaatgtggaagatcatgatctcatggtagtcaggggtatagacataactagtcagagtgagaaaaactctgatgtgccagatcaaagtcgtaatggtatcagctgcgtagataaaggcatttactgctgtgccaacaaccctgataagcagagtgatgttctcatggacatcaaattatgtaaaggtggactggttgtttacaatcctgactgcaaaaatacgcaactagaagatcttgatggagtttcttacaaaggtccatcagttcatgcttgtgaccaagatcaggacctggaaagcatcggccatgctgttgtgaaccacaattgtcacaatagtccaaatatttcttcggaaatgagtcatccgacgacgaacgctgtaattgaccaggaaactgagaatgttatggaaccatcttgcagttcttcacaactacctaagtcgtctggagaacaaatgcatgtggaagattttctgtatctaaatgaccaagcagcaaaatttgagaaagtcagtgggcagttggcaggccctcttggccctccagagaatatgatgtataatgactcaggtgacttgcagattaaacagacttatctctcttcaggacaacatttttcttcagtttacttgaataatggcattttaagccatcagcaacctcaacttgccacaccagcttttgctttggacaatccagcatcatttattgagcctttctcaaatctgcagagcaatcgtcagcccgagacagaaaaggacattggagcagtcttctatccctttcgacacgcaactaacatcaaacagtcagcgagtttgcattgtttagtgaataaaggcttggctcaatctgcttcatttcccaggttgttgcaagagcggcatcagttaatcgatcagagtgacagtgacctctatgcacaacctcatgaggattactgcacagatgtgagttgtccaactaaagtgaaccttcatatctccgaacagcattcttatactgcttttgcttcgatggatcataggtataactggttccccgagggctgtcagtcacataataataatgataatctgttggggttgcagtcaggtaacttcttaccccaggccttaccaagtggaagcagcaccgatggagctctgttcagcaccgcatcccagtacaatcagccatcagtacacatgggacatggtgggtcaaaccgcagccaactcattgagccaaggaatcaatttggcccacctcagaattttctttctaagagtcaagacacaaaccctatgtttccggatatgtatggcttcacccagaatatagccagtggcacaagcagtcaggtagcacctatagggtctctggattgctcacattggacaaatttcatacaacaaaattctggaatgccgtctgactttacaaacaggccatctcgagggccttggaccagataactctatgacaccctggactggatgtactagattggttggttttaggcgccacctaagttggttaataaggaaactggggcaggttggaacagaatgttttccagcatccatgacttatgtcatgtagtggttttgatctgtttgaatggtgtggtttcaggaattgcttttgcaccatacctgtctgaacgcaagcgctgggaatctggagtcaaagctgaggattcccgcttttgctgtcttgccctgctgattttttttttattttgataataagctgtgccccagtttccatgtgtagtctgcctatggtgccctcagcaaaacatgatgctgtgttgttctcaattattttgttatttttttttgggttgacatgccagttatatatgaagacaagatatgtataccagtcgggatgccattttaggtatcaagagcgggcagttcgaaatgaacaagtacctttccttttggttgggaggcactaggatttctttattcaggcgtgtttacattccgtttgattagttggccgcaccgtttcgtcctaagtcacttagtgtattgactttatctaaatgtttgtttggttgtctgtacatagtgatgtataaagcgtatagcgtagatttagc

SEQ ID NO: 68481 - DNA, 3476 bp, Zea Mays
ccgcgactgcagcgtcggcggctgggaccagcggatgtgctccatgattctctataacatccgaaataaattaggattaaagcaagaataggaagttattcaaaactcaaaagtaaagggtttccggtcttccagttaaatgaccaaatgacctgtagaatgacagcaagcaagcaaaataaacggcagacaaattgcaccaactcagagcagtgcaggccagggaagaaagcaaaatttgacacatctcattgtctagtaagtttgaagcctcatatcagtcttaaatgggatcaatatctgaggaaagttgtgccagagaaggaacaagttggaattttgtggtcagacttggcccctttcatggaaagccagaaacactgttcaggccttgctgatgttatgtatgttcctccagagattttctctcttaagagcctgaaaggtgtgctatcctatgaggcatggtctacatctcttacagaagccgagagaaaatttctcatacaattccttccaagcgagactgatgcagaagaaaatgtaaaattgttgcttacgggacaaaatcatcactttggaaatcctttccttagctggtcatcttctctttgctatggtgatattcatccggatgcactacttaacaaggagaagcacataaaaaaggatgagaaggcatatcatgttaacttgcttaattaccattccaacatggttgaaaccttgaagagttggaggaagagatggctaagttgcggtgatacagagaatttgttcagggataaccctagtaatcagatgcaaggagttatgcagctgaaagctactaacagtggaatgcccatgaaggttgcacaaagaatcgatgtttcaaagtttatgtcatacatcaaagttagtagaacacagctcaaccatataaagagactgaagcaatctggggatggtattcagaccaagcatgtttcacgtgtaattggcggccttgataaatctcatgtgaaaccttatggagctttattagaggatgaacagaggagactgcgcgagcattggctggaaatgtcttgcaatgatttacctgctgcctttgaggttcttagggaaaggaaggtgctgatggagaaatcaataaagttattaggccttgagcttcagcagaagaatgtatctgtcttgagaaaggcagaccagttaacagacataatgaaagggctaggacaacctggtgctagtgaaaatgatggtaccccagtttttcaaaatgaccaggtagaatgctcaccccaaagtatattgcaaggtgggcatgttcagagcacatctcttcaccatcaggatgatgagcagtctgtttaccatattcaccgtatgaatgtggaagatcatgatctcatggtagtcaggggtatagacataactagtcagagtgagaaaaactctgatgtgccagatcaaagtcgtaatggtatcagctgcgtagataaaggcatttactgctgtgccaacaaccctgataagcagagtgatgttctcatggacatcaaattatgtaaaggtggactggttgtttacaatcctgactgcaaaaatacgcaactagaagatcttgatggagtttcttacaaaggtccatcagttcatgcttgtgaccaagatcaggacctggaaagcatcggccatgctgttgtgaaccacaattgtcacaatagtccaaatatttcttcggaaatgagtcatccgacgacgaacgctgtaattgaccaggaaactgagaatgttatggaaccatcttgcagttcttcacaactacctaagtcgtctggagaacaaatgcatgtggaagattttctgtatctaaatgaccaagcagcaaaatttgagaaagtcagtgggcagttggcaggccctcttggccctccagagaatatgatgtataatgactcaggtgacttgcagattaaacagacttatctctcttcaggacaacatttttcttcagtttacttgaataatggcattttaagccatcagcaacctcaacttgccacaccagcttttgctttggacaatccagcatcatttattgagcctttctcaaatctgcagagcaatcgtcagcccgagacagaaaaggacattggagcagtcttctatccctttcgacacgcaactaacatcaaacagtcagcgagtttgcattgtttagtgaataaaggcttggctcaatctgcttcatttcccaggttgttgcaagagcggcatcagttaatcgatcagagtgacagtgacctctatgcacaacctcatgaggattactgcacagatgtgagttgtccaactaaagtgaaccttcatatctccgaacagcattcttatactgcttttgcttcgatggatcataggtataactggttccccgagggctgtcagtcacataataataatgataatctgttggggttgcagtcaggtaacttcttaccccaggccttaccaagtggaagcagcaccgatggagctctgttcagcaccgcatcccagtacaatcagccatcagtacacatgggacatggtgggtcaaaccgcagccaactcattgagccaaggaatcaatttggcccacctcagaattttctttctaagagtcaagacacaaaccctatgtttccggatatgtatggcttcacccagaatatagccagtggcacaagcagtcaggtagcacctatagggtctctggattgctcacattggacaaatttcatacaacaaaattctggaatgccgtctgactttacaaacaggccatctcgagggccttggaccagataactctatgacaccctggactggatgtactagattggttggttttaggcgccacctaagttggttaataaggaaactggggcaggttggaacagaatgttttccagcatccatgacttatgtcatgtagtggttttgatctgtttgaatggtgtggtttcaggaattgcttttgcaccatacctgtctgaacgcaagcgctgggaatctggagtcaaagctgaggattcccgcttttgctgtcttgccctgctgattttttttttattttgataataagctgtgccccagtttccatgtgtagtctgcctatggtgccctcagcaaaacatgatgctgtgttgttctcaattattttgttatttttttttgggttgacatgccagttatatatgaagacaagatatgtataccagtcgggatgccattttaggtatcaagagcgggcagttcgaaatgaacaagtacctttccttttggttgggaggcactaggatttctttattcaggcgtgtttacattccgtttgattagttggccgcaccgtttcgtcctaagtcacttagtgtattgactttatctaaatgtttgtttggttgtctgtacatagtgatgtataaagcgtatagcgtagatttagc

SEQ ID NO: 68482 - DNA, 3734 bp, Zea Mays
ccgcgactgcagcgtcggcggctgggaccagcggatgtgcgttcctctctctagaagctccgtccgtcttcacagccttttcctcccaacaacgcataatattagctagggtttcaacgcatctgacggcggaagctagggcgtcgccaccgtcaatgtcttggcactcccgctctgttcatcaatcgcatcgacaggagccctatcctcaatcatgtctttcccgccgagctacacaccttcaggagcccatcccctcctccctcaaacgacgccgggtgacaagcaggaaaagtgctccatgattctctataacatccgaaataaattaggattaaagcaagaataggaagttattcaaaactcaaaagtaaagggtttccggtcttccagttaaatgaccaaatgacctgtagaatgacagcaagcaagcaaaataaacggcagacaaattgcaccaactcagagcagtgcaggccagggaagaaagcaaaatttgacacatctcattgtctagtaagtttgaagcctcatatcagtcttaaatgggatcaatatctgaggaaagttgtgccagagaaggaacaagttggaattttgtggtcagacttggcccctttcatggaaagccagaaacactgttcaggccttgctgatgttatgtatgttcctccagagattttctctcttaagagcctgaaaggtgtgctatcctatgaggcatggtctacatctcttacagaagccgagagaaaatttctcatacaattccttccaagcgagactgatgcagaagaaaatgtaaaattgttgcttacgggacaaaatcatcactttggaaatcctttccttagctggtcatcttctctttgctatggtgatattcatccggatgcactacttaacaaggagaagcacataaaaaaggatgagaaggcatatcatgttaacttgcttaattaccattccaacatggttgaaaccttgaagagttggaggaagagatggctaagttgcggtgatacagagaatttgttcagggataaccctagtaatcagatgcaaggagttatgcagctgaaagctactaacagtggaatgcccatgaaggttgcacaaagaatcgatgtttcaaagtttatgtcatacatcaaagttagtagaacacagctcaaccatataaagagactgaagcaatctggggatggtattcagaccaagcatgtttcacgtgtaattggcggccttgataaatctcatgtgaaaccttatggagctttattagaggatgaacagaggagactgcgcgagcattggctggaaatgtcttgcaatgatttacctgctgcctttgaggttcttagggaaaggaaggtgctgatggagaaatcaataaagttattaggccttgagcttcagcagaagaatgtatctgtcttgagaaaggcagaccagttaacagacataatgaaagggctaggacaacctggtgctagtgaaaatgatggtaccccagtttttcaaaatgaccaggtagaatgctcaccccaaagtatattgcaaggtgggcatgttcagagcacatctcttcaccatcaggatgatgagcagtctgtttaccatattcaccgtatgaatgtggaagatcatgatctcatggtagtcaggggtatagacataactagtcagagtgagaaaaactctgatgtgccagatcaaagtcgtaatggtatcagctgcgtagataaaggcatttactgctgtgccaacaaccctgataagcagagtgatgttctcatggacatcaaattatgtaaaggtggactggttgtttacaatcctgactgcaaaaatacgcaactagaagatcttgatggagtttcttacaaaggtccatcagttcatgcttgtgaccaagatcaggacctggaaagcatcggccatgctgttgtgaaccacaattgtcacaatagtccaaatatttcttcggaaatgagtcatccgacgacgaacgctgtaattgaccaggaaactgagaatgttatggaaccatcttgcagttcttcacaactacctaagtcgtctggagaacaaatgcatgtggaagattttctgtatctaaatgaccaagcagcaaaatttgagaaagtcagtgggcagttggcaggccctcttggccctccagagaatatgatgtataatgactcaggtgacttgcagattaaacagacttatctctcttcaggacaacatttttcttcagtttacttgaataatggcattttaagccatcagcaacctcaacttgccacaccagcttttgctttggacaatccagcatcatttattgagcctttctcaaatctgcagagcaatcgtcagcccgagacagaaaaggacattggagcagtcttctatccctttcgacacgcaactaacatcaaacagtcagcgagtttgcattgtttagtgaataaaggcttggctcaatctgcttcatttcccaggttgttgcaagagcggcatcagttaatcgatcagagtgacagtgacctctatgcacaacctcatgaggattactgcacagatgtgagttgtccaactaaagtgaaccttcatatctccgaacagcattcttatactgcttttgcttcgatggatcataggtataactggttccccgagggctgtcagtcacataataataatgataatctgttggggttgcagtcaggtaacttcttaccccaggccttaccaagtggaagcagcaccgatggagctctgttcagcaccgcatcccagtacaatcagccatcagtacacatgggacatggtgggtcaaaccgcagccaactcattgagccaaggaatcaatttggcccacctcagaattttctttctaagagtcaagacacaaaccctatgtttccggatatgtatggcttcacccagaatatagccagtggcacaagcagtcaggtagcacctatagggtctctggattgctcacattggacaaatttcatacaacaaaattctggaatgccgtctgactttacaaacaggccatctcgagggccttggaccagataactctatgacaccctggactggatgtactagattggttggttttaggcgccacctaagttggttaataaggaaactggggcaggttggaacagaatgttttccagcatccatgacttatgtcatgtagtggttttgatctgtttgaatggtgtggtttcaggaattgcttttgcaccatacctgtctgaacgcaagcgctgggaatctggagtcaaagctgaggattcccgcttttgctgtcttgccctgctgattttttttttattttgataataagctgtgccccagtttccatgtgtagtctgcctatggtgccctcagcaaaacatgatgctgtgttgttctcaattattttgttatttttttttgggttgacatgccagttatatatgaagacaagatatgtataccagtcgggatgccattttaggtatcaagagcgggcagttcgaaatgaacaagtacctttccttttggttgggaggcactaggatttctttattcaggcgtgtttacattccgtttgattagttggccgcaccgtttcgtcctaagtcacttagtgtattgactttatctaaatgtttgtttggttgtctgtacatagtgatgtataaagcgtatagcgtagatttagc

SEQ ID NO: 68483 - DNA, 3904 bp, Zea Mays
ccgcgactgcagcgtcggcggctgggaccagcggatgtgcgttcctctctctagaagctccgtccgtcttcacagccttttcctcccaacaacgcataatattagctagggtttcaacgcatctgacggcggaagctagggcgtcgccaccgtcaatgtcttggcactcccgctctgttcatcaatcgcatcgacaggagcccatcccctcctccctcaaacgacgccgggtgacaagcaggaaaagtagtaatgacgacatgcttccaaatcactttcaacagtttcttctacttctttttgtttgccttatgatgattatctactgtcagttactcagttttatgatttgactagttactttggtttgtggagctggatggaacaatctttcagggtgcttcaccattagattgtgcttatatattgagctgaaaatttaacctatatatgtcctgttttaggtgctccatgattctctataacatccgaaataaattaggattaaagcaagaataggaagttattcaaaactcaaaagtaaagggtttccggtcttccagttaaatgaccaaatgacctgtagaatgacagcaagcaagcaaaataaacggcagacaaattgcaccaactcagagcagtgcaggccagggaagaaagcaaaatttgacacatctcattgtctagtaagtttgaagcctcatatcagtcttaaatgggatcaatatctgaggaaagttgtgccagagaaggaacaagttggaattttgtggtcagacttggcccctttcatggaaagccagaaacactgttcaggccttgctgatgttatgtatgttcctccagagattttctctcttaagagcctgaaaggtgtgctatcctatgaggcatggtctacatctcttacagaagccgagagaaaatttctcatacaattccttccaagcgagactgatgcagaagaaaatgtaaaattgttgcttacgggacaaaatcatcactttggaaatcctttccttagctggtcatcttctctttgctatggtgatattcatccggatgcactacttaacaaggagaagcacataaaaaaggatgagaaggcatatcatgttaacttgcttaattaccattccaacatggttgaaaccttgaagagttggaggaagagatggctaagttgcggtgatacagagaatttgttcagggataaccctagtaatcagatgcaaggagttatgcagctgaaagctactaacagtggaatgcccatgaaggttgcacaaagaatcgatgtttcaaagtttatgtcatacatcaaagttagtagaacacagctcaaccatataaagagactgaagcaatctggggatggtattcagaccaagcatgtttcacgtgtaattggcggccttgataaatctcatgtgaaaccttatggagctttattagaggatgaacagaggagactgcgcgagcattggctggaaatgtcttgcaatgatttacctgctgcctttgaggttcttagggaaaggaaggtgctgatggagaaatcaataaagttattaggccttgagcttcagcagaagaatgtatctgtcttgagaaaggcagaccagttaacagacataatgaaagggctaggacaacctggtgctagtgaaaatgatggtaccccagtttttcaaaatgaccaggtagaatgctcaccccaaagtatattgcaaggtgggcatgttcagagcacatctcttcaccatcaggatgatgagcagtctgtttaccatattcaccgtatgaatgtggaagatcatgatctcatggtagtcaggggtatagacataactagtcagagtgagaaaaactctgatgtgccagatcaaagtcgtaatggtatcagctgcgtagataaaggcatttactgctgtgccaacaaccctgataagcagagtgatgttctcatggacatcaaattatgtaaaggtggactggttgtttacaatcctgactgcaaaaatacgcaactagaagatcttgatggagtttcttacaaaggtccatcagttcatgcttgtgaccaagatcaggacctggaaagcatcggccatgctgttgtgaaccacaattgtcacaatagtccaaatatttcttcggaaatgagtcatccgacgacgaacgctgtaattgaccaggaaactgagaatgttatggaaccatcttgcagttcttcacaactacctaagtcgtctggagaacaaatgcatgtggaagattttctgtatctaaatgaccaagcagcaaaatttgagaaagtcagtgggcagttggcaggccctcttggccctccagagaatatgatgtataatgactcaggtgacttgcagattaaacagacttatctctcttcaggacaacatttttcttcagtttacttgaataatggcattttaagccatcagcaacctcaacttgccacaccagcttttgctttggacaatccagcatcatttattgagcctttctcaaatctgcagagcaatcgtcagcccgagacagaaaaggacattggagcagtcttctatccctttcgacacgcaactaacatcaaacagtcagcgagtttgcattgtttagtgaataaaggcttggctcaatctgcttcatttcccaggttgttgcaagagcggcatcagttaatcgatcagagtgacagtgacctctatgcacaacctcatgaggattactgcacagatgtgagttgtccaactaaagtgaaccttcatatctccgaacagcattcttatactgcttttgcttcgatggatcataggtataactggttccccgagggctgtcagtcacataataataatgataatctgttggggttgcagtcaggtaacttcttaccccaggccttaccaagtggaagcagcaccgatggagctctgttcagcaccgcatcccagtacaatcagccatcagtacacatgggacatggtgggtcaaaccgcagccaactcattgagccaaggaatcaatttggcccacctcagaattttctttctaagagtcaagacacaaaccctatgtttccggatatgtatggcttcacccagaatatagccagtggcacaagcagtcaggtagcacctatagggtctctggattgctcacattggacaaatttcatacaacaaaattctggaatgccgtctgactttacaaacaggccatctcgagggccttggaccagataactctatgacaccctggactggatgtactagattggttggttttaggcgccacctaagttggttaataaggaaactggggcaggttggaacagaatgttttccagcatccatgacttatgtcatgtagtggttttgatctgtttgaatggtgtggtttcaggaattgcttttgcaccatacctgtctgaacgcaagcgctgggaatctggagtcaaagctgaggattcccgcttttgctgtcttgccctgctgattttttttttattttgataataagctgtgccccagtttccatgtgtagtctgcctatggtgccctcagcaaaacatgatgctgtgttgttctcaattattttgttatttttttttgggttgacatgccagttatatatgaagacaagatatgtataccagtcgggatgccattttaggtatcaagagcgggcagttcgaaatgaacaagtacctttccttttggttgggaggcactaggatttctttattcaggcgtgtttacattccgtttgattagttggccgcaccgtttcgtcctaagtcacttagtgtattgactttatctaaatgtttgtttggttgtctgtacatagtgatgtataaagcgtatagcgtagatttagc

SEQ ID NO: 68484 - DNA, 3875 bp, Zea Mays
ccgcgactgcagcgtcggcggctgggaccagcggatgtgcgttcctctctctagaagctccgtccgtcttcacagccttttcctcccaacaacgcataatattagctagggtttcaacgcatctgacggcggaagctagggcgtcgccaccgtcaatgtcttggcactcccgctctgttcatcaatcgcatcgacaggagccctatcctcaatcatgtctttcccgccgagctacacaccttcaggagcccatcccctcctccctcaaacgacgccgggtgacaagcaggaaaagtagtaatgacgacatgcttccaaatcactttcaacagtttcttctacttctttttgtttgccttatgatgattatctactgtcagttactcagttttatgatttgactagttactttggtttgtggagctggatggaacaatctttcagggtgcttcaccattagattgtgcttatatattgagctgaaaatttaacctatatatgtcctgttttaggtgctccatgattctctataacatccgaaataaattaggattaaagcaagaataggaagttattcaaaactcaaaagtaaagggtttccggtcttccagttaaatgaccaaatgacctgtagaatgacagcaagcaagcaaaataaacggcagacaaattgcaccaactcagagcagtgcaggccagggaagaaagcaaaatttgacacatctcattgtctagtaagtttgaagcctcatatcagtcttaaatgggatcaatatctgaggaaagttgtgccagagaaggaacaagttggaattttgtggtcagacttggcccctttcatggaaagccagaaacactgttcaggccttgctgatgttatgtatgttcctccagagattttctctcttaagagcctgaaaggtgtgctatcctatgaggcatggtctacatctcttacagaagccgagagaaaatttctcatacaattccttccaagcgagactgatgcagaagaaaatgtaaaattgttgcttacgggacaaaatcatcactttggaaatcctttccttagctggtcatcttctctttgctatggtgatattcatccggatgcactacttaacaaggagaagcacataaaaaaggatgagaaggcatatcatgttaacttgcttaattaccattccaacatggttgaaaccttgaagagttggaggaagagatggctaagttgcggtgatacagagaatttgttcagggataaccctagtaatcagatgcaaggagttatgcagctgaaagctactaacagtggaatgcccatgaaggttgcacaaagaatcgatgtttcaaagtttatgtcatacatcaaagttagtagaacacagctcaaccatataaagagactgaagcaatctggggatggtattcagaccaagcatgtttcacgtgtaattggcggccttgataaatctcatgtgaaaccttatggagctttattagaggatgaacagaggagactgcgcgagcattggctggaaatgtcttgcaatgatttacctgctgcctttgaggttcttagggaaaggaaggtgctgatggagaaatcaataaagttattaggccttgagcttcagcagaagaatgtatctgtcttgagaaaggcagaccagttaacagacataatgaaagggctaggacaacctggtgctagtgaaaatgatggtaccccagtttttcaaaatgaccaggtagaatgctcaccccaaagtatattgcaaggtgggcatgttcagagcacatctcttcaccatcaggatgatgagcagtctgtttaccatattcaccgtatgaatgtggaagatcatgatctcatggtagtcaggggtatagacataactagtcagagtgagaaaaactctgatgtgccagatcaaagtcgtaatggtatcagctgcgtagataaaggcatttactgctgtgccaacaaccctgataagcagagtgatgttctcatggacatcaaattatgtaaaggtggactggttgtttacaatcctgactgcaaaaatacgcaactagaagatcttgatggagtttcttacaaaggtccatcagttcatgcttgtgaccaagatcaggacctggaaagcatcggccatgctgttgtgaaccacaattgtcacaatagtccaaatatttcttcggaaatgagtcatccgacgacgaacgctgtaattgaccaggaaactgagaatgttatggaaccatcttgcagttcttcacaactacctaagtcgtctggagaacaaatgcatgtggaagattttctgtatctaaatgaccaagcagcaaaatttgagaaagtcagtgggcagttggcaggccctcttggccctccagagaatatgatgtataatgactcaggtgacttgcagattaaacagacttatctctcttcaggacaacatttttcttcagtttacttgaataatggcattttaagccatcagcaacctcaacttgccacaccagcttttgctttggacaatccagcatcatttattgagcctttctcaaatctgcagagcaatcgtcagcccgagacagaaaaggacattggagcagtcttctatccctttcgacacgcaactaacatcaaacagtcagcgagtttgcattgtttagtgaataaaggcttggctcaatctgcttcatttcccaggttgttgcaagagcggcatcagttaatcgatcagagtgacagtgacctctatgcacaacctcatgaggattactgcacagatgtataactggttccccgagggctgtcagtcacataataataatgataatctgttggggttgcagtcaggtaacttcttaccccaggccttaccaagtggaagcagcaccgatggagctctgttcagcaccgcatcccagtacaatcagccatcagtacacatgggacatggtgggtcaaaccgcagccaactcattgagccaaggaatcaatttggcccacctcagaattttctttctaagagtcaagacacaaaccctatgtttccggatatgtatggcttcacccagaatatagccagtggcacaagcagtcaggtagcacctatagggtctctggattgctcacattggacaaatttcatacaacaaaattctggaatgccgtctgactttacaaacaggccatctcgagggccttggaccagataactctatgacaccctggactggatgtactagattggttggttttaggcgccacctaagttggttaataaggaaactggggcaggttggaacagaatgttttccagcatccatgacttatgtcatgtagtggttttgatctgtttgaatggtgtggtttcaggaattgcttttgcaccatacctgtctgaacgcaagcgctgggaatctggagtcaaagctgaggattcccgcttttgctgtcttgccctgctgattttttttttattttgataataagctgtgccccagtttccatgtgtagtctgcctatggtgccctcagcaaaacatgatgctgtgttgttctcaattattttgttatttttttttgggttgacatgccagttatatatgaagacaagatatgtataccagtcgggatgccattttaggtatcaagagcgggcagttcgaaatgaacaagtacctttccttttggttgggaggcactaggatttctttattcaggcgtgtttacattccgtttgattagttggccgcaccgtttcgtcctaagtcacttagtgtattgactttatctaaatgtttgtttggttgtctgtacatagtgatgtataaagcgtatagcgtagatttagc

SEQ ID NO: 68485 - DNA, 3538 bp, Zea Mays
ccgcgactgcagcgtcggcggctgggaccagcggatgtgcgttcctctctctagaagctccgtccgtcttcacagccttttcctcccaacaacgcataatattagctagggtttcaacgcatctgacggcggaagctagggcgtcgccaccgtcaatgtcttggcactcccgctctgttcatcaatcgcatcgacagttaaatgaccaaatgacctgtagaatgacagcaagcaagcaaaataaacggcagacaaattgcaccaactcagagcagtgcaggccagggaagaaagcaaaatttgacacatctcattgtctagtaagtttgaagcctcatatcagtcttaaatgggatcaatatctgaggaaagttgtgccagagaaggaacaagttggaattttgtggtcagacttggcccctttcatggaaagccagaaacactgttcaggccttgctgatgttatgtatgttcctccagagattttctctcttaagagcctgaaaggtgtgctatcctatgaggcatggtctacatctcttacagaagccgagagaaaatttctcatacaattccttccaagcgagactgatgcagaagaaaatgtaaaattgttgcttacgggacaaaatcatcactttggaaatcctttccttagctggtcatcttctctttgctatggtgatattcatccggatgcactacttaacaaggagaagcacataaaaaaggatgagaaggcatatcatgttaacttgcttaattaccattccaacatggttgaaaccttgaagagttggaggaagagatggctaagttgcggtgatacagagaatttgttcagggataaccctagtaatcagatgcaaggagttatgcagctgaaagctactaacagtggaatgcccatgaaggttgcacaaagaatcgatgtttcaaagtttatgtcatacatcaaagttagtagaacacagctcaaccatataaagagactgaagcaatctggggatggtattcagaccaagcatgtttcacgtgtaattggcggccttgataaatctcatgtgaaaccttatggagctttattagaggatgaacagaggagactgcgcgagcattggctggaaatgtcttgcaatgatttacctgctgcctttgaggttcttagggaaaggaaggtgctgatggagaaatcaataaagttattaggccttgagcttcagcagaagaatgtatctgtcttgagaaaggcagaccagttaacagacataatgaaagggctaggacaacctggtgctagtgaaaatgatggtaccccagtttttcaaaatgaccaggtagaatgctcaccccaaagtatattgcaaggtgggcatgttcagagcacatctcttcaccatcaggatgatgagcagtctgtttaccatattcaccgtatgaatgtggaagatcatgatctcatggtagtcaggggtatagacataactagtcagagtgagaaaaactctgatgtgccagatcaaagtcgtaatggtatcagctgcgtagataaaggcatttactgctgtgccaacaaccctgataagcagagtgatgttctcatggacatcaaattatgtaaaggtggactggttgtttacaatcctgactgcaaaaatacgcaactagaagatcttgatggagtttcttacaaaggtccatcagttcatgcttgtgaccaagatcaggacctggaaagcatcggccatgctgttgtgaaccacaattgtcacaatagtccaaatatttcttcggaaatgagtcatccgacgacgaacgctgtaattgaccaggaaactgagaatgttatggaaccatcttgcagttcttcacaactacctaagtcgtctggagaacaaatgcatgtggaagattttctgtatctaaatgaccaagcagcaaaatttgagaaagtcagtgggcagttggcaggccctcttggccctccagagaatatgatgtataatgactcaggtgacttgcagattaaacagacttatctctcttcaggacaacatttttcttcagtttacttgaataatggcattttaagccatcagcaacctcaacttgccacaccagcttttgctttggacaatccagcatcatttattgagcctttctcaaatctgcagagcaatcgtcagcccgagacagaaaaggacattggagcagtcttctatccctttcgacacgcaactaacatcaaacagtcagcgagtttgcattgtttagtgaataaaggcttggctcaatctgcttcatttcccaggttgttgcaagagcggcatcagttaatcgatcagagtgacagtgacctctatgcacaacctcatgaggattactgcacagatgtgagttgtccaactaaagtgaaccttcatatctccgaacagcattcttatactgcttttgcttcgatggatcataggtataactggttccccgagggctgtcagtcacataataataatgataatctgttggggttgcagtcaggtaacttcttaccccaggccttaccaagtggaagcagcaccgatggagctctgttcagcaccgcatcccagtacaatcagccatcagtacacatgggacatggtgggtcaaaccgcagccaactcattgagccaaggaatcaatttggcccacctcagaattttctttctaagagtcaagacacaaaccctatgtttccggatatgtatggcttcacccagaatatagccagtggcacaagcagtcaggtagcacctatagggtctctggattgctcacattggacaaatttcatacaacaaaattctggaatgccgtctgactttacaaacaggccatctcgagggccttggaccagataactctatgacaccctggactggatgtactagattggttggttttaggcgccacctaagttggttaataaggaaactggggcaggttggaacagaatgttttccagcatccatgacttatgtcatgtagtggttttgatctgtttgaatggtgtggtttcaggaattgcttttgcaccatacctgtctgaacgcaagcgctgggaatctggagtcaaagctgaggattcccgcttttgctgtcttgccctgctgattttttttttattttgataataagctgtgccccagtttccatgtgtagtctgcctatggtgccctcagcaaaacatgatgctgtgttgttctcaattattttgttatttttttttgggttgacatgccagttatatatgaagacaagatatgtataccagtcgggatgccattttaggtatcaagagcgggcagttcgaaatgaacaagtacctttccttttggttgggaggcactaggatttctttattcaggcgtgtttacattccgtttgattagttggccgcaccgtttcgtcctaagtcacttagtgtattgactttatctaaatgtttgtttggttgtctgtacatagtgatgtataaagcgtatagcgtagatttagc

SEQ ID NO: 68486 - DNA, 3637 bp, Zea Mays
ccgcgactgcagcgtcggcggctgggaccagcggatgtgcgttcctctctctagaagctccgtccgtcttcacagccttttcctcccaacaacgcataatattagctagggtttcaacgcatctgacggcggaagctagggcgtcgccaccgtcaatgtcttggcactcccgctctgttcatcaatcgcatcgacaggtgctccatgattctctataacatccgaaataaattaggattaaagcaagaataggaagttattcaaaactcaaaagtaaagggtttccggtcttccagttaaatgaccaaatgacctgtagaatgacagcaagcaagcaaaataaacggcagacaaattgcaccaactcagagcagtgcaggccagggaagaaagcaaaatttgacacatctcattgtctagtaagtttgaagcctcatatcagtcttaaatgggatcaatatctgaggaaagttgtgccagagaaggaacaagttggaattttgtggtcagacttggcccctttcatggaaagccagaaacactgttcaggccttgctgatgttatgtatgttcctccagagattttctctcttaagagcctgaaaggtgtgctatcctatgaggcatggtctacatctcttacagaagccgagagaaaatttctcatacaattccttccaagcgagactgatgcagaagaaaatgtaaaattgttgcttacgggacaaaatcatcactttggaaatcctttccttagctggtcatcttctctttgctatggtgatattcatccggatgcactacttaacaaggagaagcacataaaaaaggatgagaaggcatatcatgttaacttgcttaattaccattccaacatggttgaaaccttgaagagttggaggaagagatggctaagttgcggtgatacagagaatttgttcagggataaccctagtaatcagatgcaaggagttatgcagctgaaagctactaacagtggaatgcccatgaaggttgcacaaagaatcgatgtttcaaagtttatgtcatacatcaaagttagtagaacacagctcaaccatataaagagactgaagcaatctggggatggtattcagaccaagcatgtttcacgtgtaattggcggccttgataaatctcatgtgaaaccttatggagctttattagaggatgaacagaggagactgcgcgagcattggctggaaatgtcttgcaatgatttacctgctgcctttgaggttcttagggaaaggaaggtgctgatggagaaatcaataaagttattaggccttgagcttcagcagaagaatgtatctgtcttgagaaaggcagaccagttaacagacataatgaaagggctaggacaacctggtgctagtgaaaatgatggtaccccagtttttcaaaatgaccaggtagaatgctcaccccaaagtatattgcaaggtgggcatgttcagagcacatctcttcaccatcaggatgatgagcagtctgtttaccatattcaccgtatgaatgtggaagatcatgatctcatggtagtcaggggtatagacataactagtcagagtgagaaaaactctgatgtgccagatcaaagtcgtaatggtatcagctgcgtagataaaggcatttactgctgtgccaacaaccctgataagcagagtgatgttctcatggacatcaaattatgtaaaggtggactggttgtttacaatcctgactgcaaaaatacgcaactagaagatcttgatggagtttcttacaaaggtccatcagttcatgcttgtgaccaagatcaggacctggaaagcatcggccatgctgttgtgaaccacaattgtcacaatagtccaaatatttcttcggaaatgagtcatccgacgacgaacgctgtaattgaccaggaaactgagaatgttatggaaccatcttgcagttcttcacaactacctaagtcgtctggagaacaaatgcatgtggaagattttctgtatctaaatgaccaagcagcaaaatttgagaaagtcagtgggcagttggcaggccctcttggccctccagagaatatgatgtataatgactcaggtgacttgcagattaaacagacttatctctcttcaggacaacatttttcttcagtttacttgaataatggcattttaagccatcagcaacctcaacttgccacaccagcttttgctttggacaatccagcatcatttattgagcctttctcaaatctgcagagcaatcgtcagcccgagacagaaaaggacattggagcagtcttctatccctttcgacacgcaactaacatcaaacagtcagcgagtttgcattgtttagtgaataaaggcttggctcaatctgcttcatttcccaggttgttgcaagagcggcatcagttaatcgatcagagtgacagtgacctctatgcacaacctcatgaggattactgcacagatgtgagttgtccaactaaagtgaaccttcatatctccgaacagcattcttatactgcttttgcttcgatggatcataggtataactggttccccgagggctgtcagtcacataataataatgataatctgttggggttgcagtcaggtaacttcttaccccaggccttaccaagtggaagcagcaccgatggagctctgttcagcaccgcatcccagtacaatcagccatcagtacacatgggacatggtgggtcaaaccgcagccaactcattgagccaaggaatcaatttggcccacctcagaattttctttctaagagtcaagacacaaaccctatgtttccggatatgtatggcttcacccagaatatagccagtggcacaagcagtcaggtagcacctatagggtctctggattgctcacattggacaaatttcatacaacaaaattctggaatgccgtctgactttacaaacaggccatctcgagggccttggaccagataactctatgacaccctggactggatgtactagattggttggttttaggcgccacctaagttggttaataaggaaactggggcaggttggaacagaatgttttccagcatccatgacttatgtcatgtagtggttttgatctgtttgaatggtgtggtttcaggaattgcttttgcaccatacctgtctgaacgcaagcgctgggaatctggagtcaaagctgaggattcccgcttttgctgtcttgccctgctgattttttttttattttgataataagctgtgccccagtttccatgtgtagtctgcctatggtgccctcagcaaaacatgatgctgtgttgttctcaattattttgttatttttttttgggttgacatgccagttatatatgaagacaagatatgtataccagtcgggatgccattttaggtatcaagagcgggcagttcgaaatgaacaagtacctttccttttggttgggaggcactaggatttctttattcaggcgtgtttacattccgtttgattagttggccgcaccgtttcgtcctaagtcacttagtgtattgactttatctaaatgtttgtttggttgtctgtacatagtgatgtataaagcgtatagcgtagatttagc

SEQ ID NO: 68487 - DNA, 4118 bp, Zea Mays
ccgcgactgcagcgtcggcggctgggaccagcggatgtgcgttcctctctctagaagctccgtccgtcttcacagccttttcctcccaacaacgcataatattagctagggtttcaacgcatctgacggcggaagctagggcgtcgccaccgtcaatgtcttggcactcccgctctgttcatcaatcgcatcgacaggagcccatcccctcctccctcaaacgacgccgggtgacaagcaggaaaagtgctccatgattctctataacatccgaaataaattaggattaaagcaagaataggaagttattcaaaactcaaaagtaaagggtttccggtcttccagttaaatgaccaaatgacctgtagaatgacagcaagcaagcaaaataaacggcagacaaattgcaccaactcagagcagtgcaggccagggaagaaagcaaaatttgacacatctcattgtctagtaagtttgaagcctcatatcagtcttaaatgggatcaatatctgaggaaagttgtgccagagaaggaacaagttggaattttgtggtcagacttggcccctttcatggaaagccagaaacactgttcaggccttgctgatgttatgtatgttcctccagagattttctctcttaagagcctgaaaggtgtgctatcctatgaggcatggtctacatctcttacagaagccgagagaaaatttctcatacaattccttccaagcgagactgatgcagaagaaaatgtaaaattgttgcttacgggacaaaatcatcactttggaaatcctttccttagctggtcatcttctctttgctatggtgatattcatccggatgcactacttaacaaggagaagcacataaaaaaggatgagaaggcatatcatgttaacttgcttaattaccattccaacatggttgaaaccttgaagagttggaggaagagatggctaagttgcggtgatacagagaatttgttcagggataaccctagtaatcagatgcaaggagttatgcagctgaaagctactaacagtggaatgcccatgaaggttgcacaaagaatcgatgtttcaaagtttatgtcatacatcaaagttagtagaacacagctcaaccatataaagagactgaagcaatctggggatggtattcagaccaagcatgtttcacgtgtaattggcggccttgataaatctcatgtgaaaccttatggagctttattagaggatgaacagaggagactgcgcgagcattggctggaaatgtcttgcaatgatttacctgctgcctttgaggttcttagggaaaggaaggtgctgatggagaaatcaataaagttattaggccttgagcttcagcagaagaatgtatctgtcttgagaaaggttcgctgtgacttgtccttcaattctttttcttaagtctctaatttttgtcttgagggaagtgatttacttgaatgtgtaaaaaatacagtggatgagaataccgttgtatgcttacttctgttatgtatcttccccatttacaatgtatcatagcattcgccactatagatgagaataccatgactataaagatactgaattgtaatagaggcatctagtatgaaagccataggcagtatttcattatgaatggtgaattgccctgcagtgttatcttatttgtataagctaatatattgtcacatttttgtaagtatactttgttgtaatcttcataatgaaaataaattcttataaaaaacaatcttaatttgtttttaatacccaatagatgattatggtttatttatgtttgtttatgatgagaaggcagaccagttaacagacataatgaaagggctaggacaacctggtgctagtgaaaatgatggtaccccagtttttcaaaatgaccaggtagaatgctcaccccaaagtatattgcaaggtgggcatgttcagagcacatctcttcaccatcaggatgatgagcagtctgtttaccatattcaccgtatgaatgtggaagatcatgatctcatggtagtcaggggtatagacataactagtcagagtgagaaaaactctgatgtgccagatcaaagtcgtaatggtatcagctgcgtagataaaggcatttactgctgtgccaacaaccctgataagcagagtgatgttctcatggacatcaaattatgtaaaggtggactggttgtttacaatcctgactgcaaaaatacgcaactagaagatcttgatggagtttcttacaaaggtccatcagttcatgcttgtgaccaagatcaggacctggaaagcatcggccatgctgttgtgaaccacaattgtcacaatagtccaaatatttcttcggaaatgagtcatccgacgacgaacgctgtaattgaccaggaaactgagaatgttatggaaccatcttgcagttcttcacaactacctaagtcgtctggagaacaaatgcatgtggaagattttctgtatctaaatgaccaagcagcaaaatttgagaaagtcagtgggcagttggcaggccctcttggccctccagagaatatgatgtataatgactcaggtgacttgcagattaaacagacttatctctcttcaggacaacatttttcttcagtttacttgaataatggcattttaagccatcagcaacctcaacttgccacaccagcttttgctttggacaatccagcatcatttattgagcctttctcaaatctgcagagcaatcgtcagcccgagacagaaaaggacattggagcagtcttctatccctttcgacacgcaactaacatcaaacagtcagcgagtttgcattgtttagtgaataaaggcttggctcaatctgcttcatttcccaggttgttgcaagagcggcatcagttaatcgatcagagtgacagtgacctctatgcacaacctcatgaggattactgcacagatgtgagttgtccaactaaagtgaaccttcatatctccgaacagcattcttatactgcttttgcttcgatggatcataggtataactggttccccgagggctgtcagtcacataataataatgataatctgttggggttgcagtcaggtaacttcttaccccaggccttaccaagtggaagcagcaccgatggagctctgttcagcaccgcatcccagtacaatcagccatcagtacacatgggacatggtgggtcaaaccgcagccaactcattgagccaaggaatcaatttggcccacctcagaattttctttctaagagtcaagacacaaaccctatgtttccggatatgtatggcttcacccagaatatagccagtggcacaagcagtcaggtagcacctatagggtctctggattgctcacattggacaaatttcatacaacaaaattctggaatgccgtctgactttacaaacaggccatctcgagggccttggaccagataactctatgacaccctggactggatgtactagattggttggttttaggcgccacctaagttggttaataaggaaactggggcaggttggaacagaatgttttccagcatccatgacttatgtcatgtagtggttttgatctgtttgaatggtgtggtttcaggaattgcttttgcaccatacctgtctgaacgcaagcgctgggaatctggagtcaaagctgaggattcccgcttttgctgtcttgccctgctgattttttttttattttgataataagctgtgccccagtttccatgtgtagtctgcctatggtgccctcagcaaaacatgatgctgtgttgttctcaattattttgttatttttttttgggttgacatgccagttatatatgaagacaagatatgtataccagtcgggatgccattttaggtatcaagagcgggcagttcgaaatgaacaagtacctttccttttggttgggaggcactaggatttctttattcaggcgtgtttacattccgtttgattagttggccgcaccgtttcgtcctaagtcacttagtgtattgactttatctaaatgtttgtttggttgtctgtacatagtgatgtataaagcgtatagcgtagatttagc

SEQ ID NO: 68488 - DNA, 4169 bp, Zea Mays
ccgcgactgcagcgtcggcggctgggaccagcggatgtgcgttcctctctctagaagctccgtccgtcttcacagccttttcctcccaacaacgcataatattagctagggtttcaacgcatctgacggcggaagctagggcgtcgccaccgtcaatgtcttggcactcccgctctgttcatcaatcgcatcgacaggagccctatcctcaatcatgtctttcccgccgagctacacaccttcaggagcccatcccctcctccctcaaacgacgccgggtgacaagcaggaaaagtagtgctccatgattctctataacatccgaaataaattaggattaaagcaagaataggaagttattcaaaactcaaaagtaaagggtttccggtcttccagttaaatgaccaaatgacctgtagaatgacagcaagcaagcaaaataaacggcagacaaattgcaccaactcagagcagtgcaggccagggaagaaagcaaaatttgacacatctcattgtctagtaagtttgaagcctcatatcagtcttaaatgggatcaatatctgaggaaagttgtgccagagaaggaacaagttggaattttgtggtcagacttggcccctttcatggaaagccagaaacactgttcaggccttgctgatgttatgtatgttcctccagagattttctctcttaagagcctgaaaggtgtgctatcctatgaggcatggtctacatctcttacagaagccgagagaaaatttctcatacaattccttccaagcgagactgatgcagaagaaaatgtaaaattgttgcttacgggacaaaatcatcactttggaaatcctttccttagctggtcatcttctctttgctatggtgatattcatccggatgcactacttaacaaggagaagcacataaaaaaggatgagaaggcatatcatgttaacttgcttaattaccattccaacatggttgaaaccttgaagagttggaggaagagatggctaagttgcggtgatacagagaatttgttcagggataaccctagtaatcagatgcaaggagttatgcagctgaaagctactaacagtggaatgcccatgaaggttgcacaaagaatcgatgtttcaaagtttatgtcatacatcaaagttagtagaacacagctcaaccatataaagagactgaagcaatctggggatggtattcagaccaagcatgtttcacgtgtaattggcggccttgataaatctcatgtgaaaccttatggagctttattagaggatgaacagaggagactgcgcgagcattggctggaaatgtcttgcaatgatttacctgctgcctttgaggttcttagggaaaggaaggtgctgatggagaaatcaataaagttattaggccttgagcttcagcagaagaatgtatctgtcttgagaaaggttcgctgtgacttgtccttcaattctttttcttaagtctctaatttttgtcttgagggaagtgatttacttgaatgtgtaaaaaatacagtggatgagaataccgttgtatgcttacttctgttatgtatcttccccatttacaatgtatcatagcattcgccactatagatgagaataccatgactataaagatactgaattgtaatagaggcatctagtatgaaagccataggcagtatttcattatgaatggtgaattgccctgcagtgttatcttatttgtataagctaatatattgtcacatttttgtaagtatactttgttgtaatcttcataatgaaaataaattcttataaaaaacaatcttaatttgtttttaatacccaatagatgattatggtttatttatgtttgtttatgatgagaaggcagaccagttaacagacataatgaaagggctaggacaacctggtgctagtgaaaatgatggtaccccagtttttcaaaatgaccaggtagaatgctcaccccaaagtatattgcaaggtgggcatgttcagagcacatctcttcaccatcaggatgatgagcagtctgtttaccatattcaccgtatgaatgtggaagatcatgatctcatggtagtcaggggtatagacataactagtcagagtgagaaaaactctgatgtgccagatcaaagtcgtaatggtatcagctgcgtagataaaggcatttactgctgtgccaacaaccctgataagcagagtgatgttctcatggacatcaaattatgtaaaggtggactggttgtttacaatcctgactgcaaaaatacgcaactagaagatcttgatggagtttcttacaaaggtccatcagttcatgcttgtgaccaagatcaggacctggaaagcatcggccatgctgttgtgaaccacaattgtcacaatagtccaaatatttcttcggaaatgagtcatccgacgacgaacgctgtaattgaccaggaaactgagaatgttatggaaccatcttgcagttcttcacaactacctaagtcgtctggagaacaaatgcatgtggaagattttctgtatctaaatgaccaagcagcaaaatttgagaaagtcagtgggcagttggcaggccctcttggccctccagagaatatgatgtataatgactcaggtgacttgcagattaaacagacttatctctcttcaggacaacatttttcttcagtttacttgaataatggcattttaagccatcagcaacctcaacttgccacaccagcttttgctttggacaatccagcatcatttattgagcctttctcaaatctgcagagcaatcgtcagcccgagacagaaaaggacattggagcagtcttctatccctttcgacacgcaactaacatcaaacagtcagcgagtttgcattgtttagtgaataaaggcttggctcaatctgcttcatttcccaggttgttgcaagagcggcatcagttaatcgatcagagtgacagtgacctctatgcacaacctcatgaggattactgcacagatgtgagttgtccaactaaagtgaaccttcatatctccgaacagcattcttatactgcttttgcttcgatggatcataggtataactggttccccgagggctgtcagtcacataataataatgataatctgttggggttgcagtcaggtaacttcttaccccaggccttaccaagtggaagcagcaccgatggagctctgttcagcaccgcatcccagtacaatcagccatcagtacacatgggacatggtgggtcaaaccgcagccaactcattgagccaaggaatcaatttggcccacctcagaattttctttctaagagtcaagacacaaaccctatgtttccggatatgtatggcttcacccagaatatagccagtggcacaagcagtcaggtagcacctatagggtctctggattgctcacattggacaaatttcatacaacaaaattctggaatgccgtctgactttacaaacaggccatctcgagggccttggaccagataactctatgacaccctggactggatgtactagattggttggttttaggcgccacctaagttggttaataaggaaactggggcaggttggaacagaatgttttccagcatccatgacttatgtcatgtagtggttttgatctgtttgaatggtgtggtttcaggaattgcttttgcaccatacctgtctgaacgcaagcgctgggaatctggagtcaaagctgaggattcccgcttttgctgtcttgccctgctgattttttttttattttgataataagctgtgccccagtttccatgtgtagtctgcctatggtgccctcagcaaaacatgatgctgtgttgttctcaattattttgttatttttttttgggttgacatgccagttatatatgaagacaagatatgtataccagtcgggatgccattttaggtatcaagagcgggcagttcgaaatgaacaagtacctttccttttggttgggaggcactaggatttctttattcaggcgtgtttacattccgtttgattagttggccgcaccgtttcgtcctaagtcacttagtgtattgactttatctaaatgtttgtttggttgtctgtacatagtgatgtataaagcgtatagcgtagatttagc

SEQ ID NO: 68489 - DNA, 3664 bp, Zea Mays
ctttcgtttgcctccatacatacggccataccaatgatgatgatgaaatgcagcacatgcacatgcatgcatgtgttcagatcggcagccactccttcaccttcgaccatgtctacggcagcacaggcacgccgtcggcggccatgttcgacgagtgcgtggcgccgctggtcgacggcctcttccagggctacaacgctacggtgctggcatacggccagaccggatcagggaagacgtacaccatgggcactgcctgcaaggaggggtcgcatatcgggatcatcccacgagccatggctgcgctgtttgacaaaattgagaacctgaaaacccaagtggagttccagttacgagtatcgttcatcgagattctgaaagaagaggtgagggatctacttgaccccactgctggtaccgtgggcaaagcagagaatggcaatggccacgcaaaactgtctgtgccagggaaaccccctgtgcagatccgagaggcgtcgaatggagtcataacgctagctggatccactgaggtgcatgtcaccactcagaaggaaatggccgcatgcctcgaacaaggttccctcagtcgcgcaactggaagtaccaacatgaacaaccagtcaagatgcgcaaaatagaccccatcatgactgcagatggaatgcctattgaagagatgaatgaagactatctctgtgccaaactacacttagtagatcttgctggatcagaacgggctaagagaactggttcagatggcctgcgcttcaaggaaggtgttcacatcaaccgaggacttctcgctctcggcaatgtcataagtgctcttggagatgagaaaaaaagaaaagaaggtgctcacgttccttatcgggacagcaagctcacccgtcttttgcaggactccctaggtggaaatagtaagactgtcatgatagcttgcataagtccagcagatattaatgctgaagagacattaaacactttgaaatatgctaaccgggcacgtaatatccaaaacaagccgattgtcaatagaaatcctatcgctgatgagatgaaaagaatgcgccagcagattgaatacttgcaggcagagcttgtttcggctcgaggaggagccacatcagatgatgttcagggtctcagagagaggatttcatggcttgaacaaacgaatgaagacctctgcagggaactatatgatagtcgcaaccggtctcaaaatgatccatgtgaacctgaaatacaaaggactttaaacggctttaccaaaagcgaagggctcaaaagaagcttgcaaagtacagatccatttgatgttccaatggctgactcagtaagaggcaaccctaaggatattgaagatgaagtagctaaagaatgggaacacacaatgctgcaggatagcatgggcaaggagttgaatgaattaaatcgacaacttgagcgaaaagagtctgagatgaaaatgtatggatgtgatactgttgcacttaagcagcacttcggaaagaaacttatggagcttgaagaagagaaaaaagcagtacagcaagagagggatagattgttggctgaagttgaaagcctaagtgctgatggccaaacacataaactccgagatgcgcagctgcagaaactaaaatcccttgaagcccagattctagacctaaagaaaaagcacgagaaccaaattcagattttgaaggaaaagcagaagagtgatgaagctgctaagaaactgcaagaagaaattcattttataaaagcgcaaaaggttcaactacaacacaaaattaaacaggaagcagaacagttcaggcaatggaaagctacccgcgagaaggaacttcttcagttacgcaaggagggacggagaaatgagtatgaacgccacaagcttcaggcacttaatcagcggcagaaattggttttgcaaaggaagaccgaagaggctgctatggctacaaaaaggctgaaagagatattagaagctaggaaatcttccgcccgtgacagttccggctggcagcaatggtacatctcaaggctataatatgggtgagagatcgctgcaaaaatggtttgatcaagagcttgaagttatggtgcatgtgcatgaagtccgaaatgagtacgaaaaacaaagccaactgcgtgctgcgcttggtgaggagcttgccattttgaaacaagaagatatacgggctggtggatctagtccccaaagagggaagaatggaaactctaggacaaataccttgtcaccaaatgcaagacaagctaggatagcatcacttgagagcatggtgacaatctcttcaaacactcttgttgcaatggcttctcaactctcagaagctgaagaaagagagcgtgccttctctgggcgtagtcgttggaatcaattgcgatcaatgggggaggcaaagagcttactgcaatatgtctttaatgttgctgctgatgccagatgccaagtaaaggagaaggaagtggagatcaaggaaatgaaggaacaaatgacagagctggtgggcattcttcgacacagtgaatcacgcagaagagaaatggagaagcagctcaagcaaagagaacagacaactccaatggccactacacctccgaaaagtggaaatggcacgacgaagcactctgctgatgaccccaacacaccactgtcccctgtcgccgttcctgcacagaagcagctcaagtattctgctggaattgtaaatagccccagcaaaggagttgctgcgataaaaaaagagcaacttaagatggttccaattgcacagttgtctgcggggaagagagtttcaatagcagggcattcaggaaagctctggaggtggaaaagaagccatcaccagtggctgatgcagttcaagtggaagtggcagaagccgtggaagttgtctgaggtgatacgacacagtgatgaaacaatcacgaggattaggcccagacctccacttcttccacataaacctcataactgatgtgaaacggacttgtttttgtctcaacaagaactgacacggtttgcaaacctacacagctaactgcctgcacaaggtaacaatgcagttaatactccatgagatctccttcgtgcttgtttttacttggccacgggatcgacaagtatgtgttcatgggtgactcttgtctatggatagatgtaaattccctgtgggttggtataaagtgagatgtcaacgtagagaaagaaaatagttagtgggtgagtgagcagagtgaatgggcattctttcatgcaaatactgagcacaatgcttaatgtttcagccttcactgacggtgacatgtcaatagttggtgttcgtcttcacaaaggaatctgtcaaaggaaggcgccttgtaaagtctttcttgtgctgttgtgtgatagttttgtgtgaagggtaactgaaagttgaatgggttttgtgctcgagtgatagtctattttcccctcttcttttgtttgttgatactaaaatgagaaaagacaagtgatattggtttggtttgctaggagtattgtgatgtaatgcagaaacttgttcccctatatcagtacacccttttaatctatgtattgtggagtactgattgctgactactgttgatgtccgaagggatccgg

SEQ ID NO: 68490 - DNA, 3375 bp, Zea Mays
caaaaccttccgcatttttggttcagatcggcagccactccttcaccttcgaccatgtctacggcagcacaggcacgccgtcggcggccatgttcgacgagtgcgtggcgccgctggtcgacggcctcttccagggctacaacgctacggtgctggcatacggccagaccggatcagggaagacgtacaccatgggcactgcctgcaaggaggggtcgcatatcgggatcatcccacgagccatggctgcgctgtttgacaaaattgagaacctgaaaacccaagtggagttccagttacgagtatcgttcatcgagattctgaaagaagaggtgagggatctacttgaccccactgctggtaccgtgggcaaagcagagaatggcaatggccacgcaaaactgtctgtgccagggaaaccccctgtgcagatccgagaggcgtcgaatggagtcataacgctagctggatccactgaggtgcatgtcaccactcagaaggaaatggccgcatgcctcgaacaaggttccctcagtcgcgcaactggaagtaccaacatgaacaaccagtcaagatgcgcaaaatagaccccatcatgactgcagatggaatgcctattgaagagatgaatgaagactatctctgtgccaaactacacttagtagatcttgctggatcagaacgggctaagagaactggttcagatggcctgcgcttcaaggaaggtgttcacatcaaccgaggacttctcgctctcggcaatgtcataagtgctcttggagatgagaaaaaaagaaaagaaggtgctcacgttccttatcgggacagcaagctcacccgtcttttgcaggactccctaggtggaaatagtaagactgtcatgatagcttgcataagtccagcagatattaatgctgaagagacattaaacactttgaaatatgctaaccgggcacgtaatatccaaaacaagccgattgtcaatagaaatcctatcgctgatgagatgaaaagaatgcgccagcagattgaatacttgcaggcagagcttgtttcggctcgaggaggagccacatcagatgatgttcagggtctcagagagaggatttcatggcttgaacaaacgaatgaagacctctgcagggaactatatgatagtcgcaaccggtctcaaaatgatccatgtgaacctgaaatacaaaggactttaaacggctttaccaaaagcgaagggctcaaaagaagcttgcaaagtacagatccatttgatgttccaatggctgactcagtaagaggcaaccctaaggatattgaagatgaagtagctaaagaatgggaacacacaatgctgcaggatagcatgggcaaggagttgaatgaattaaatcgacaacttgagcgaaaagagtctgagatgaaaatgtatggatgtgatactgttgcacttaagcagcacttcggaaagaaacttatggagcttgaagaagagaaaaaagcagtacagcaagagagggatagattgttggctgaagttgaaagcctaagtgctgatggccaaacacataaactccgagatgcgcagctgcagaaactaaaatcccttgaagcccagattctagacctaaagaaaaagcacgagaaccaaattcagattttgaaggaaaagcagaagagtgatgaagctgctaagaaactgcaagaagaaattcattttataaaagcgcaaaaggttcaactacaacacaaaattaaacaggaagcagaacagttcaggcaatggaaagctacccgcgagaaggaacttcttcagttacgcaaggagggacggagaaatgagtatgaacgccacaagcttcaggcacttaatcagcggcagaaattggttttgcaaaggaagaccgaagaggctgctatggctacaaaaaggctgaaagagatattagaagctaggaaatcttccgcccgtgacagttccgctggcagcaatggtacatctcaaggctataatatgggtgagagatcgctgcaaaaatggtttgatcaagagcttgaagttatggtgcatgtgcatgaagtccgaaatgagtacgaaaaacaaagccaactgcgtgctgcgcttggtgaggagcttgccattttgaaacaagaagatatacgggctggtggatctagtccccaaagagggaagaatggaaactctaggacaaataccttgtcaccaaatgcaagacaagctaggatagcatcacttgagagcatggtgacaatctcttcaaacactcttgttgcaatggcttctcaactctcagaagctgaagaaagagagcgtgccttctctgggcgtagtcgttggaatcaattgcgatcaatgggggaggcaaagagcttactgcaatatgtctttaatgttgctgctgatgccagatgccaagtaaaggagaaggaagtggagatcaaggaaatgaaggaacaaatgacagagctggtgggcattcttcgacacagtgaatcacgcagaagagaaatggagaagcagctcaagcaaagagaacagacaactccaatggccactacacctccgaaaagtggaaatggcacgacgaagcactctgctgatgaccccaacacaccactgtcccctgtcgccgttcctgcacagaagcagctcaagtattctgctggaattgtaaatagccccagcaaaggagttgctgcgataaaaaaagagcaacttaagatggttccaattgcacagttgtctgcggggaagagagtttcaatagcagggcattcaggaaagctctggaggtggaaaagaagccatcaccagtggctgatgcagttcaagtggaagtggcagaagccgtggaagttgtctgaggtgatacgacacagtgatgaaacaatcacgaggattaggcccagacctccacttcttccacataaacctcataactgatgtgaaacggacttgtttttgtctcaacaagaactgacacggtttgcaaacctacacagctaactgcctgcacaagccttcactgacggtgacatgtcaatagttggtgttcgtcttcacaaaggaatctgtcaaaggaaggcgccttgtaaagtctttcttgtgctgttgtgtgatagttttgtgtgaagggtaactgaaagttgaatgggttttgtgctcgagtgatagtctattttcccctcttcttttgtttgttgatactaaaatgagaaaagacaagtgatattggtttggtttgctaggagtattgtgatgtaatgcagaaacttgttcccctatatcagtacacccttttaatctatgtattgtggagtactgattgctgactactgttgatgtccgaagggatccgg

SEQ ID NO: 68491 - DNA, 3431 bp, Zea Mays
aaaaaaagtgtcggcagggcaaaaccttccgcatttttggttcagatcggcagccactccttcaccttcgaccatgtctacggcagcacaggcacgccgtcggcggccatgttcgacgagtgcgtggcgccgctggtcgacggcctcttccagggctacaacgctacggtgctggcatacggccagaccggatcagggaagacgtacaccatgggcactgcctgcaaggaggggtcgcatatcgggatcatcccacgagccatggctgcgctgtttgacaaaattgagaacctgaaaacccaagtggagttccagttacgagtatcgttcatcgagattctgaaagaagaggtgagggatctacttgaccccactgctggtaccgtgggcaaagcagagaatggcaatggccacgcaaaactgtctgtgccagggaaaccccctgtgcagatccgagaggcgtcgaatggagtcataacgctagctggatccactgaggtgcatgtcaccactcagaaggaaatggccgcatgcctcgaacaaggttccctcagtcgcgcaactggaagtaccaacatgaacaaccagtcaagtcgttcccatgccatcttcacaatcacattggagcagatgcgcaaaatagaccccatcatgactgcagatggaatgcctattgaagagatgaatgaagactatctctgtgccaaactacacttagtagatcttgctggatcagaacgggctaagagaactggttcagatggcctgcgcttcaaggaaggtgttcacatcaaccgaggacttctcgctctcggcaatgtcataagtgctcttggagatgagaaaaaaagaaaagaaggtgctcacgttccttatcgggacagcaagctcacccgtcttttgcaggactccctaggtggaaatagtaagactgtcatgatagcttgcataagtccagcagatattaatgctgaagagacattaaacactttgaaatatgctaaccgggcacgtaatatccaaaacaagccgattgtcaatagaaatcctatcgctgatgagatgaaaagaatgcgccagcagattgaatacttgcaggcagagcttgtttcggctcgaggaggagccacatcagatgatgttcagggtctcagagagaggatttcatggcttgaacaaacgaatgaagacctctgcagggaactatatgatagtcgcaaccggtctcaaaatgatccatgtgaacctgaaatacaaaggactttaaacggctttaccaaaagcgaagggctcaaaagaagcttgcaaagtacagatccatttgatgttccaatggctgactcagtaagaggcaaccctaaggatattgaagatgaagtagctaaagaatgggaacacacaatgctgcaggatagcatgggcaaggagttgaatgaattaaatcgacaacttgagcgaaaagagtctgagatgaaaatgtatggatgtgatactgttgcacttaagcagcacttcggaaagaaacttatggagcttgaagaagagaaaaaagcagtacagcaagagagggatagattgttggctgaagttgaaagcctaagtgctgatggccaaacacataaactccgagatgcgcagctgcagaaactaaaatcccttgaagcccagattctagacctaaagaaaaagcacgagaaccaaattcagattttgaaggaaaagcagaagagtgatgaagctgctaagaaactgcaagaagaaattcattttataaaagcgcaaaaggttcaactacaacacaaaattaaacaggaagcagaacagttcaggcaatggaaagctacccgcgagaaggaacttcttcagttacgcaaggagggacggagaaatgagtatgaacgccacaagcttcaggcacttaatcagcggcagaaattggttttgcaaaggaagaccgaagaggctgctatggctacaaaaaggctgaaagagatattagaagctaggaaatcttccgcccgtgacagttccgctggcagcaatggtacatctcaaggctataatatgggtgagagatcgctgcaaaaatggtttgatcaagagcttgaagttatggtgcatgtgcatgaagtccgaaatgagtacgaaaaacaaagccaactgcgtgctgcgcttggtgaggagcttgccattttgaaacaagaagatatacgggctggtggatctagtccccaaagagggaagaatggaaactctaggacaaataccttgtcaccaaatgcaagacaagctaggatagcatcacttgagagcatggtgacaatctcttcaaacactcttgttgcaatggcttctcaactctcagaagctgaagaaagagagcgtgccttctctgggcgtagtcgttggaatcaattgcgatcaatgggggaggcaaagagcttactgcaatatgtctttaatgttgctgctgatgccagatgccaagtaaaggagaaggaagtggagatcaaggaaatgaaggaacaaatgacagagctggtgggcattcttcgacacagtgaatcacgcagaagagaaatggagaagcagctcaagcaaagagaacagacaactccaatggccactacacctccgaaaagtggaaatggcacgacgaagcactctgctgatgaccccaacacaccactgtcccctgtcgccgttcctgcacagaagcagctcaagtattctgctggaattgtaaatagccccagcaaaggagttgctgcgataaaaaaagagcaacttaagatggttccaattgcacagttgtctgcggggaagagagtttcaatagcagggcattcaggaaagctctggaggtggaaaagaagccatcaccagtggctgatgcagttcaagtggaagtggcagaagccgtggaagttgtctgaggtgatacgacacagtgatgaaacaatcacgaggattaggcccagacctccacttcttccacataaacctcataactgatgtgaaacggacttgtttttgtctcaacaagaactgacacggtttgcaaacctacacagctaactgcctgcacaagccttcactgacggtgacatgtcaatagttggtgttcgtcttcacaaaggaatctgtcaaaggaaggcgccttgtaaagtctttcttgtgctgttgtgtgatagttttgtgtgaagggtaactgaaagttgaatgggttttgtgctcgagtgatagtctattttcccctcttcttttgtttgttgatactaaaatgagaaaagacaagtgatattggtttggtttgctaggagtattgtgatgtaatgcagaaacttgttcccctatatcagtacacccttttaatctatgtattgtggagtactgattgctgactactgttgatgtccgaagggatccgg

SEQ ID NO: 68492 - DNA, 4500 bp, Zea Mays
accccccacacccacaggccatccttcaccagcacacactcatctcccacacctagcctagccttgctttgtcctcctccgtctcgctctcgctctccgtctccattcccacccaccaccaaacaccaggcccaaaggaccccccgccttcccaactaagagcaccagcgcagcggggagggggaatcagggcagcaagatccgagcagcaggagtggcaagcagcatttgtagccacagctcgctcactcaattgcagctagccgcggttgcggttggactggatcggcggcagggcagggcagggcagggcgcgcggcggtggtggtagttgcagaagtgacggtcaagttttcctcgctccttgcttcggccgagactccgcctgacgctactaccaacatctccacctgaatccatctctatctacctcgcacgaacgaacagagacaggggaggggagggggggaattgaagtgtaacccaaggaaaggaaccatgatggtgtggcaggcggaggaggaggattgatccatccgtcaacccatcagacccgtccatccatcggtggtggtggtggtggctgctgttactcgctatcaccatctgctgctgcctgctttagtcttttgcttcacttctcttctttctatccttcctccccctgtctgtttgtctgtcttattgccctccctgttcttgttgctgcttgcattgagaaaagagagagagagagacagagagagatagaaagtggttgctagttgtatggtcgtccggtgggcgcgatgaccatggagcacggcgaggattgctgcgtcaaggtggcggtccacgcgcgccccctcatcggcgacgagaagctgcagggctgtaaggactgcgtcgccgtcgtgccgggcaagccgcaggttcagatcggcagccactccttcaccttcgaccatgtctacggcagcacaggcacgccgtcggcggccatgttcgacgagtgcgtggcgccgctggtcgacggcctcttccagggctacaacgctacggtgctggcatacggccagaccggatcagggaagacgtacaccatgggcactgcctgcaaggaggggtcgcatatcgggatcatcccacgagccatggctgcgctgtttgacaaaattgagaacctgaaaacccaagtggagttccagttacgagtatcgttcatcgagattctgaaagaagaggtgagggatctacttgaccccactgctggtaccgtgggcaaagcagagaatggcaatggccacgcaaaactgtctgtgccagggaaaccccctgtgcagatccgagaggcgtcgaatggagtcataacgctagctggatccactgaggtgcatgtcaccactcagaaggaaatggccgcatgcctcgaacaaggttccctcagtcgcgcaactggaagtaccaacatgaacaaccagtcaagatgcgcaaaatagaccccatcatgactgcagatggaatgcctattgaagagatgaatgaagactatctctgtgccaaactacacttagtagatcttgctggatcagaacgggctaagagaactggttcagatggcctgcgcttcaaggaaggtgttcacatcaaccgaggacttctcgctctcggcaatgtcataagtgctcttggagatgagaaaaaaagaaaagaaggtgctcacgttccttatcgggacagcaagctcacccgtcttttgcaggactccctaggtggaaatagtaagactgtcatgatagcttgcataagtccagcagatattaatgctgaagagacattaaacactttgaaatatgctaaccgggcacgtaatatccaaaacaagccgattgtcaatagaaatcctatcgctgatgagatgaaaagaatgcgccagcagattgaatacttgcaggcagagcttgtttcggctcgaggaggagccacatcagatgatgttcagggtctcagagagaggatttcatggcttgaacaaacgaatgaagacctctgcagggaactatatgatagtcgcaaccggtctcaaaatgatccatgtgaacctgaaatacaaaggactttaaacggctttaccaaaagcgaagggctcaaaagaagcttgcaaagtacagatccatttgatgttccaatggctgactcagtaagaggcaaccctaaggatattgaagatgaagtagctaaagaatgggaacacacaatgctgcaggatagcatgggcaaggagttgaatgaattaaatcgacaacttgagcgaaaagagtctgagatgaaaatgtatggatgtgatactgttgcacttaagcagcacttcggaaagaaacttatggagcttgaagaagagaaaaaagcagtacagcaagagagggatagattgttggctgaagttgaaagcctaagtgctgatggccaaacacataaactccgagatgcgcagctgcagaaactaaaatcccttgaagcccagattctagacctaaagaaaaagcacgagaaccaaattcagattttgaaggaaaagcagaagagtgatgaagctgctaagaaactgcaagaagaaattcattttataaaagcgcaaaaggttcaactacaacacaaaattaaacaggaagcagaacagttcaggcaatggaaagctacccgcgagaaggaacttcttcagttacgcaaggagggacggagaaatgagtatgaacgccacaagcttcaggcacttaatcagcggcagaaattggttttgcaaaggaagaccgaagaggctgctatggctacaaaaaggctgaaagagatattagaagctaggaaatcttccgcccgtgacagttccgtgatacctaaagccattcttgatataacacagatgggtgagagatcgctgcaaaaatggtttgatcaagagcttgaagttatggtgcatgtgcatgaagtccgaaatgagtacgaaaaacaaagccaactgcgtgctgcgcttggtgaggagcttgccattttgaaacaagaagatatacgggctggtggatctagtccccaaagagggaagaatggaaactctaggacaaataccttgtcaccaaatgcaagacaagctaggatagcatcacttgagagcatggtgacaatctcttcaaacactcttgttgcaatggcttctcaactctcagaagctgaagaaagagagcgtgccttctctgggcgtagtcgttggaatcaattgcgatcaatgggggaggcaaagagcttactgcaatatgtctttaatgttgctgctgatgccagatgccaagtaaaggagaaggaagtggagatcaaggaaatgaaggaacaaatgacagagctggtgggcattcttcgacacagtgaatcacgcagaagagaaatggagaagcagctcaagcaaagagaacagacaactccaatggccactacacctccgaaaagtggaaatggcacgacgaagcactctgctgatgaccccaacacaccactgtcccctgtcgccgttcctgcacagaagcagctcaagtattctgctggaattgtaaatagccccagcaaaggagttgctgcgataaaaaaagagcaacttaagatggttccaattgcacagttgtctgcggggaagagagtttcaatagcagggcattcaggaaagctctggaggtggaaaagaagccatcaccagtggctgatgcagttcaagtggaagtggcagaagccgtggaagttgtctgaggtgatacgacacagtgatgaaacaatcacgaggattaggcccagacctccacttcttccacataaacctcataactgatgtgaaacggacttgtttttgtctcaacaagaactgacacggtttgcaaacctacacagctaactgcctgcacaaggtaacaatgcagttaatactccatgagatctccttcgtgcttgtttttacttggccacgggatcgacaagtatgtgttcatgggtgactcttgtctatggatagatgtaaattccctgtgggttggtataaagtgagatgtcaacgtagagaaagaaaatagttagtgggtgagtgagcagagtgaatgggcattctttcatgcaaatactgagcacaatgcttaatgtttcagccttcactgacggtgacatgtcaatagttggtgttcgtcttcacaaaggaatctgtcaaaggaaggcgccttgtaaagtctttcttgtgctgttgtgtgatagttttgtgtgaagggtaactgaaagttgaatgggttttgtgctcgagtgatagtctattttcccctcttcttttgtttgttgatactaaaatgagaaaagacaagtgatattggtttggtttgctaggagtattgtgatgtaatgcagaaacttgttcccctatatcagtacacccttttaatctatgtattgtggagtactgattgctgactactgttgatgtccgaagggatccgg

SEQ ID NO: 68493 - DNA, 4448 bp, Zea Mays
accccccacacccacaggccatccttcaccagcacacactcatctcccacacctagcctagccttgctttgtcctcctccgtctcgctctcgctctccgtctccattcccacccaccaccaaacaccaggcccaaaggaccccccgccttcccaactaagagcaccagcgcagcggggagggggaatcagggcagcaagatccgagcagcaggagtggcaagcagcatttgtagccacagctcgctcactcaattgcagctagccgcggttgcggttggactggatcggcggcagggcagggcagggcagggcgcgcggcggtggtggtagttgcagaagtgacggtcaagttttcctcgctccttgcttcggccgagactccgcctgacgctactaccaacatctccacctgaatccatctctatctacctcgcacgaacgaacagagacaggggaggggagggggggaattgaagtgtaacccaaggaaaggaaccatgatggtgtggcaggcggaggaggaggattgatccatccgtcaacccatcagacccgtccatccatcggtggtggtggtggtggctgctgttactcgctatcaccatctgctgctgcctgctttagtcttttgcttcacttctcttctttctatccttcctccccctgtctgtttgtctgtcttattgccctccctgttcttgttgctgcttgcattgagaaaagagagagagagagacagagagagatagaaagtggttgctagttgtatggtcgtccggtgggcgcgatgaccatggagcacggcgaggattgctgcgtcaaggtggcggtccacgcgcgccccctcatcggcgacgagaagctgcagggctgtaaggactgcgtcgccgtcgtgccgggcaagccgcaggttcagatcggcagccactccttcaccttcgaccatgtctacggcagcacaggcacgccgtcggcggccatgttcgacgagtgcgtggcgccgctggtcgacggcctcttccagggctacaacgctacggtgctggcatacggccagaccggatcagggaagacgtacaccatgggcactgcctgcaaggaggggtcgcatatcgggatcatcccacgagccatggctgcgctgtttgacaaaattgagaacctgaaaacccaagtggagttccagttacgagtatcgttcatcgagattctgaaagaagaggtgagggatctacttgaccccactgctggtaccgtgggcaaagcagagaatggcaatggccacgcaaaactgtctgtgccagggaaaccccctgtgcagatccgagaggcgtcgaatggagtcataacgctagctggatccactgaggtgcatgtcaccactcagaaggaaatggccgcatgcctcgaacaaggttccctcagtcgcgcaactggaagtaccaacatgaacaaccagtcaagatggaatgcctattgaagagatgaatgaagactatctctgtgccaaactacacttagtagatcttgctggatcagaacgggctaagagaactggttcagatggcctgcgcttcaaggaaggtgttcacatcaaccgaggacttctcgctctcggcaatgtcataagtgctcttggagatgagaaaaaaagaaaagaaggtgctcacgttccttatcgggacagcaagctcacccgtcttttgcaggactccctaggtggaaatagtaagactgtcatgatagcttgcataagtccagcagatattaatgctgaagagacattaaacactttgaaatatgctaaccgggcacgtaatatccaaaacaagccgattgtcaatagaaatcctatcgctgatgagatgaaaagaatgcgccagcagattgaatacttgcaggcagagcttgtttcggctcgaggaggagccacatcagatgatgttcagggtctcagagagaggatttcatggcttgaacaaacgaatgaagacctctgcagggaactatatgatagtcgcaaccggtctcaaaatgatccatgtgaacctgaaatacaaaggactttaaacggctttaccaaaagcgaagggctcaaaagaagcttgcaaagtacagatccatttgatgttccaatggctgactcagtaagaggcaaccctaaggatattgaagatgaagtagctaaagaatgggaacacacaatgctgcaggatagcatgggcaaggagttgaatgaattaaatcgacaacttgagcgaaaagagtctgagatgaaaatgtatggatgtgatactgttgcacttaagcagcacttcggaaagaaacttatggagcttgaagaagagaaaaaagcagtacagcaagagagggatagattgttggctgaagttgaaagcctaagtgctgatggccaaacacataaactccgagatgcgcagctgcagaaactaaaatcccttgaagcccagattctagacctaaagaaaaagcacgagaaccaaattcagattttgaaggaaaagcagaagagtgatgaagctgctaagaaactgcaagaagaaattcattttataaaagcgcaaaaggttcaactacaacacaaaattaaacaggaagcagaacagttcaggcaatggaaagctacccgcgagaaggaacttcttcagttacgcaaggagggacggagaaatgagtatgaacgccacaagcttcaggcacttaatcagcggcagaaattggttttgcaaaggaagaccgaagaggctgctatggctacaaaaaggctgaaagagatattagaagctaggaaatcttccgcccgtgacagttccgctggcagcaatggtacatctcaaggctataatatgggtgagagatcgctgcaaaaatggtttgatcaagagcttgaagttatggtgcatgtgcatgaagtccgaaatgagcgtgctgcgcttggtgaggagcttgccattttgaaacaagaagatatacgggctggtggatctagtccccaaagagggaagaatggaaactctaggacaaataccttgtcaccaaatgcaagacaagctaggatagcatcacttgagagcatggtgacaatctcttcaaacactcttgttgcaatggcttctcaactctcagaagctgaagaaagagagcgtgccttctctgggcgtagtcgttggaatcaattgcgatcaatgggggaggcaaagagcttactgcaatatgtctttaatgttgctgctgatgccagatgccaagtaaaggagaaggaagtggagatcaaggaaatgaaggaacaaatgacagagctggtgggcattcttcgacacagtgaatcacgcagaagagaaatggagaagcagctcaagcaaagagaacagacaactccaatggccactacacctccgaaaagtggaaatggcacgacgaagcactctgctgatgaccccaacacaccactgtcccctgtcgccgttcctgcacagaagcagctcaagtattctgctggaattgtaaatagccccagcaaaggagttgctgcgataaaaaaagagcaacttaagatggttccaattgcacagttgtctgcggggaagagagtttcaatagcagggcattcaggaaagctctggaggtggaaaagaagccatcaccagtggctgatgcagttcaagtggaagtggcagaagccgtggaagttgtctgaggtgatacgacacagtgatgaaacaatcacgaggattaggcccagacctccacttcttccacataaacctcataactgatgtgaaacggacttgtttttgtctcaacaagaactgacacggtttgcaaacctacacagctaactgcctgcacaaggtaacaatgcagttaatactccatgagatctccttcgtgcttgtttttacttggccacgggatcgacaagtatgtgttcatgggtgactcttgtctatggatagatgtaaattccctgtgggttggtataaagtgagatgtcaacgtagagaaagaaaatagttagtgggtgagtgagcagagtgaatgggcattctttcatgcaaatactgagcacaatgcttaatgtttcagccttcactgacggtgacatgtcaatagttggtgttcgtcttcacaaaggaatctgtcaaaggaaggcgccttgtaaagtctttcttgtgctgttgtgtgatagttttgtgtgaagggtaactgaaagttgaatgggttttgtgctcgagtgatagtctattttcccctcttcttttgtttgttgatactaaaatgagaaaagacaagtgatattggtttggtttgctaggagtattgtgatgtaatgcagaaacttgttcccctatatcagtacacccttttaatctatgtattgtggagtactgattgctgactactgttgatgtccgaagggatccgg

SEQ ID NO: 68494 - DNA, 4516 bp, Zea Mays
accccccacacccacaggccatccttcaccagcacacactcatctcccacacctagcctagccttgctttgtcctcctccgtctcgctctcgctctccgtctccattcccacccaccaccaaacaccaggcccaaaggaccccccgccttcccaactaagagcaccagcgcagcggggagggggaatcagggcagcaagatccgagcagcaggagtggcaagcagcatttgtagccacagctcgctcactcaattgcagctagccgcggttgcggttggactggatcggcggcagggcagggcagggcagggcgcgcggcggtggtggtagttgcagaagtgacggtcaagttttcctcgctccttgcttcggccgagactccgcctgacgctactaccaacatctccacctgaatccatctctatctacctcgcacgaacgaacagagacaggggaggggagggggggaattgaagtgtaacccaaggaaaggaaccatgatggtgtggcaggcggaggaggaggattgatccatccgtcaacccatcagacccgtccatccatcggtggtggtggtggtggctgctgttactcgctatcaccatctgctgctgcctgctttagtcttttgcttcacttctcttctttctatccttcctccccctgtctgtttgtctgtcttattgccctccctgttcttgttgctgcttgcattgagaaaagagagagagagagacagagagagatagaaagtggttgctagttgtatggtcgtccggtgggcgcgatgaccatggagcacggcgaggattgctgcgtcaaggtggcggtccacgcgcgccccctcatcggcgacgagaagctgcagggctgtaaggactgcgtcgccgtcgtgccgggcaagccgcaggttcagatcggcagccactccttcaccttcgaccatgtctacggcagcacaggcacgccgtcggcggccatgttcgacgagtgcgtggcgccgctggtcgacggcctcttccagggctacaacgctacggtgctggcatacggccagaccggatcagggaagacgtacaccatgggcactgcctgcaaggaggggtcgcatatcgggatcatcccacgagccatggctgcgctgtttgacaaaattgagaacctgaaaacccaagtggagttccagttacgagtatcgttcatcgagattctgaaagaagaggtgagggatctacttgaccccactgctggtaccgtgggcaaagcagagaatggcaatggccacgcaaaactgtctgtgccagggaaaccccctgtgcagatccgagaggcgtcgaatggagtcataacgctagctggatccactgaggtgcatgtcaccactcagaaggaaatggccgcatgcctcgaacaaggttccctcagtcgcgcaactggaagtaccaacatgaacaaccagtcaagtcgttcccatgccatcttcacaatcacattggagcagatgcgcaaaatagaccccatcatgactgcagatggaatgcctattgaagagatgaatgaagactatctctgtgccaaactacacttagtagatcttgctggatcagaacgggctaagagaactggttcagatggcctgcgcttcaaggaaggtgttcacatcaaccgaggacttctcgctctcggcaatgtcataagtgctcttggagatgagaaaaaaagaaaagaaggtgctcacgttccttatcgggacagcaagctcacccgtcttttgcaggactccctaggtggaaatagtaagactgtcatgatagcttgcataagtccagcagatattaatgctgaagagacattaaacactttgaaatatgctaaccgggcacgtaatatccaaaacaagccgattgtcaatagaaatcctatcgctgatgagatgaaaagaatgcgccagcagattgaatacttgcaggcagagcttgtttcggctcgaggaggagccacatcagatgatgttcagggtctcagagagaggatttcatggcttgaacaaacgaatgaagacctctgcagggaactatatgatagtcgcaaccggtctcaaaatgatccatgtgaacctgaaatacaaaggactttaaacggctttaccaaaagcgaagggctcaaaagaagcttgcaaagtacagatccatttgatgttccaatggctgactcagtaagaggcaaccctaaggatattgaagatgaagtagctaaagaatgggaacacacaatgctgcaggatagcatgggcaaggagttgaatgaattaaatcgacaacttgagcgaaaagagtctgagatgaaaatgtatggatgtgatactgttgcacttaagcagcacttcggaaagaaacttatggagcttgaagaagagaaaaaagcagtacagcaagagagggatagattgttggctgaagttgaaagcctaagtgctgatggccaaacacataaactccgagatgcgcagctgcagaaactaaaatcccttgaagcccagattctagacctaaagaaaaagcacgagaaccaaattcagattttgaaggaaaagcagaagagtgatgaagctgctaagaaactgcaagaagaaattcattttataaaagcgcaaaaggttcaactacaacacaaaattaaacaggaagcagaacagttcaggcaatggaaagctacccgcgagaaggaacttcttcagttacgcaaggagggacggagaaatgagtatgaacgccacaagcttcaggcacttaatcagcggcagaaattggttttgcaaaggaagaccgaagaggctgctatggctacaaaaaggctgaaagagatattagaagctaggaaatcttccgcccgtgacagttccgtgatacctaaagccattcttgatataacacagatgggtgagagatcgctgcaaaaatggtttgatcaagagcttgaagttatggtgcatgtgcatgaagtccgaaatgagcgtgctgcgcttggtgaggagcttgccattttgaaacaagaagatatacgggctggtggatctagtccccaaagagggaagaatggaaactctaggacaaataccttgtcaccaaatgcaagacaagctaggatagcatcacttgagagcatggtgacaatctcttcaaacactcttgttgcaatggcttctcaactctcagaagctgaagaaagagagcgtgccttctctgggcgtagtcgttggaatcaattgcgatcaatgggggaggcaaagagcttactgcaatatgtctttaatgttgctgctgatgccagatgccaagtaaaggagaaggaagtggagatcaaggaaatgaaggaacaaatgacagagctggtgggcattcttcgacacagtgaatcacgcagaagagaaatggagaagcagctcaagcaaagagaacagacaactccaatggccactacacctccgaaaagtggaaatggcacgacgaagcactctgctgatgaccccaacacaccactgtcccctgtcgccgttcctgcacagaagcagctcaagtattctgctggaattgtaaatagccccagcaaaggagttgctgcgataaaaaaagagcaacttaagatggttccaattgcacagttgtctgcggggaagagagtttcaatagcagggcattcaggaaagctctggaggtggaaaagaagccatcaccagtggctgatgcagttcaagtggaagtggcagaagccgtggaagttgtctgaggtgatacgacacagtgatgaaacaatcacgaggattaggcccagacctccacttcttccacataaacctcataactgatgtgaaacggacttgtttttgtctcaacaagaactgacacggtttgcaaacctacacagctaactgcctgcacaaggtaacaatgcagttaatactccatgagatctccttcgtgcttgtttttacttggccacgggatcgacaagtatgtgttcatgggtgactcttgtctatggatagatgtaaattccctgtgggttggtataaagtgagatgtcaacgtagagaaagaaaatagttagtgggtgagtgagcagagtgaatgggcattctttcatgcaaatactgagcacaatgcttaatgtttcagccttcactgacggtgacatgtcaatagttggtgttcgtcttcacaaaggaatctgtcaaaggaaggcgccttgtaaagtctttcttgtgctgttgtgtgatagttttgtgtgaagggtaactgaaagttgaatgggttttgtgctcgagtgatagtctattttcccctcttcttttgtttgttgatactaaaatgagaaaagacaagtgatattggtttggtttgctaggagtattgtgatgtaatgcagaaacttgttcccctatatcagtacacccttttaatctatgtattgtggagtactgattgctgactactgttgatgtccgaagggatccgg

SEQ ID NO: 68495 - DNA, 4613 bp, Zea Mays
ggggcaccccccacacccacaggccatccttcaccagcacacactcatctcccacacctagcctagccttgctttgtcctcctccgtctcgctctcgctctccgtctccattcccacccaccaccaaacaccaggcccaaaggaccccccgccttcccaactaagagcaccagcgcagcggggagggggaatcagggcagcaagatccgagcagcaggagtggcaagcagcatttgtagccacagctcgctcactcaattgcagctagccgcggttgcggttggactggatcggcggcagggcagggcagggcagggcgcgcggcggtggtggtagttgcagaagtgacggtcaagttttcctcgctccttgcttcggccgagactccgcctgacgctactaccaacatctccacctgaatccatctctatctacctcgcacgaacgaacagagacaggggaggggagggggggaattgaagtgtaacccaaggaaaggaaccatgatggtgtggcaggcggaggaggaggattgatccatccgtcaacccatcagacccgtccatccatcggtggtggtggtggtggctgctgttactcgctatcaccatctgctgctgcctgctttagtcttttgcttcacttctcttctttctatccttcctccccctgtctgtttgtctgtcttattgccctccctgttcttgttgctgcttgcattgagaaaagagagagagagagacagagagagatagaaagtggttgctagttgtatggtcgtccggtgggcgcgatgaccatggagcacggcgaggattgctgcgtcaaggtggcggtccacgcgcgccccctcatcggcgacgagaagctgcagggctgtaaggactgcgtcgccgtcgtgccgggcaagccgcaggttcagatcggcagccactccttcaccttcgaccatgtctacggcagcacaggcacgccgtcggcggccatgttcgacgagtgcgtggcgccgctggtcgacggcctcttccagggctacaacgctacggtgctggcatacggccaggttggcatcctgctgcttcctctatcctcttcgtcggccaccaccacgcatgcctgctctcctcggtcgggaccggatcagggaagacgtacaccatgggcactgcctgcaaggaggggtcgcatatcgggatcatcccacgagccatggctgcgctgtttgacaaaattgagaacctgaaaacccaagtggagttccagttacgagtatcgttcatcgagattctgaaagaagaggtgagggatctacttgaccccactgctggtaccgtgggcaaagcagagaatggcaatggccacgcaaaactgtctgtgccagggaaaccccctgtgcagatccgagaggcgtcgaatggagtcataacgctagctggatccactgaggtgcatgtcaccactcagaaggaaatggccgcatgcctcgaacaaggttccctcagtcgcgcaactggaagtaccaacatgaacaaccagtcaagtcgttcccatgccatcttcacaatcacattggagcagatgcgcaaaatagaccccatcatgactgcagatggaatgcctattgaagagatgaatgaagactatctctgtgccaaactacacttagtagatcttgctggatcagaacgggctaagagaactggttcagatggcctgcgcttcaaggaaggtgttcacatcaaccgaggacttctcgctctcggcaatgtcataagtgctcttggagatgagaaaaaaagaaaagaaggtgctcacgttccttatcgggacagcaagctcacccgtcttttgcaggactccctaggtggaaatagtaagactgtcatgatagcttgcataagtccagcagatattaatgctgaagagacattaaacactttgaaatatgctaaccgggcacgtaatatccaaaacaagccgattgtcaatagaaatcctatcgctgatgagatgaaaagaatgcgccagcagattgaatacttgcaggcagagcttgtttcggctcgaggaggagccacatcagatgatgttcagggtctcagagagaggatttcatggcttgaacaaacgaatgaagacctctgcagggaactatatgatagtcgcaaccggtctcaaaatgatccatgtgaacctgaaatacaaaggactttaaacggctttaccaaaagcgaagggctcaaaagaagcttgcaaagtacagatccatttgatgttccaatggctgactcagtaagaggcaaccctaaggatattgaagatgaagtagctaaagaatgggaacacacaatgctgcaggatagcatgggcaaggagttgaatgaattaaatcgacaacttgagcgaaaagagtctgagatgaaaatgtatggatgtgatactgttgcacttaagcagcacttcggaaagaaacttatggagcttgaagaagagaaaaaagcagtacagcaagagagggatagattgttggctgaagttgaaagcctaagtgctgatggccaaacacataaactccgagatgcgcagctgcagaaactaaaatcccttgaagcccagattctagacctaaagaaaaagcacgagaaccaaattcagattttgaaggaaaagcagaagagtgatgaagctgctaagaaactgcaagaagaaattcattttataaaagcgcaaaaggttcaactacaacacaaaattaaacaggaagcagaacagttcaggcaatggaaagctacccgcgagaaggaacttcttcagttacgcaaggagggacggagaaatgagtatgaacgccacaagcttcaggcacttaatcagcggcagaaattggttttgcaaaggaagaccgaagaggctgctatggctacaaaaaggctgaaagagatattagaagctaggaaatcttccgcccgtgacagttccgctggcagcaatggtacatctcaaggctataatatgggtgagagatcgctgcaaaaatggtttgatcaagagcttgaagttatggtgcatgtgcatgaagtccgaaatgagtacgaaaaacaaagccaactgcgtgctgcgcttggtgaggagcttgccattttgaaacaagaagatatacgggctggtggatctagtccccaaagagggaagaatggaaactctaggacaaataccttgtcaccaaatgcaagacaagctaggatagcatcacttgagagcatggtgacaatctcttcaaacactcttgttgcaatggcttctcaactctcagaagctgaagaaagagagcgtgccttctctgggcgtagtcgttggaatcaattgcgatcaatgggggaggcaaagagcttactgcaatatgtctttaatgttgctgctgatgccagatgccaagtaaaggagaaggaagtggagatcaaggaaatgaaggaacaaatgacagagctggtgggcattcttcgacacagtgaatcacgcagaagagaaatggagaagcagctcaagcaaagagaacagacaactccaatggccactacacctccgaaaagtggaaatggcacgacgaagcactctgctgatgaccccaacacaccactgtcccctgtcgccgttcctgcacagaagcagctcaagtattctgctggaattgtaaatagccccagcaaaggagttgctgcgataaaaaaagagcaacttaagatggttccaattgcacagttgtctgcggggaagagagtttcaatagcagggcattcaggaaagctctggaggtggaaaagaagccatcaccagtggctgatgcagttcaagtggaagtggcagaagccgtggaagttgtctgaggtgatacgacacagtgatgaaacaatcacgaggattaggcccagacctccacttcttccacataaacctcataactgatgtgaaacggacttgtttttgtctcaacaagaactgacacggtttgcaaacctacacagctaactgcctgcacaaggtaacaatgcagttaatactccatgagatctccttcgtgcttgtttttacttggccacgggatcgacaagtatgtgttcatgggtgactcttgtctatggatagatgtaaattccctgtgggttggtataaagtgagatgtcaacgtagagaaagaaaatagttagtgggtgagtgagcagagtgaatgggcattctttcatgcaaatactgagcacaatgcttaatgtttcagccttcactgacggtgacatgtcaatagttggtgttcgtcttcacaaaggaatctgtcaaaggaaggcgccttgtaaagtctttcttgtgctgttgtgtgatagttttgtgtgaagggtaactgaaagttgaatgggttttgtgctcgagtgatagtctattttcccctcttcttttgtttgttgatactaaaatgagaaaagacaagtgatattggtttggtttgctaggagtattgtgatgtaatgcagaaacttgttcccctatatcagtacacccttttaatctatgtattgtggagtactgattgctgactactgttgatgtccgaagggatccgg

SEQ ID NO: 68496 - DNA, 4498 bp, Zea Mays
aggggcaccccccacacccacaggccatccttcaccagcacacactcatctcccacacctagcctagccttgctttgtcctcctccgtctcgctctcgctctccgtctccattcccacccaccaccaaacaccaggcccaaaggaccccccgccttcccaactaagagcaccagcgcagcggggagggggaatcagggcagcaagatccgagcagcaggagtggcaagcagcatttgtagccacagctcgctcactcaattgcagctagccgcggttgcggttggactggatcggcggcagggcagggcagggcagggcgcgcggcggtggtggtagttgcagaagtgacggtcaagttttcctcgctccttgcttcggccgagactccgcctgacgctactaccaacatctccacctgaatccatctctatctacctcgcacgaacgaacagagacaggggaggggagggggggaattgaagtgtaacccaaggaaaggaaccatgatggtgtggcaggcggaggaggaggattgatccatccgtcaacccatcagacccgtccatccatcggtggtggtggtggtggctgctgttactcgctatcaccatctgctgctgcctgctttagtcttttgcttcacttctcttctttctatccttcctccccctgtctgtttgtctgtcttattgccctccctgttcttgttgctgcttgcattgagaaaagagagagagagagacagagagagatagaaagtggttgctagttgtatggtcgtccggtgggcgcgatgaccatggagcacggcgaggattgctgcgtcaaggtggcggtccacgcgcgccccctcatcggcgacgagaagctgcagggctgtaaggactgcgtcgccgtcgtgccgggcaagccgcaggttcagatcggcagccactccttcaccttcgaccatgtctacggcagcacaggcacgccgtcggcggccatgttcgacgagtgcgtggcgccgctggtcgacggcctcttccagggctacaacgctacggtgctggcatacggccagaccggatcagggaagacgtacaccatgggcactgcctgcaaggaggggtcgcatatcgggatcatcccacgagccatggctgcgctgtttgacaaaattgagaacctgaaaacccaagtggagttccagttacgagtatcgttcatcgagattctgaaagaagaggtgagggatctacttgaccccactgctggtaccgtgggcaaagcagagaatggcaatggccacgcaaaactgtctgtgccagggaaaccccctgtgcagatccgagaggcgtcgaatggagtcataacgctagctggatccactgaggtgcatgtcaccactcagaaggaaatggccgcatgcctcgaacaaggttccctcagtcgcgcaactggaagtaccaacatgaacaaccagtcaagatgcgcaaaatagaccccatcatgactgcagatggaatgcctattgaagagatgaatgaagactatctctgtgccaaactacacttagtagatcttgctggatcagaacgggctaagagaactggttcagatggcctgcgcttcaaggaaggtgttcacatcaaccgaggacttctcgctctcggcaatgtcataagtgctcttggagatgagaaaaaaagaaaagaaggtgctcacgttccttatcgggacagcaagctcacccgtcttttgcaggactccctaggtggaaatagtaagactgtcatgatagcttgcataagtccagcagatattaatgctgaagagacattaaacactttgaaatatgctaaccgggcacgtaatatccaaaacaagccgattaaatcctatcgctgatgagatgaaaagaatgcgccagcagattgaatacttgcaggcagagcttgtttcggctcgaggaggagccacatcagatgatgttcagggtctcagagagaggatttcatggcttgaacaaacgaatgaagacctctgcagggaactatatgatagtcgcaaccggtctcaaaatgatccatgtgaacctgaaatacaaaggactttaaacggctttaccaaaagcgaagggctcaaaagaagcttgcaaagtacagatccatttgatgttccaatggctgactcagtaagaggcaaccctaaggatattgaagatgaagtagctaaagaatgggaacacacaatgctgcaggatagcatgggcaaggagttgaatgaattaaatcgacaacttgagcgaaaagagtctgagatgaaaatgtatggatgtgatactgttgcacttaagcagcacttcggaaagaaacttatggagcttgaagaagagaaaaaagcagtacagcaagagagggatagattgttggctgaagttgaaagcctaagtgctgatggccaaacacataaactccgagatgcgcagctgcagaaactaaaatcccttgaagcccagattctagacctaaagaaaaagcacgagaaccaaattcagattttgaaggaaaagcagaagagtgatgaagctgctaagaaactgcaagaagaaattcattttataaaagcgcaaaaggttcaactacaacacaaaattaaacaggaagcagaacagttcaggcaatggaaagctacccgcgagaaggaacttcttcagttacgcaaggagggacggagaaatgagtatgaacgccacaagcttcaggcacttaatcagcggcagaaattggttttgcaaaggaagaccgaagaggctgctatggctacaaaaaggctgaaagagatattagaagctaggaaatcttccgcccgtgacagttccgctggcagcaatggtacatctcaaggctataatatgggtgagagatcgctgcaaaaatggtttgatcaagagcttgaagttatggtgcatgtgcatgaagtccgaaatgagtacgaaaaacaaagccaactgcgtgctgcgcttggtgaggagcttgccattttgaaacaagaagatatacgggctggtggatctagtccccaaagagggaagaatggaaactctaggacaaataccttgtcaccaaatgcaagacaagctaggatagcatcacttgagagcatggtgacaatctcttcaaacactcttgttgcaatggcttctcaactctcagaagctgaagaaagagagcgtgccttctctgggcgtagtcgttggaatcaattgcgatcaatgggggaggcaaagagcttactgcaatatgtctttaatgttgctgctgatgccagatgccaagtaaaggagaaggaagtggagatcaaggaaatgaaggaacaaatgacagagctggtgggcattcttcgacacagtgaatcacgcagaagagaaatggagaagcagctcaagcaaagagaacagacaactccaatggccactacacctccgaaaagtggaaatggcacgacgaagcactctgctgatgaccccaacacaccactgtcccctgtcgccgttcctgcacagaagcagctcaagtattctgctggaattgtaaatagccccagcaaaggagttgctgcgataaaaaaagagcaacttaagatggttccaattgcacagttgtctgcggggaagagagtttcaatagcagggcattcaggaaagctctggaggtggaaaagaagccatcaccagtggctgatgcagttcaagtggaagtggcagaagccgtggaagttgtctgaggtgatacgacacagtgatgaaacaatcacgaggattaggcccagacctccacttcttccacataaacctcataactgatgtgaaacggacttgtttttgtctcaacaagaactgacacggtttgcaaacctacacagctaactgcctgcacaaggtaacaatgcagttaatactccatgagatctccttcgtgcttgtttttacttggccacgggatcgacaagtatgtgttcatgggtgactcttgtctatggatagatgtaaattccctgtgggttggtataaagtgagatgtcaacgtagagaaagaaaatagttagtgggtgagtgagcagagtgaatgggcattctttcatgcaaatactgagcacaatgcttaatgtttcagccttcactgacggtgacatgtcaatagttggtgttcgtcttcacaaaggaatctgtcaaaggaaggcgccttgtaaagtctttcttgtgctgttgtgtgatagttttgtgtgaagggtaactgaaagttgaatgggttttgtgctcgagtgatagtctattttcccctcttcttttgtttgttgatactaaaatgagaaaagacaagtgatattggtttggtttgctaggagtattgtgatgtaatgcagaaacttgttcccctatatcagtacacccttttaatctatgtattgtggagtactgattgctgactactgttgatgtccgaagggatccgg

SEQ ID NO: 68497 - DNA, 4497 bp, Zea Mays
agccaagagagcggcaggccgcaggggcaccccccacacccacaggccatccttcaccagcacacactcatctcccacacctagcctagccttgctttgtcctcctccgtctcgctctcgctctccgtctccattcccacccaccaccaaacaccaggcccaaaggaccccccgccttcccaactaagagcaccagcgcagcggggagggggaatcagggcagcaagatccgagcagcaggagtggcaagcagcatttgtagccacagctcgctcactcaattgcagctagccgcggttgcggttggactggatcggcggcagggcagggcagggcagggcgcgcggcggtggtggtagttgcagaagtgacggtcaagttttcctcgctccttgcttcggccgagactccgcctgacgctactaccaacatctccacctgaatccatctctatctacctcgcacgaacgaacagagacaggggaggggagggggggaattgaagtgtaacccaaggaaaggaaccatgatggtgtggcaggcggaggaggaggattgatccatccgtcaacccatcagacccgtccatccatcggtggtggtggtggtggctgctgttactcgctatcaccatctgctgctgcctgctttagtcttttgcttcacttctcttctttctatccttcctccccctgtctgtttgtctgtcttattgccctccctgttcttgttgctgcttgcattgagaaaagagagagagagagacagagagagatagaaagtggttgctagttgtatggtcgtccggtgggcgcgatgaccatggagcacggcgaggattgctgcgtcaaggtggcggtccacgcgcgccccctcatcggcgacgagaagctgcagggctgtaaggactgcgtcgccgtcgtgccgggcaagccgcaggttcagatcggcagccactccttcaccttcgaccatgtctacggcagcacaggcacgccgtcggcggccatgttcgacgagtgcgtggcgccgctggtcgacggcctcttccagggctacaacgctacggtgctggcatacggccagaccggatcagggaagacgtacaccatgggcactgcctgcaaggaggggtcgcatatcgggatcatcccacgagccatggctgcgctgtttgacaaaattgagaacctgaaaacccaagtggagttccagttacgagtatcgttcatcgagattctgaaagaagaggtgagggatctacttgaccccactgctggtaccgtgggcaaagcagagaatggcaatggccacgcaaaactgtctgtgccagggaaaccccctgtgcagatccgagaggcgtcgaatggagtcataacgctagctggatccactgaggtgcatgtcaccactcagaaggaaatggccgcatgcctcgaacaaggttccctcagtcgcgcaactggaagtaccaacatgaacaaccagtcaagatggaatgcctattgaagagatgaatgaagactatctctgtgccaaactacacttagtagatcttgctggatcagaacgggctaagagaactggttcagatggcctgcgcttcaaggaaggtgttcacatcaaccgaggacttctcgctctcggcaatgtcataagtgctcttggagatgagaaaaaaagaaaagaaggtgctcacgttccttatcgggacagcaagctcacccgtcttttgcaggactccctaggtggaaatagtaagactgtcatgatagcttgcataagtccagcagatattaatgctgaagagacattaaacactttgaaatatgctaaccgggcacgtaatatccaaaacaagccgattgtcaatagaaatcctatcgctgatgagatgaaaagaatgcgccagcagattgaatacttgcaggcagagcttgtttcggctcgaggaggagccacatcagatgatgttcagggtctcagagagaggatttcatggcttgaacaaacgaatgaagacctctgcagggaactatatgatagtcgcaaccggtctcaaaatgatccatgtgaacctgaaatacaaaggactttaaacggctttaccaaaagcgaagggctcaaaagaagcttgcaaagtacagatccatttgatgttccaatggctgactcagtaagaggcaaccctaaggatattgaagatgaagtagctaaagaatgggaacacacaatgctgcaggatagcatgggcaaggagttgaatgaattaaatcgacaacttgagcgaaaagagtctgagatgaaaatgtatggatgtgatactgttgcacttaagcagcacttcggaaagaaacttatggagcttgaagaagagaaaaaagcagtacagcaagagagggatagattgttggctgaagttgaaagcctaagtgctgatggccaaacacataaactccgagatgcgcagctgcagaaactaaaatcccttgaagcccagattctagacctaaagaaaaagcacgagaaccaaattcagattttgaaggaaaagcagaagagtgatgaagctgctaagaaactgcaagaagaaattcattttataaaagcgcaaaaggttcaactacaacacaaaattaaacaggaagcagaacagttcaggcaatggaaagctacccgcgagaaggaacttcttcagttacgcaaggagggacggagaaatgagtatgaacgccacaagcttcaggcacttaatcagcggcagaaattggttttgcaaaggaagaccgaagaggctgctatggctacaaaaaggctgaaagagatattagaagctaggaaatcttccgcccgtgacagttccgctggcagcaatggtacatctcaaggctataatatgggtgagagatcgctgcaaaaatggtttgatcaagagcttgaagttatggtgcatgtgcatgaagtccgaaatgagtacgaaaaacaaagccaactgcgtgctgcgcttggtgaggagcttgccattttgaaacaagaagatatacgggctggtggatctagtccccaaagagggaagaatggaaactctaggacaaataccttgtcaccaaatgcaagacaagctaggatagcatcacttgagagcatggtgacaatctcttcaaacactcttgttgcaatggcttctcaactctcagaagctgaagaaagagagcgtgccttctctgggcgtagtcgttggaatcaattgcgatcaatgggggaggcaaagagcttactgcaatatgtctttaatgttgctgctgatgccagatgccaagtaaaggagaaggaagtggagatcaaggaaatgaaggaacaaatgacagagctggtgggcattcttcgacacagtgaatcacgcagaagagaaatggagaagcagctcaagcaaagagaacagacaactccaatggccactacacctccgaaaagtggaaatggcacgacgaagcactctgctgatgaccccaacacaccactgtcccctgtcgccgttcctgcacagaagcagctcaagtattctgctggaattgtaaatagccccagcaaaggagttgctgcgataaaaaaagagcaacttaagatggttccaattgcacagttgtctgcggggaagagagtttcaatagcagggcattcaggaaagctctggaggtggaaaagaagccatcaccagtggctgatgcagttcaagtggaagtggcagaagccgtggaagttgtctgaggtgatacgacacagtgatgaaacaatcacgaggattaggcccagacctccacttcttccacataaacctcataactgatgtgaaacggacttgtttttgtctcaacaagaactgacacggtttgcaaacctacacagctaactgcctgcacaaggtaacaatgcagttaatactccatgagatctccttcgtgcttgtttttacttggccacgggatcgacaagtatgtgttcatgggtgactcttgtctatggatagatgtaaattccctgtgggttggtataaagtgagatgtcaacgtagagaaagaaaatagttagtgggtgagtgagcagagtgaatgggcattctttcatgcaaatactgagcacaatgcttaatgtttcagccttcactgacggtgacatgtcaatagttggtgttcgtcttcacaaaggaatctgtcaaaggaaggcgccttgtaaagtctttcttgtgctgttgtgtgatagttttgtgtgaagggtaactgaaagttgaatgggttttgtgctcgagtgatagtctattttcccctcttcttttgtttgttgatactaaaatgagaaaagacaagtgatattggtttggtttgctaggagtattgtgatgtaatgcagaaacttgttcccctatatcagtacacccttttaatctatgtattgtggagtactgattgctgactactgttgatgtccgaagggatccgg

SEQ ID NO: 68498 - DNA, 4539 bp, Zea Mays
aaaatactccaagccaagagagcggcaggccgcaggggcaccccccacacccacaggccatccttcaccagcacacactcatctcccacacctagcctagccttgctttgtcctcctccgtctcgctctcgctctccgtctccattcccacccaccaccaaacaccaggcccaaaggaccccccgccttcccaactaagagcaccagcgcagcggggagggggaatcagggcagcaagatccgagcagcaggagtggcaagcagcatttgtagccacagctcgctcactcaattgcagctagccgcggttgcggttggactggatcggcggcagggcagggcagggcagggcgcgcggcggtggtggtagttgcagaagtgacggtcaagttttcctcgctccttgcttcggccgagactccgcctgacgctactaccaacatctccacctgaatccatctctatctacctcgcacgaacgaacagagacaggggaggggagggggggaattgaagtgtaacccaaggaaaggaaccatgatggtgtggcaggcggaggaggaggattgatccatccgtcaacccatcagacccgtccatccatcggtggtggtggtggtggctgctgttactcgctatcaccatctgctgctgcctgctttagtcttttgcttcacttctcttctttctatccttcctccccctgtctgtttgtctgtcttattgccctccctgttcttgttgctgcttgcattgagaaaagagagagagagagacagagagagatagaaagtggttgctagttgtatggtcgtccggtgggcgcgatgaccatggagcacggcgaggattgctgcgtcaaggtggcggtccacgcgcgccccctcatcggcgacgagaagctgcagggctgtaaggactgcgtcgccgtcgtgccgggcaagccgcaggttcagatcggcagccactccttcaccttcgaccatgtctacggcagcacaggcacgccgtcggcggccatgttcgacgagtgcgtggcgccgctggtcgacggcctcttccagggctacaacgctacggtgctggcatacggccagaccggatcagggaagacgtacaccatgggcactgcctgcaaggaggggtcgcatatcgggatcatcccacgagccatggctgcgctgtttgacaaaattgagaacctgaaaacccaagtggagttccagttacgagtatcgttcatcgagattctgaaagaagaggtgagggatctacttgaccccactgctggtaccgtgggcaaagcagagaatggcaatggccacgcaaaactgtctgtgccagggaaaccccctgtgcagatccgagaggcgtcgaatggagtcataacgctagctggatccactgaggtgcatgtcaccactcagaaggaaatggccgcatgcctcgaacaaggttccctcagtcgcgcaactggaagtaccaacatgaacaaccagtcaagatgcgcaaaatagaccccatcatgactgcagatggaatgcctattgaagagatgaatgaagactatctctgtgccaaactacacttagtagatcttgctggatcagaacgggctaagagaactggttcagatggcctgcgcttcaaggaaggtgttcacatcaaccgaggacttctcgctctcggcaatgtcataagtgctcttggagatgagaaaaaaagaaaagaaggtgctcacgttccttatcgggacagcaagctcacccgtcttttgcaggactccctaggtggaaatagtaagactgtcatgatagcttgcataagtccagcagatattaatgctgaagagacattaaacactttgaaatatgctaaccgggcacgtaatatccaaaacaagccgattgtcaatagaaatcctatcgctgatgagatgaaaagaatgcgccagcagattgaatacttgcaggcagagcttgtttcggctcgaggaggagccacatcagatgatgttcagggtctcagagagaggatttcatggcttgaacaaacgaatgaagacctctgcagggaactatatgatagtcgcaaccggtctcaaaatgatccatgtgaacctgaaatacaaaggactttaaacggctttaccaaaagcgaagggctcaaaagaagcttgcaaagtacagatccatttgatgttccaatggctgactcagtaagaggcaaccctaaggatattgaagatgaagtagctaaagaatgggaacacacaatgctgcaggatagcatgggcaaggagttgaatgaattaaatcgacaacttgagcgaaaagagtctgagatgaaaatgtatggatgtgatactgttgcacttaagcagcacttcggaaagaaacttatggagcttgaagaagagaaaaaagcagtacagcaagagagggatagattgttggctgaagttgaaagcctaagtgctgatggccaaacacataaactccgagatgcgcagctgcagaaactaaaatcccttgaagcccagattctagacctaaagaaaaagcacgagaaccaaattcagattttgaaggaaaagcagaagagtgatgaagctgctaagaaactgcaagaagaaattcattttataaaagcgcaaaaggttcaactacaacacaaaattaaacaggaagcagaacagttcaggcaatggaaagctacccgcgagaaggaacttcttcagttacgcaaggagggacggagaaatgagtatgaacgccacaagcttcaggcacttaatcagcggcagaaattggttttgcaaaggaagaccgaagaggctgctatggctacaaaaaggctgaaagagatattagaagctaggaaatcttccgcccgtgacagttccgctggcagcaatggtacatctcaaggctataatatgggtgagagatcgctgcaaaaatggtttgatcaagagcttgaagttatggtgcatgtgcatgaagtccgaaatgagtacgaaaaacaaagccaactgcgtgctgcgcttggtgaggagcttgccattttgaaacaagaagatatacgggctggtggatctagtccccaaagagggaagaatggaaactctaggacaaataccttgtcaccaaatgcaagacaagctaggatagcatcacttgagagcatggtgacaatctcttcaaacactcttgttgcaatggcttctcaactctcagaagctgaagaaagagagcgtgccttctctgggcgtagtcgttggaatcaattgcgatcaatgggggaggcaaagagcttactgcaatatgtctttaatgttgctgctgatgccagatgccaagtaaaggagaaggaagtggagatcaaggaaatgaaggaacaaatgacagagctggtgggcattcttcgacacagtgaatcacgcagaagagaaatggagaagcagctcaagcaaagagaacagacaactccaatggccactacacctccgaaaagtggaaatggcacgacgaagcactctgctgatgaccccaacacaccactgtcccctgtcgccgttcctgcacagaagcagctcaagtattctgctggaattgtaaatagccccagcaaaggagttgctgcgataaaaaaagagcaacttaagatggttccaattgcacagttgtctgcggggaagagagtttcaatagcagggcattcaggaaagctctggaggtggaaaagaagccatcaccagtggctgatgcagttcaagtggaagtggcagaagccgtggaagttgtctgaggtgatacgacacagtgatgaaacaatcacgaggattaggcccagacctccacttcttccacataaacctcataactgatgtgaaacggacttgtttttgtctcaacaagaactgacacggtttgcaaacctacacagctaactgcctgcacaaggtaacaatgcagttaatactccatgagatctccttcgtgcttgtttttacttggccacgggatcgacaagtatgtgttcatgggtgactcttgtctatggatagatgtaaattccctgtgggttggtataaagtgagatgtcaacgtagagaaagaaaatagttagtgggtgagtgagcagagtgaatgggcattctttcatgcaaatactgagcacaatgcttaatgtttcagccttcactgacggtgacatgtcaatagttggtgttcgtcttcacaaaggaatctgtcaaaggaaggcgccttgtaaagtctttcttgtgctgttgtgtgatagttttgtgtgaagggtaactgaaagttgaatgggttttgtgctcgagtgatagtctattttcccctcttcttttgtttgttgatactaaaatgagaaaagacaagtgatattggtttggtttgctaggagtattgtgatgtaatgcagaaacttgttcccctatatcagtacacccttttaatctatgtattgtggagtactgattgctgactactgttgatgtccgaagggatccgg

SEQ ID NO: 68499 - DNA, 4471 bp, Zea Mays
cactcactcaccttcgccgggaaaaaaaggaggaaaggaaataaaatactccaagccaagagagcggcaggccgcaggggcaccccccacacccacaggccatccttcaccagcacacactcatctcccacacctagcctagccttgctttgtcctcctccgtctcgctctcgctctccgtctccattcccacccaccaccaaacaccaggcccaaaggaccccccgccttcccaactaagagcaccagcgcagcggggagggggaatcagggcagcaagatccgagcagcaggagtggcaagcagcatttgtagccacagctcgctcactcaattgcagctagccgcggttgcggttggactggatcggcggcagggcagggcagggcagggcgcgcggcggtggtggtagttgcagaagtgacggtcaagttttcctcgctccttgcttcggccgagactccgcctgacgctactaccaacatctccacctgaatccatctctatctacctcgcacgaacgaacagagacaggggaggggagggggggaattgaagtgtaacccaaggaaaggaaccatgatggtgtggcaggcggaggaggaggattgatccatccgtcaacccatcagacccgtccatccatcggtggtggtggtggtggctgctgttactcgctatcaccatctgctgctgcctgctttagtcttttgcttcacttctcttctttctatccttcctccccctgtctgtttgtctgtcttattgccctccctgttcttgttgctgcttgcattgagaaaagagagagagagagacagagagagatagaaagtggttgctagttgtatggtcgtccggtgggcgcgatgaccatggagcacggcgaggattgctgcgtcaaggtggcggtccacgcgcgccccctcatcggcgacgagaagctgcagggctgtaaggactgcgtcgccgtcgtgccgggcaagccgcagaccggatcagggaagacgtacaccatgggcactgcctgcaaggaggggtcgcatatcgggatcatcccacgagccatggctgcgctgtttgacaaaattgagaacctgaaaacccaagtggagttccagttacgagtatcgttcatcgagattctgaaagaagaggtgagggatctacttgaccccactgctggtaccgtgggcaaagcagagaatggcaatggccacgcaaaactgtctgtgccagggaaaccccctgtgcagatccgagaggcgtcgaatggagtcataacgctagctggatccactgaggtgcatgtcaccactcagaaggaaatggccgcatgcctcgaacaaggttccctcagtcgcgcaactggaagtaccaacatgaacaaccagtcaagtcgttcccatgccatcttcacaatcacattggagcagatgcgcaaaatagaccccatcatgactgcagatggaatgcctattgaagagatgaatgaagactatctctgtgccaaactacacttagtagatcttgctggatcagaacgggctaagagaactggttcagatggcctgcgcttcaaggaaggtgttcacatcaaccgaggacttctcgctctcggcaatgtcataagtgctcttggagatgagaaaaaaagaaaagaaggtgctcacgttccttatcgggacagcaagctcacccgtcttttgcaggactccctaggtggaaatagtaagactgtcatgatagcttgcataagtccagcagatattaatgctgaagagacattaaacactttgaaatatgctaaccgggcacgtaatatccaaaacaagccgattgtcaatagaaatcctatcgctgatgagatgaaaagaatgcgccagcagattgaatacttgcaggcagagcttgtttcggctcgaggaggagccacatcagatgatgttcagggtctcagagagaggatttcatggcttgaacaaacgaatgaagacctctgcagggaactatatgatagtcgcaaccggtctcaaaatgatccatgtgaacctgaaatacaaaggactttaaacggctttaccaaaagcgaagggctcaaaagaagcttgcaaagtacagatccatttgatgttccaatggctgactcagtaagaggcaaccctaaggatattgaagatgaagtagctaaagaatgggaacacacaatgctgcaggatagcatgggcaaggagttgaatgaattaaatcgacaacttgagcgaaaagagtctgagatgaaaatgtatggatgtgatactgttgcacttaagcagcacttcggaaagaaacttatggagcttgaagaagagaaaaaagcagtacagcaagagagggatagattgttggctgaagttgaaagcctaagtgctgatggccaaacacataaactccgagatgcgcagctgcagaaactaaaatcccttgaagcccagattctagacctaaagaaaaagcacgagaaccaaattcagattttgaaggaaaagcagaagagtgatgaagctgctaagaaactgcaagaagaaattcattttataaaagcgcaaaaggttcaactacaacacaaaattaaacaggaagcagaacagttcaggcaatggaaagctacccgcgagaaggaacttcttcagttacgcaaggagggacggagaaatgagtatgaacgccacaagcttcaggcacttaatcagcggcagaaattggttttgcaaaggaagaccgaagaggctgctatggctacaaaaaggctgaaagagatattagaagctaggaaatcttccgcccgtgacagttccgtgatacctaaagccattcttgatataacacagatgggtgagagatcgctgcaaaaatggtttgatcaagagcttgaagttatggtgcatgtgcatgaagtccgaaatgagtacgaaaaacaaagccaactgcgtgctgcgcttggtgaggagcttgccattttgaaacaagaagatatacgggctggtggatctagtccccaaagagggaagaatggaaactctaggacaaataccttgtcaccaaatgcaagacaagctaggatagcatcacttgagagcatggtgacaatctcttcaaacactcttgttgcaatggcttctcaactctcagaagctgaagaaagagagcgtgccttctctgggcgtagtcgttggaatcaattgcgatcaatgggggaggcaaagagcttactgcaatatgtctttaatgttgctgctgatgccagatgccaagtaaaggagaaggaagtggagatcaaggaaatgaaggaacaaatgacagagctggtgggcattcttcgacacagtgaatcacgcagaagagaaatggagaagcagctcaagcaaagagaacagacaactccaatggccactacacctccgaaaagtggaaatggcacgacgaagcactctgctgatgaccccaacacaccactgtcccctgtcgccgttcctgcacagaagcagctcaagtattctgctggaattgtaaatagccccagcaaaggagttgctgcgataaaaaaagagcaacttaagatggttccaattgcacagttgtctgcggggaagagagtttcaatagcagggcattcaggaaagctctggaggtggaaaagaagccatcaccagtggctgatgcagttcaagtggaagtggcagaagccgtggaagttgtctgaggtgatacgacacagtgatgaaacaatcacgaggattaggcccagacctccacttcttccacataaacctcataactgatgtgaaacggacttgtttttgtctcaacaagaactgacacggtttgcaaacctacacagctaactgcctgcacaaggtaacaatgcagttaatactccatgagatctccttcgtgcttgtttttacttggccacgggatcgacaagtatgtgttcatgggtgactcttgtctatggatagatgtaaattccctgtgggttggtataaagtgagatgtcaacgtagagaaagaaaatagttagtgggtgagtgagcagagtgaatgggcattctttcatgcaaatactgagcacaatgcttaatgtttcagccttcactgacggtgacatgtcaatagttggtgttcgtcttcacaaaggaatctgtcaaaggaaggcgccttgtaaagtctttcttgtgctgttgtgtgatagttttgtgtgaagggtaactgaaagttgaatgggttttgtgctcgagtgatagtctattttcccctcttcttttgtttgttgatactaaaatgagaaaagacaagtgatattggtttggtttgctaggagtattgtgatgtaatgcagaaacttgttcccctatatcagtacacccttttaatctatgtattgtggagtactgattgctgactactgttgatgtccgaagggatccgg

SEQ ID NO: 68500 - DNA, 4624 bp, Zea Mays
cccactcactcactcaccttcgccgggaaaaaaaggaggaaaggaaataaaatactccaagccaagagagcggcaggccgcaggggcaccccccacacccacaggccatccttcaccagcacacactcatctcccacacctagcctagccttgctttgtcctcctccgtctcgctctcgctctccgtctccattcccacccaccaccaaacaccaggcccaaaggaccccccgccttcccaactaagagcaccagcgcagcggggagggggaatcagggcagcaagatccgagcagcaggagtggcaagcagcatttgtagccacagctcgctcactcaattgcagctagccgcggttgcggttggactggatcggcggcagggcagggcagggcagggcgcgcggcggtggtggtagttgcagaagtgacggtcaagttttcctcgctccttgcttcggccgagactccgcctgacgctactaccaacatctccacctgaatccatctctatctacctcgcacgaacgaacagagacaggggaggggagggggggaattgaagtgtaacccaaggaaaggaaccatgatggtgtggcaggcggaggaggaggattgatccatccgtcaacccatcagacccgtccatccatcggtggtggtggtggtggctgctgttactcgctatcaccatctgctgctgcctgctttagtcttttgcttcacttctcttctttctatccttcctccccctgtctgtttgtctgtcttattgccctccctgttcttgttgctgcttgcattgagaaaagagagagagagagacagagagagatagaaagtggttgctagttgtatggtcgtccggtgggcgcgatgaccatggagcacggcgaggattgctgcgtcaaggtggcggtccacgcgcgccccctcatcggcgacgagaagctgcagggctgtaaggactgcgtcgccgtcgtgccgggcaagccgcaggttcagatcggcagccactccttcaccttcgaccatgtctacggcagcacaggcacgccgtcggcggccatgttcgacgagtgcgtggcgccgctggtcgacggcctcttccagggctacaacgctacggtgctggcatacggccagaccggatcagggaagacgtacaccatgggcactgcctgcaaggaggggtcgcatatcgggatcatcccacgagccatggctgcgctgtttgacaaaattgagaacctgaaaacccaagtggagttccagttacgagtatcgttcatcgagattctgaaagaagaggtgagggatctacttgaccccactgctggtaccgtgggcaaagcagagaatggcaatggccacgcaaaactgtctgtgccagggaaaccccctgtgcagatccgagaggcgtcgaatggagtcataacgctagctggatccactgaggtgcatgtcaccactcagaaggaaatggccgcatgcctcgaacaaggttccctcagtcgcgcaactggaagtaccaacatgaacaaccagtcaagtcgttcccatgccatcttcacaatcacattggagcagatgcgcaaaatagaccccatcatgactgcagatggaatgcctattgaagagatgaatgaagactatctctgtgccaaactacacttagtagatcttgctggatcagaacgggctaagagaactggttcagatggcctgcgcttcaaggaaggtgttcacatcaaccgaggacttctcgctctcggcaatgtcataagtgctcttggagatgagaaaaaaagaaaagaaggtgctcacgttccttatcgggacagcaagctcacccgtcttttgcaggactccctaggtggaaatagtaagactgtcatgatagcttgcataagtccagcagatattaatgctgaagagacattaaacactttgaaatatgctaaccgggcacgtaatatccaaaacaagccgattgtcaatagaaatcctatcgctgatgagatgaaaagaatgcgccagcagattgaatacttgcaggcagagcttgtttcggctcgaggaggagccacatcagatgatgttcagggtctcagagagaggatttcatggcttgaacaaacgaatgaagacctctgcagggaactatatgatagtcgcaaccggtctcaaaatgatccatgtgaacctgaaatacaaaggactttaaacggctttaccaaaagcgaagggctcaaaagaagcttgcaaagtacagatccatttgatgttccaatggctgactcagtaagaggcaaccctaaggatattgaagatgaagtagctaaagaatgggaacacacaatgctgcaggatagcatgggcaaggagttgaatgaattaaatcgacaacttgagcgaaaagagtctgagatgaaaatgtatggatgtgatactgttgcacttaagcagcacttcggaaagaaacttatggagcttgaagaagagaaaaaagcagtacagcaagagagggatagattgttggctgaagttgaaagcctaagtgctgatggccaaacacataaactccgagatgcgcagctgcagaaactaaaatcccttgaagcccagattctagacctaaagaaaaagcacgagaaccaaattcagattttgaaggaaaagcagaagagtgatgaagctgctaagaaactgcaagaagaaattcattttataaaagcgcaaaaggttcaactacaacacaaaattaaacaggaagcagaacagttcaggcaatggaaagctacccgcgagaaggaacttcttcagttacgcaaggagggacggagaaatgagtatgaacgccacaagcttcaggcacttaatcagcggcagaaattggttttgcaaaggaagaccgaagaggctgctatggctacaaaaaggctgaaagagatattagaagctaggaaatcttccgcccgtgacagttccgctggcagcaatggtacatctcaaggctataatatgggtgagagatcgctgcaaaaatggtttgatcaagagcttgaagttatggtgcatgtgcatgaagtccgaaatgagtacgaaaaacaaagccaactgcgtgctgcgcttggtgaggagcttgccattttgaaacaagaagatatacgggctggtggatctagtccccaaagagggaagaatggaaactctaggacaaataccttgtcaccaaatgcaagacaagctaggatagcatcacttgagagcatggtgacaatctcttcaaacactcttgttgcaatggcttctcaactctcagaagctgaagaaagagagcgtgccttctctgggcgtagtcgttggaatcaattgcgatcaatgggggaggcaaagagcttactgcaatatgtctttaatgttgctgctgatgccagatgccaagtaaaggagaaggaagtggagatcaaggaaatgaaggaacaaatgacagagctggtgggcattcttcgacacagtgaatcacgcagaagagaaatggagaagcagctcaagcaaagagaacagacaactccaatggccactacacctccgaaaagtggaaatggcacgacgaagcactctgctgatgaccccaacacaccactgtcccctgtcgccgttcctgcacagaagcagctcaagtattctgctggaattgtaaatagccccagcaaaggagttgctgcgataaaaaaagagcaacttaagatggttccaattgcacagttgtctgcggggaagagagtttcaatagcagggcattcaggaaagctctggaggtggaaaagaagccatcaccagtggctgatgcagttcaagtggaagtggcagaagccgtggaagttgtctgaggtgatacgacacagtgatgaaacaatcacgaggattaggcccagacctccacttcttccacataaacctcataactgatgtgaaacggacttgtttttgtctcaacaagaactgacacggtttgcaaacctacacagctaactgcctgcacaaggtaacaatgcagttaatactccatgagatctccttcgtgcttgtttttacttggccacgggatcgacaagtatgtgttcatgggtgactcttgtctatggatagatgtaaattccctgtgggttggtataaagtgagatgtcaacgtagagaaagaaaatagttagtgggtgagtgagcagagtgaatgggcattctttcatgcaaatactgagcacaatgcttaatgtttcagccttcactgacggtgacatgtcaatagttggtgttcgtcttcacaaaggaatctgtcaaaggaaggcgccttgtaaagtctttcttgtgctgttgtgtgatagttttgtgtgaagggtaactgaaagttgaatgggttttgtgctcgagtgatagtctattttcccctcttcttttgtttgttgatactaaaatgagaaaagacaagtgatattggtttggtttgctaggagtattgtgatgtaatgcagaaacttgttcccctatatcagtacacccttttaatctatgtattgtggagtactgattgctgactactgttgatgtccgaagggatccgg

SEQ ID NO: 68501 - DNA, 4390 bp, Zea Mays
cccactcactcactcaccttcgccgggaaaaaaaggaggaaaggaaataaaatactccaagccaagagagcggcaggccgcaggggcaccccccacacccacaggccatccttcaccagcacacactcatctcccacacctagcctagccttgctttgtcctcctccgtctcgctctcgctctccgtctccattcccacccaccaccaaacaccaggcccaaaggaccccccgccttcccaactaagagcaccagcgcagcggggagggggaatcagggcagcaagatccgagcagcaggagtggcaagcagcatttgtagccacagctcgctcactcaattgcagctagccgcggttgcggttggactggatcggcggcagggcagggcagggcagggcgcgcggcggtggtggtagttgcagaagtgacggtcaagttttcctcgctccttgcttcggccgagactccgcctgacgctactaccaacatctccacctgaatccatctctatctacctcgcacgaacgaacagagacaggggaggggagggggggaattgaagtgtaacccaaggaaaggaaccatgatggtgtggcaggcggaggaggaggattgatccatccgtcaacccatcagacccgtccatccatcggtggtggtggtggtggctgctgttactcgctatcaccatctgctgctgcctgctttagtcttttgcttcacttctcttctttctatccttcctccccctgtctgtttgtctgtcttattgccctccctgttcttgttgctgcttgcattgagaaaagagagagagagagacagagagagatagaaagtggttgctagttgtatggtcgtccggtgggcgcgatgaccatggagcacggcgaggattgctgcgtcaaggtggcggtccacgcgcgccccctcatcggcgacgagaagctgcagggctgtaaggactgcgtcgccgtcgtgccgggcaagccgcaggttcagatcggcagccactccttcaccttcgaccatgtctacggcagcacaggcacgccgtcggcggccatgttcgacgagtgcgtggcgccgctggtcgacggcctcttccagggctacaacgctacggtgctggcatacggccagaccggatcagggaagacgtacaccatgggcactgcctgcaaggaggggtcgcatatcgggatcatcccacgagccatggctgcgctgtttgacaaaattgagaacctgaaaacccaagtggagttccagttacgagtatcgttcatcgagattctgaaagaagaggtgagggatctacttgaccccactgctggtaccgtgggcaaagcagagaatggcaatggccacgcaaaactgtctgtgccagggaaaccccctgtgcagatccgagaggcgtcgaatggagtcataacgctagctggatccactgaggtgcatgtcaccactcagaaggaaatggccgcatgcctcgaacaaggttccctcagtcgcgcaactggaagtaccaacatgaacaaccagtcaagtcgttcccatgccatcttcacaatcacattggagcagatgcgcaaaatagaccccatcatgactgcagatggaatgcctattgaagagatgaatgaagactatctctgtgccaaactacacttagtagatcttgctggatcagaacgggctaagagaactggttcagatggcctgcgcttcaaggaaggtgttcacatcaaccgaggacttctcgctctcggcaatgtcataagtgctcttggagatgagaaaaaaagaaaagaaggtgctcacgttccttatcgggacagcaagctcacccgtcttttgcaggactccctaggtggaaatagtaagactgtcatgatagcttgcataagtccagcagatattaatgctgaagagacattaaacactttgaaatatgctaaccgggcacgtaatatccaaaacaagccgattgtcaatagaaatcctatcgctgatgagatgaaaagaatgcgccagcagattgaatacttgcaggcagagcttgtttcggctcgaggaggagccacatcagatgatgttcagggtctcagagagaggatttcatggcttgaacaaacgaatgaagacctctgcagggaactatatgatagtcgcaaccggtctcaaaatgatccatgtgaacctgaaatacaaaggactttaaacggctttaccaaaagcgaagggctcaaaagaagcttgcaaagtacagatccatttgatgttccaatggctgactcagtaagaggcaaccctaaggatattgaagatgaagtagctaaagaatgggaacacacaatgctgcaggatagcatgggcaaggagttgaatgaattaaatcgacaacttgagcgaaaagagtctgagatgaaaatgtatggatgtgatactgttgcacttaagcagcacttcggaaagaaacttatggagcttgaagaagagaaaaaagcagtacagcaagagagggatagattgttggctgaagttgaaagcctaagtgctgatggccaaacacataaactccgagatgcgcagctgcagaaactaaaatcccttgaagcccagattctagacctaaagaaaaagcacgagaaccaaattcagattttgaaggaaaagcagaagagtgatgaagctgctaagaaactgcaagaagaaattcattttataaaagcgcaaaaggttcaactacaacacaaaattaaacaggaagcagaacagttcaggcaatggaaagctacccgcgagaaggaacttcttcagttacgcaaggagggacggagaaatgagtatgaacgccacaagcttcaggcacttaatcagcggcagaaattggttttgcaaaggaagaccgaagaggctgctatggctacaaaaaggctgaaagagatattagaagctaggaaatcttccgcccgtgacagttccgctggcagcaatggtacatctcaaggctataatatgggtgagagatcgctgcaaaaatggtttgatcaagagcttgaagttatggtgcatgtgcatgaagtccgaaatgagtacgaaaaacaaagccaactgcgtgctgcgcttggtgaggagcttgccattttgaaacaagaagatatacgggctggtggatctagtccccaaagagggaagaatggaaactctaggacaaataccttgtcaccaaatgcaagacaagctaggatagcatcacttgagagcatggtgacaatctcttcaaacactcttgttgcaatggcttctcaactctcagaagctgaagaaagagagcgtgccttctctgggcgtagtcgttggaatcaattgcgatcaatgggggaggcaaagagcttactgcaatatgtctttaatgttgctgctgatgccagatgccaagtaaaggagaaggaagtggagatcaaggaaatgaaggaacaaatgacagagctggtgggcattcttcgacacagtgaatcacgcagaagagaaatggagaagcagctcaagcaaagagaacagacaactccaatggccactacacctccgaaaagtggaaatggcacgacgaagcactctgctgatgaccccaacacaccactgtcccctgtcgccgttcctgcacagaagcagctcaagtattctgctggaattgtaaatagccccagcaaaggagttgctgcgataaaaaaagagcaacttaagatggttccaattgcacagttgtctgcggggaagagagtttcaatagcagggcattcaggaaagctctggaggtggaaaagaagccatcaccagtggctgatgcagttcaagtggaagtggcagaagccgtggaagttgtctgaggtgatacgacacagtgatgaaacaatcacgaggattaggcccagacctccacttcttccacataaacctcataactgatgtgaaacggacttgtttttgtctcaacaagaactgacacggtttgcaaacctacacagctaactgcctgcacaagccttcactgacggtgacatgtcaatagttggtgttcgtcttcacaaaggaatctgtcaaaggaaggcgccttgtaaagtctttcttgtgctgttgtgtgatagttttgtgtgaagggtaactgaaagttgaatgggttttgtgctcgagtgatagtctattttcccctcttcttttgtttgttgatactaaaatgagaaaagacaagtgatattggtttggtttgctaggagtattgtgatgtaatgcagaaacttgttcccctatatcagtacacccttttaatctatgtattgtggagtactgattgctgactactgttgatgtccgaagggatccgg

SEQ ID NO: 68502 - DNA, 3690 bp, Zea Mays
cccgcataaactacgggattattacgtcgctgttagaggggaggtggagcgttggcatcagcgacgtcccgcgcgcaaaccgaatgtggcctgttgagacgccattcacgcagagagagagagacagagagagatagaaagtggttgctagttgtatggtcgtccggtgggcgcgatgaccatggagcacggcgaggattgctgcgtcaaggtggcggtccacgcgcgccccctcatcggcgacgagaagctgcagggctgtaaggactgcgtcgccgtcgtgccgggcaagccgcaggttcagatcggcagccactccttcaccttcgaccatgtctacggcagcacaggcacgccgtcggcggccatgttcgacgagtgcgtggcgccgctggtcgacggcctcttccagggctacaacgctacggtgctggcatacggccagaccggatcagggaagacgtacaccatgggcactgcctgcaaggaggggtcgcatatcgggatcatcccacgagccatggctgcgctgtttgacaaaattgagaacctgaaaacccaagtggagttccagttacgagtatcgttcatcgagattctgaaagaagaggtgagggatctacttgaccccactgctggtaccgtgggcaaagcagagaatggcaatggccacgcaaaactgtctgtgccagggaaaccccctgtgcagatccgagaggcgtcgaatggagtcataacgctagctggatccactgaggtgcatgtcaccactcagaaggaaatggccgcatgcctcgaacaaggttccctcagtcgcgcaactggaagtaccaacatgaacaaccagtcaagtcgttcccatgccatcttcacaatcacattggagcagatgcgcaaaatagaccccatcatgactgcagatggaatgcctattgaagagatgaatgaagactatctctgtgccaaactacacttagtagatcttgctggatcagaacgggctaagagaactggttcagatggcctgcgcttcaaggaaggtgttcacatcaaccgaggacttctcgctctcggcaatgtcataagtgctcttggagatgagaaaaaaagaaaagaaggtgctcacgttccttatcgggacagcaagctcacccgtcttttgcaggactccctaggtggaaatagtaagactgtcatgatagcttgcataagtccagcagatattaatgctgaagagacattaaacactttgaaatatgctaaccgggcacgtaatatccaaaacaagccgattgtcaatagaaatcctatcgctgatgagatgaaaagaatgcgccagcagattgaatacttgcaggcagagcttgtttcggctcgaggaggagccacatcagatgatgttcagggtctcagagagaggatttcatggcttgaacaaacgaatgaagacctctgcagggaactatatgatagtcgcaaccggtctcaaaatgatccatgtgaacctgaaatacaaaggactttaaacggctttaccaaaagcgaagggctcaaaagaagcttgcaaagtacagatccatttgatgttccaatggctgactcagtaagaggcaaccctaaggatattgaagatgaagtagctaaagaatgggaacacacaatgctgcaggatagcatgggcaaggagttgaatgaattaaatcgacaacttgagcgaaaagagtctgagatgaaaatgtatggatgtgatactgttgcacttaagcagcacttcggaaagaaacttatggagcttgaagaagagaaaaaagcagtacagcaagagagggatagattgttggctgaagttgaaagcctaagtgctgatggccaaacacataaactccgagatgcgcagctgcagaaactaaaatcccttgaagcccagattctagacctaaagaaaaagcacgagaaccaaattcagattttgaaggaaaagcagaagagtgatgaagctgctaagaaactgcaagaagaaattcattttataaaagcgcaaaaggttcaactacaacacaaaattaaacaggaagcagaacagttcaggcaatggaaagctacccgcgagaaggaacttcttcagttacgcaaggagggacggagaaatgagtatgaacgccacaagcttcaggcacttaatcagcggcagaaattggttttgcaaaggaagaccgaagaggctgctatggctacaaaaaggctgaaagagatattagaagctaggaaatcttccgcccgtgacagttccgctggcagcaatggtacatctcaaggctataatatgggtgagagatcgctgcaaaaatggtttgatcaagagcttgaagttatggtgcatgtgcatgaagtccgaaatgagtacgaaaaacaaagccaactgcgtgctgcgcttggtgaggagcttgccattttgaaacaagaagatatacgggctggtggatctagtccccaaagagggaagaatggaaactctaggacaaataccttgtcaccaaatgcaagacaagctaggatagcatcacttgagagcatggtgacaatctcttcaaacactcttgttgcaatggcttctcaactctcagaagctgaagaaagagagcgtgccttctctgggcgtagtcgttggaatcaattgcgatcaatgggggaggcaaagagcttactgcaatatgtctttaatgttgctgctgatgccagatgccaagtaaaggagaaggaagtggagatcaaggaaatgaaggaacaaatgacagagctggtgggcattcttcgacacagtgaatcacgcagaagagaaatggagaagcagctcaagcaaagagaacagacaactccaatggccactacacctccgaaaagtggaaatggcacgacgaagcactctgctgatgaccccaacacaccactgtcccctgtcgccgttcctgcacagaagcagctcaagtattctgctggaattgtaaatagccccagcaaaggagttgctgcgataaaaaaagagcaacttaagatggttccaattgcacagttgtctgcggggaagagagtttcaatagcagggcattcaggaaagctctggaggtggaaaagaagccatcaccagtggctgatgcagttcaagtggaagtggcagaagccgtggaagttgtctgaggtgatacgacacagtgatgaaacaatcacgaggattaggcccagacctccacttcttccacataaacctcataactgatgtgaaacggacttgtttttgtctcaacaagaactgacacggtttgcaaacctacacagctaactgcctgcacaagccttcactgacggtgacatgtcaatagttggtgttcgtcttcacaaaggaatctgtcaaaggaaggcgccttgtaaagtctttcttgtgctgttgtgtgatagttttgtgtgaagggtaactgaaagttgaatgggttttgtgctcgagtgatagtctattttcccctcttcttttgtttgttgatactaaaatgagaaaagacaagtgatattggtttggtttgctaggagtattgtgatgtaatgcagaaacttgttcccctatatcagtacacccttttaatctatgtattgtggagtactgattgctgactactgttgatgtccgaagggatccgg

SEQ ID NO: 68503 - DNA, 2098 bp, Zea Mays
atggactccatggtgtttgaggttgctgaattggatggagcaacaatgatttgtcacactaacagtaaaatgaaagggaggttcgaagttttgttcctagccttccttgtagcgttgaagatgatgagagatcaaagaagaaaacagtcagagccattttggtcttcaatggtgatgaaaaaatggctaaacatcaggccgaaattaaatgatttcagcgaagacgagtttgatacaggcagtgaggatagtgacggtactaactctggagatgataataacttctttgagatacatggaaatctcaaatacatgattagcaaatcatcaggagagaaaacaattcctctgcgaagtcttcagagaaggaaatcagagagtttacgtgttaactacatcagtaacaaagatgtgagggtgatgataggtacatggaatgttgctggaagagtgcctagtgatgaccttcgtcttgatgagtggctttgtacacaagagccagcagacttgtatgttttaggtttccaggaagttgtcccactaagcgctggtaatgtgttgggagcagaggacagtagaccaatacggaaatgggaagctcttatccgccaaacacttaacagttctcagcaaaccaggacaatctgcaaaagctacagtgctccactctcgccattactaaggcctgttgcttcaggcgatgggaaatccaaacctgaagatagagtgacaggaagtttaactcagcttagagattggcaaactagtaagagtgagcttcattgcagctggttcgatgggaccagttcattggactggccagaatatccactcgacactccatcaaaggttttggtgtcaggtacaggcttgaggcgagtcatgagtttggggttatttagctccaactttgtgggaaaccctcgaggtcttgagctccaggatgtagatttgcatgctgggatgagaaggcagtatcatagctcgggaaatcttagcatgttatggtctgaacagcaggagaagcttgatgttttaaattcacttgatcgcttatctgatttggcgtcagaagaagactcaacttttgaagacaccgttgagggctgtgctactcttgggaaaagagaatcttccgtgcatcgtgcaaattatgtgcgaattgtcagtaaacaaatggttggtatacatgtttctgtatgggtttcccgaaaactgaggcgacatgttaacaatctggaggtatcaccggttggggttggactcttgggctacatgggcaacaagggatcgatttccatcagcatgtctcttttccaaactcgattgtgctttgtctgctctcatcttgcatctggtcataaatcaggagatcaacaaaaaaggaatgctgatgtttacgagattttacaaagaacaaggttttcttccttgtttgctgctggtcgtccacaaaagattccttctcatgatcggattttctggttcggggatcttaactaccgcattgacctgccggactctgaagtgcgatatctggtgggtatgaagaagtgggatgaccttttgaagtctgatcagctaacgaaggagctagtaagtgggaatacttttgttggttggaaggaaggcttgattaactttccaccaacttacaagtacgaaaggaatacaaccagatatgttggcgagcttcataatgaggaggagaaaaaaagatctccagcatggtgcgatcgtgtgctatggtttgggaagggtaccaaacaactatcatattggagctccggtctgaacctctcagatcaccggccagtcagcgccgtcttcttggttgaagttgaagtgttcaatcaacaaaaactcgagagggtcttgaacttcaatcctggatttgtttcaaatggggattattacatgatggcagatccttaaaacttttttttttgagccagtggcattgtgcggggtatataaattttgcagtgattcttctgtaggatttagtcctgccattgtgtgaattgccacagtttttttggggaatacaccgataattcgggtcagaaatttatttgaccttaaccttagaggggca

SEQ ID NO: 68504 - DNA, 1926 bp, Zea Mays
ggatttgccatcgtaattatggaattcgtaagagtagcggcgtcaatggctaatgtcattgttttgcccaagcccaaatcgcacgcgactagccaggcaaaccacagaaataaagtaattaatagtagtaataataatacaaagaaaaaaaagaaactggcgtggaattagcccacggacaggacagtagcatttaatcgggatgaatcccttggtggcgtccgcagcgtccagccgtccacccaaccactcctctcctccccggtcctcctccccttcctcggcagatccgccgccgcccgttcccatgggccagtgcctctccgccccgcgccaccgcaagcccccgcccctgcctctgtcgcccgcgctgtccgttccgccgcagatcctctcttccatcgccgacgccgtcggggaggatcacaccgccgacctccctgaggagctcctcgccctcgtcttcggtcttctcggctccggcgaccgcaagcgatgttccctcgtttgccgccgctggctggtcgtagaggccgcctcccgcttccgcctcgcgatcgacgccagggcatcgccgctcgccgaatccgccctcccccgcctcctcgcgcgcttccccgccgtctccaagctcgcgctcaagtgcgaccgccgcgccgagagcgtgggcgacccggccctcgcgcaagttgcggaccgcctcggcccgggccttcggcgcctcaagctccgctccctgcgtgcggtcaccgacgatggggtcgccgcgctcgccgccgcggccgccaacctccgcaagctctccgtcggatcctgcgacttcggggccaagggaatcgaggctgtcctccgctcgtgcctccacctcgaggagctctccgtcaagcgcctccgtggcctcgctgagtcagagcccatctccgtctccagcccacgccttcaatctctatcgcttaaggatctgtacaacggccagtgcttctcctgtttgatcactcagtcgccaaacctcaaaaccctcaagattatcagatgcgcgggtaactgggatatcgtgctccaggacgttccaagggattctctcctagccgagctccatctcgagaagctgcaggtcagtgactggggtgtagctgccttatatgggctcgaggtactctaccttgccaaggcacctgaggtcactgatatcggattagctgagcttgctgctaagtcgccacgcctccgcaagctgcatgttgatggttggaaagcaaacaggattggtgaccgggggcttgcggctgttgcacagaaatgttccagcttgcaggaactggtcctcattggtgtgaatttgacatcattaagtcttgagttgattgcaacgaactgccccaccttagagcggctcgcactgtgtgggtccgacacgtttggtgatgcagagatgtcatgtgtcgcctccaaatgttctgctttgcgtaagctgtgcatcaaggcatgtccagtgtctgatgcaggaatgaataagcttgctgaaggctgcccacgccttgtcaaggttaaggtgaagaagtgccgtcgggtgacctctgagtgtgctgagcacctccgggctagcaggaatggagctcttgctgtgaattttgacacacctggtggagctggtgagttgcaggatggtcggagtgtggatgacagtggtgcgctagacaatgccggcagtgatgttttgcccgaggatttggatgatcggataggaccagacctttcgagtggaagcagtggcaggccatcaagatggaaagcactgatgggtgctttgatgttgaggagcttttctgtttccatatttcaaagacaaccgcgtggagcctgctctacaagtcacgagtcatgaaaattggatgacatgggtcttgtcgatcttgcatgtagaat

SEQ ID NO: 68505 - DNA, 4011 bp, Zea Mays
ccccgccgtccccgtctccttcgtatccgatctcctccccatcttcttcaaatcgccgaacccttctctctgtcaattgcagcgctcaccagtcgctcctgagctccagtgcgctcatccctctgctcgggacgcgccctgtccagttccctgcccatggccaccgtcgcctgtctcaggtgctcgctcggccatcttcctcctcctgtgtcgcacccctgctcctccaggctggccgcacgctcatcttccttctctgcgcgacggctttccccaccggtgtccgtgcccagcgcccgctcggttctccctggtgcacgctcctctgctccgaccgcgcgttcctctagctcgcggggttcctcctctgccggctcggccaaatcgaatctccctggtacctcgctctctgttcggccatggagctcacccagctcagatcgcgaccctctctactcgtcctccacttcgcccatggcaccccggccaacctcgtcgaccttgcgtgtctccctacgcccagtacggatctcgcccaagttgctgccgtcactctgctcggtgcctacagctcgcccctgcgcgtcatccacctccagcactttccccctgcgtcgcgcggaccttcccagagctcgccctgcgctcggattccatctccctgcgcgcgctagcttcagctcagccgcgtgctcctctctgccggtgcccaagccctctgctcgctcttttgcgtcgtggcccctgctccgctatctccatggcccagctcgccatggccgtcgcagcctagctcggttgcccatctccctgaatctcctcagtgtttttcctgccccatttgtcgccgttcaagccttggagctccctcgcggcgacttcccctgtcggagcccagcccatctctctgtctttccatggccacgcgcccgactcctgggcgctgagattcctggtgagctcgccctgccctgtacggcgttcctccctggcagtcacgccatccgcgtgccctccctgctcttcctccccatttccttcgagctcgccgagctcttccctctttatggtgcccaacccgctgcgccgtgaccccccagtcctctctcatggcggcgcgcccatcctctgctccctcttcctggatctcgcgcgcccctggttcgcccctgctgagcgtgtcgagcccctctgttgtgtgcgcaaagttctctgcttgccacgacgcgtcgagctcccgtgccaaatccttttctagctcaccacgacgcccggcgtcctatctgctttgctcacccgcgtcggctactcgctggtgcttcaactcgtcagatgtcgttgtcctatccgtgtcagcacgcgaccgtggtcgtgttcgtcgagttcgccaacgctctattgctgattcgactgtcgtcgcagttgtgtgcttcgctgcgtgctcgccgagtgttgtcggttgtaccttagcactcgtgcttgccgctggctagcgttaacgctcgcgcgcctgctcgttgtcactgcgtcgcactcgctcttcgtccatcgggcttcgcgcgtgctcgcgtttgccgtcgagctattgaacccgtccttccttgctcgtgactttgtcgttgccagagccctcactagatttgtgtcctcgccagcttgctctagacacaatctcgtcgtcgttccgtgtgtcatcaagaaatcccaagaatcgggtgaagacaaagctagcagcgtgatattcaccaagtgctcgacaacagcttgaaaaagtcgtcaatcgtcatctttgtctatgccaagccccaagccgtgaagacactcttgtgctggccatgcgtcaccagctcgacaaaaaggaatcccacaggtatttggtcaagaatggaaactgtatgcctcgctcgctagacgtgtgtgatcaatgacgtcaaccggaaaccgtcgtcgtgcttgcgactatcgcgtcgaattagtcagggtaagtaaatttgttattagtgttagtggattggtggatggtttgactaggtataatatttattagattgcctgagtcgctttggtaaattggtcgatgtcgtaggataaaagaggtctcaataggtctcagtgttgcggggctgtaggtgttaaaaatgggaagttttatttatatatatgatacataggttaaccagtaaattagtttagaaagtttatgaaagttcttctatcaaattttataagtgttaggtgtccaagaattttgaagttaaagttataagtcgtttagtgtgctctctaaactaggtatgatattttatgtgttggtcgatttcatgatttgaatgaatgttgattgctacttcaaatatttaggatcaagtaacatcgatatatcttttagttctaaagttgtaattggtatattgtataaaatatgcttggttataggttataagtgtttcatcctttttagcgtaaattatctatcttgtactatttatactcgtactcatacatgtgcatcgtgtatctcatgaggtacgataaataatctcgtggtaaggaagacgaaccaagtcgaccccaagcacgggctaatccacacggtgatgttgaaggacgaacctgcctgatcaagtgctaggacaaggatgatcgtcaagtggacgtcgcctaacaaacactaacctagtgttattcaggcaagccccggtgcatttgccacctcctggctgttttaaaatcttttatcaccttgtttgatgcattaggtgataggagttgtgtgctaaaccgttgatgcatttccttccttgattaaacaaccctaatacccgttttatgaaaatttagtgatgcttaaccctgcttattaatttaggattgtttttttaaaagatgatgtgtaacacgggatatgggagtttgtgaaataaaatgacttgtgatgatgaagccattgtggccgcgatgatttcatcattcaagtagggtacctctctcaggtatcaagttttgggaaataatatgtaatggagaccagacgttgagcgggaaagttttcccgtctatgtcaattaaggaccatttgatgtaggcttgatgaggtgagactttgcaactaaccacatgctccggtaagcctggacctggctattccatacgtgaaaagacaaccgcgcactgggcttgggagatgctggaagtagggtgttccctcctggctagaggttggatggaggagtactgtgctcccaggtagcgcggaccggttcacgttgtggaggatctgtgggaacggttgacatatgcaagggttaagtgctacatatgtcatgtggttagggatccccacctgggtataatcggttcgaatcgtcgttgctcctcggtcatggagactcaactcactgaccactcatcgtagtctataagtaaaataagaatttgggtaaaagaaagctagaccaggacaagtgaatactctagattaggcaaatctagattcaggaaaagtacttaacttgtgaagtaaaatgttggcataaggactcactactagtaagctcttctgcaaaatgagtctttgaaattgataagccttaccttgattcccgacaagccagcatatccttgagagccttttctttagtcaggtaagtcttgctgagtacttgcgtacttagggttttacccattgttgctgcaggttatgagtcactttgattgtgattggtgttaagcgccggtgggcacggccttctataagtctatgtacttcttctatacttcttattgaggatgttcacttaagctagcatatatttcaaacttataaacaatttataacatttcaaagtttatttctttgaaccacttctgtaatcactctgataaacaatgtaaacttgatgtaacttgtaaaatttggtattaagatttccgctgcaaaatgttggtgtgtgatttgtgtttacttaatattttgatcctggctgtaagtggtttattcgaggtccttgg

SEQ ID NO: 68506 - DNA, 2209 bp, Zea Mays
atctccctcctccactcgggtcttcacgatgccgccgccgccacacgacatcgcacatccgctcttctccctcccctcgctctcggcggtcgacgtgcgctcccctggtgccatcgcttgtgcccggctcccgccatcgctggctccccgatggacctcgcggctagtgtggggccatggatccccgacggatcgagggtcgcgccgcctcatgagaaaaatcatctttttggctcgaacagaaaatacctgaagcttcaatttgacatcgtgtagcaatgaatgcgtgcaaggaatgctcttttacatgttgagaatgaagaaaaattagatgtcgtggaggcatcccaaaacatggtttcaaattaggacttagccatttttccatcagcctgaaacagcctaatagtcttactttgatcccttgggaaaaaatgttcttattattttgagtttttgacctatagtcaggtccagaacatacccctgacatcacactactaatctgggacaaaaatatgtagttctccaaaagaaaattgtttctaatcctgccctgaaaatgtttgctgaaatactatttggtaaggttgctgcatagctaaaaggttctccaaatgaaaattattcctaatcctgccctgaacaacaagaaggaattctatggtttccaaaaatgagaatatgttttttattcgtacatgaagcttcttatatgaccccttccctcgtatagggagtttttctttttgtattcatacgtgaactagtatttgtttttgtagcagcaccataaggaggatattatttactaatgtagaaatgtttatgttttagcagttgccttgtaatatttgtcttaaattttcgtactttccagctttagtggctcgccaactaaatctagcatggttccctgcttcatataactaaatctagcattattgtcttcttctatttgttgtacaagaaaagatagaatggaactcaaattttggtggcctaacaagtgtggagacttgaattcatatatatttagcacaaatagttctgaccaagttttttaattagtattagtttggatttagagtacacttatgtatgagttattcgacaatgcttatttattagatattgaatggtacttatctatactatattaattataatgttattaaatatatgtttatgtatatttctctttcaaattattataatatggtatctgattataaattaaagaatttactgccatgtaaatcatttcgtttaaaagtacacaaactcggtcctatagcttactgagaactttcatgacctttaattgttgatcagagagggtagcttgatagtaccatagtctttaaacctgtttttagtgtttatatatatatatatatatatatatatatgtgtgtgtgtgtgtgtgtgtgtatctacataacatgaataggacataataaatagctatatttagcgtgaagtatatatgagaatacagacttgggccggcgacatggttgaagctcgtagttttgaattgttggcataatgatttgccaatggattcattgagcgagatggcacagcaaggtgagtttctgattggactcctcaatgaactagcatgttgggctttggcacctggagcagagtcattcttcaggtcccttctgttaggaaggatttggatgcgctccttgtttgagtgctccaaatctgaaaaccaagcaggaatgtcctcaggaggcttggagccttcatgctggtcaatcttcccaagaagaaaggtgtattgagacttcaaatgcttctagtttgtcttcactgcaaccgaaacagtagccagctgaacatgctgacatgttaatgcgggtggtcaaggctcaggattcagagcagaagatacacataaatactggtgaatgatgccatcgacgatgatgaaatgatcaaacgatggatgatgccatcgatgaaagatggaatggaactcaaatttgggtggtcgcacaagtgtggagacttgaatttatatatacttagttagtctcaatgttagcacaaacagttgatgagcaagttttcccattgtattttagtttgaatttagagtacatttatgtaagagttatttgacaatgcttatttatgagatattgaatgatatttatctatattatattaattataatgttattaaatatat

SEQ ID NO: 68507 - DNA, 849 bp, Zea Mays
atctccctcctccactcgggtcttcacgatgccgccgccgccacacgacatcgcacatccgctcttctccctcccctcgctctcggcggtcgacgtgcgctcccctggtgccatcgcttgtgcccggctcccgccatcgctggctccccgatggacctcgcggctagtgtggggccatggatccccgacggatcgagggtcgcgccgcctcatgagaaaaatcatctttttggctcgaacagaaaatacctgaagcttcaatttgacatcgtgtagcaatgaatgcgtgcaaggaatgctcttttacatgttgagaatgaagaaaaattagatgtcgtggaggcatcccaaaacattgtttcttctatctacaggaatgtcctcaggaggcttggagccttcatgctggtcaatcttcccaagaagaaaggtgtattgagacttcaaatgcttctagtttgtcttcactgcaaccgaaacagtagccagctgaacatgctgacatgttaatgcgggtggtcaaggctcaggattcagagcagaagatacacataaatactggtgaatgatgccatcgacgatgatgaaatgatcaaacgatggatgatgccatcgatgaaagatggaatggaactcaaatttgggtggtcgcacaagtgtggagacttgaatttatatatacttagttagtctcaatgttagcacaaacagttgatgagcaagttttcccattgtattttagtttgaatttagagtacatttatgtaagagttatttgacaatgcttatttatgagatattgaatgatatttatctatattatattaattataatgttattaaatatat

SEQ ID NO: 68508 - DNA, 838 bp, Zea Mays
atctccctcctccactcgggtcttcacgatgccgccgccgccacacgacatcgcacatccgctcttctccctcccctcgctctcggcggtcgacgtgcgctcccctggtgccatcgcttgtgcccggctcccgccatcgctggctccccgatggacctcgcggctagtgtggggccatggatccccgacggatcgagggtcgcgccgcctcatgagaaaaatcatctttttggctcgaacagaaaatacctgaagcttcaatttgacatcgtgtagcaatgaatgcgtgcaaggaatgctcttttacatgttgagaatgaagaaaaattagatgtcgtggaggcatcccaaaacatgaatgtcctcaggaggcttggagccttcatgctggtcaatcttcccaagaagaaaggtgtattgagacttcaaatgcttctagtttgtcttcagctgagtctgcaaccgaaacagtagccagctgaacatgctgacatgttaatgcgggtggtcaaggctcaggattcagagcagaagatacacataaatactggtgaatgatgccatcgacgatgatgaaatgatcaaacgatggatgatgccatcgatgaaagatggaatggaactcaaatttgggtggtcgcacaagtgtggagacttgaatttatatatacttagttagtctcaatgttagcacaaacagttgatgagcaagttttcccattgtattttagtttgaatttagagtacatttatgtaagagttatttgacaatgcttatttatgagatattgaatgatatttatctatattatattaattataatgttattaaatatat

SEQ ID NO: 68509 - DNA, 2234 bp, Zea Mays
atctccctcctccactcgggtcttcacgatgccgccgccgccacacgacatcgcacatccgctcttctccctcccctcgctctcggcggtcgacgtgcgctcccctggtgccatcgcttgtgcccggctcccgccatcgctggctccccgatggacctcgcggctagtgtggggccatggatccccgacggatcgagggtcgcgccgcctcatgagaaaaatcatctttttggctcgaacagaaaatacctgaagcttcaatttgacatcgtgtagcaatgaatgcgtgcaaggaatgctcttttacatgttgagaatgaagaaaaattagatgtcgtggaggcatcccaaaacatggtttcaaattaggacttagccatttttccatcagcctgaaacagcctaatagtcttactttgatcccttgggaaaaaatgttcttattattttgagtttttgacctatagtcaggtccagaacatacccctgacatcacactactaatctgggacaaaaatatgtagttctccaaaagaaaattgtttctaatcctgccctgaaaatgtttgctgaaatactatttggtaaggttgctgcatagctaaaaggttctccaaatgaaaattattcctaatcctgccctgaacaacaagaaggaattctatggtttccaaaaatgagaatatgttttttattcgtacatgaagcttcttatatgaccccttccctcgtatagggagtttttctttttgtattcatacgtgaactagtatttgtttttgtagcagcaccataaggaggatattatttactaatgtagaaatgtttatgttttagcagttgccttgtaatatttgtcttaaattttcgtactttccagctttagtggctcgccaactaaatctagcatggttccctgcttcatataactaaatctagcattattgtcttcttctatttgttgtacaagaaaagatagaatggaactcaaattttggtggcctaacaagtgtggagacttgaattcatatatatttagcacaaatagttctgaccaagttttttaattagtattagtttggatttagagtacacttatgtatgagttattcgacaatgcttatttattagatattgaatggtacttatctatactatattaattataatgttattaaatatatgtttatgtatatttctctttcaaattattataatatggtatctgattataaattaaagaatttactgccatgtaaatcatttcgtttaaaagtacacaaactcggtcctatagcttactgagaactttcatgacctttaattgttgatcagagagggtagcttgatagtaccatagtctttaaacctgtttttagtgtttatatatatatatatatatatatatatatgtgtgtgtgtgtgtgtgtgtgtatctacataacatgaataggacataataaatagctatatttagcgtgaagtatatatgagaatacagacttgggccggcgacatggttgaagctcgtagttttgaattgttggcataatgatttgccaatggattcattgagcgagatggcacagcaaggtgagtttctgattggactcctcaatgaactagcatgttgggctttggcacctggagcagagtcattcttcaggtcccttctgttaggaaggatttggatgcgctccttgtttgagtgctccaaatctgaaaaccaagcagtgtttcttctatctacaggaatgtcctcaggaggcttggagccttcatgctggtcaatcttcccaagaagaaaggtgtattgagacttcaaatgcttctagtttgtcttcagctgagtctgcaaccgaaacagtagccagctgaacatgctgacatgttaatgcgggtggtcaaggctcaggattcagagcagaagatacacataaatactggtgaatgatgccatcgacgatgatgaaatgatcaaacgatggatgatgccatcgatgaaagatggaatggaactcaaatttgggtggtcgcacaagtgtggagacttgaatttatatatacttagttagtctcaatgttagcacaaacagttgatgagcaagttttcccattgtattttagtttgaatttagagtacatttatgtaagagttatttgacaatgcttatttatgagatattgaatgatatttatctatattatattaattataatgttattaaatatat

SEQ ID NO: 68510 - DNA, 2216 bp, Zea Mays
atctccctcctccactcgggtcttcacgatgccgccgccgccacacgacatcgcacatccgctcttctccctcccctcgctctcggcggtcgacgtgcgctcccctggtgccatcgcttgtgcccggctcccgccatcgctggctccccgatggacctcgcggctagtgtggggccatggatccccgacggatcgagggtcgcgccgcctcatgagaaaaatcatctttttggctcgaacagaaaatacctgaagcttcaatttgacatcgtgtagcaatgaatgcgtgcaaggaatgctcttttacatgttgagaatgaagaaaaattagatgtcgtggaggcatcccaaaacatggtttcaaattaggacttagccatttttccatcagcctgaaacagcctaatagtcttactttgatcccttgggaaaaaatgttcttattattttgagtttttgacctatagtcaggtccagaacatacccctgacatcacactactaatctgggacaaaaatatgtagttctccaaaagaaaattgtttctaatcctgccctgaaaatgtttgctgaaatactatttggtaaggttgctgcatagctaaaaggttctccaaatgaaaattattcctaatcctgccctgaacaacaagaaggaattctatggtttccaaaaatgagaatatgttttttattcgtacatgaagcttcttatatgaccccttccctcgtatagggagtttttctttttgtattcatacgtgaactagtatttgtttttgtagcagcaccataaggaggatattatttactaatgtagaaatgtttatgttttagcagttgccttgtaatatttgtcttaaattttcgtactttccagctttagtggctcgccaactaaatctagcatggttccctgcttcatataactaaatctagcattattgtcttcttctatttgttgtacaagaaaagatagaatggaactcaaattttggtggcctaacaagtgtggagacttgaattcatatatatttagcacaaatagttctgaccaagttttttaattagtattagtttggatttagagtacacttatgtatgagttattcgacaatgcttatttattagatattgaatggtacttatctatactatattaattataatgttattaaatatatgtttatgtatatttctctttcaaattattataatatggtatctgattataaattaaagaatttactgccatgtaaatcatttcgtttaaaagtacacaaactcggtcctatagcttactgagaactttcatgacctttaattgttgatcagagagggtagcttgatagtaccatagtctttaaacctgtttttagtgtttatatatatatatatatatatatatatatgtgtgtgtgtgtgtgtgtgtgtatctacataacatgaataggacataataaatagctatatttagcgtgaagtatatatgagaatacagacttgggccggcgacatggttgaagctcgtagttttgaattgttggcataatgatttgccaatggattcattgagcgagatggcacagcaaggtgagtttctgattggactcctcaatgaactagcatgttgggctttggcacctggagcagagtcattcttcaggtcccttctgttaggaaggatttggatgcgctccttgtttgagtgctccaaatctgaaaaccaagcaggaatgtcctcaggaggcttggagccttcatgctggtcaatcttcccaagaagaaaggtgtattgagacttcaaatgcttctagtttgtcttcagctgagtctgcaaccgaaacagtagccagctgaacatgctgacatgttaatgcgggtggtcaaggctcaggattcagagcagaagatacacataaatactggtgaatgatgccatcgacgatgatgaaatgatcaaacgatggatgatgccatcgatgaaagatggaatggaactcaaatttgggtggtcgcacaagtgtggagacttgaatttatatatacttagttagtctcaatgttagcacaaacagttgatgagcaagttttcccattgtattttagtttgaatttagagtacatttatgtaagagttatttgacaatgcttatttatgagatattgaatgatatttatctatattatattaattataatgttattaaatatat

SEQ ID NO: 68511 - DNA, 1238 bp, Zea Mays
ccgacctcttgctagggtttcattccccctctccctctcggccagcaccacctcacatcaccgtgatcctatgacagccatggcggccgaagcaccaccgtcggcttcaacgtcctcctcctcgacctcgcggctacctctgcctccagcggtggggtggtcagatccgcatagttgtacatcgggagctgcattagcttgactttgaagagcgagatcgggtatgagggcgtcctttacaccatcaacaccgaggagtccagcatcgggctttgcaataatcttggaaatgaacactgaggattaagctgaggaggatggtgctaacattgatttaaactcacaaggaaaggaaaatgtgttgttctaaaaacctccacaagacaagtgagcaatcaattctctgctcatcaggctatcagctaggaacttgtgagatgatattattgataaggattacaacacacatggatatgtgaacttaaggtgcgaaggccatattagttgtttgaagaacaaatttaatcgtgaaaaagtacagtatccacaatgcacaggctcacagtcctacattgcaaaggcttatatattggttgacttggaagaaattgtggcagcaccagttcaggatggacaacaaccaaaatctcctacaaaagttgtttctaatgtgctatcgagctccagtgtgttcctatgcaatctggtcttcataccgcctccaagaaaagctccgcaatgacagtttctgcaaaggttcaacaactttaggatcaactagaggtcgagcaacaagaaaaagatggacttcatgaagaagtggaaaccttagagactggagcatctcaggacaccattgatagtatgaagaggtcaatgaaaggaaataacaatattcttcatcaactattaagcttcaatcgaggccaagtttttccatcttaactccgcttgaccccaataggacctgcaaccttatgactactttagtagctagttacaatagctctggatttgtagttataggattattttcaattatgcttactgtttaatactttgagttgaagttattggattatatttggattttaagttaaaggatttgcatctatatgttttgaagttatattattatctgttggatgaaatatttgtgttgaacaaattcatatgatattttggttgtgatgtgtaatattccatgacaatatgaatgcttatgaggtgttccttct

SEQ ID NO: 68512 - DNA, 1104 bp, Zea Mays
ccgacctcttgctagggtttcattccccctctccctctcggccagcaccacctcacatcaccgtgatcctatgacagccatggcggccgaagcaccaccgtcggcttcaacgtcctcctcctcgacctcgcggctacctctgcctccagcggtggggtggtcagatccgcatagttgtacatcgggagctgcattagcttgactttgaagagcgagatcgggtatgagggcgtcctttacaccatcaacaccgaggagtccagcatcgggctttgcaataatcttggaaatgaacactgaggattaagctgaggaggatggtgctaacattgatttaaactcacaaggaaaggaaaatgtgttgttctaaaaacctccacaagacaactatcagctaggaacttgtgagatgatattattgataaggattacaacacacatggatatgtgaacttaaggttgacttggaagaaattgtggcagcaccagttcaggatggacaacaaccaaaatctcctacaaaagttgtttctaatgtgctatcgagctccagtgtgttcctatgcaatctggtcttcataccgcctccaagaaaagctccgcaatgacagtttctgcaaaggttcaacaactttaggatcaactagaggtcgagcaacaagaaaaagatggacttcatgaagaagtggaaaccttagagactggagcatctcaggacaccattgatagtatgaagaggtcaatgaaaggaaataacaatattcttcatcaactattaagcttcaatcgaggccaagtttttccatcttaactccgcttgaccccaataggacctgcaaccttatgactactttagtagctagttacaatagctctggatttgtagttataggattattttcaattatgcttactgtttaatactttgagttgaagttattggattatatttggattttaagttaaaggatttgcatctatatgttttgaagttatattattatctgttggatgaaatatttgtgttgaacaaattcatatgatattttggttgtgatgtgtaatattccatgacaatatgaatgcttatgaggtgttccttct

SEQ ID NO: 68513 - DNA, 1289 bp, Zea Mays
ctcgagctcgttcgagccgagccgagctggctcgatatccacccctaagagcaagcgcaccaacggactaagcatctgaccgacctcttgctagggtttcattccccctctccctctcggccagcaccacctcacatcaccgtgatcctatgacagccatggcggccgaagcaccaccgtcggcttcaacgtcctcctcctcgacctcgcggctacctctgcctccagcggtggggtggtcagatccgcatagttgtacatcgggagctgcattagcttgactttgaagagcgagatcgggtatgagggcgtcctttacaccatcaacaccgaggagtccagcatcgggctttgcaataatcttggaaatgaacactgaggattaagctgaggaggatggtgctaacattgatttaaactcacaaggaaaggaaaatgtgttgttctaaaaacctccacaagacaactatcagctaggaacttgtgagatgatattattgataaggattacaacacacatggatatgtgaacttaaggtgcgaaggccatattagttgtttgaagaacaaatttaatcgtgaaaaagtacagtatccacaatgcacaggctcacagtcctacattgcaaaggcttatatattggttgacttggaagaaattgtggcagcaccagttcaggatggacaacaaccaaaatctcctacaaaagttgtttctaatgtgctatcgagctccagtgtgttcctatgcaatctggtcttcataccgcctccaagaaaagctccgcaatgacagtttctgcaaaggttcaacaactttaggatcaactagaggtcgagcaacaagaaaaagatggacttcatgaagaagtggaaaccttagagactggagcatctcaggacaccattgatagtatgaagaggtcaatgaaaggaaataacaatattcttcatcaactattaagcttcaatcgaggccaagtttttccatcttaactccgcttgaccccaataggacctgcaaccttatgactactttagtagctagttacaatagctctggatttgtagttataggattattttcaattatgcttactgtttaatactttgagttgaagttattggattatatttggattttaagttaaaggatttgcatctatatgttttgaagttatattattatctgttggatgaaatatttgtgttgaacaaattcatatgatattttggttgtgatgtgtaatattccatgacaatatgaatgcttatgaggtgttccttct

SEQ ID NO: 68514 - DNA, 1191 bp, Zea Mays
ctcgagctcgttcgagccgagccgagctggctcgatatccacccctaagagcaagcgcaccaacggactaagcatctgaccgacctcttgctagggtttcattccccctctccctctcggccagcaccacctcacatcaccgtgatcctatgacagccatggcggccgaagcaccaccgtcggcttcaacgtcctcctcctcgacctcgcggctacctctgcctccagcggtggggtggtcagatccgcatagttgtacatcgggagctgcattagcttgactttgaagagcgagatcgggtatgagggcgtcctttacaccatcaacaccgaggagtccagcatcgggctttgcaataatcttggaaatgaacactgaggattaagctgaggaggatggtgctaacattgatttaaactcacaaggaaaggaaaatgtgttgttctaaaaacctccacaagacaactatcagctaggaacttgtgagatgatattattgataaggattacaacacacatggatatgtgaacttaaggtgcgaaggttgacttggaagaaattgtggcagcaccagttcaggatggacaacaaccaaaatctcctacaaaagttgtttctaatgtgctatcgagctccagtgtgttcctatgcaatctggtcttcataccgcctccaagaaaagctccgcaatgacagtttctgcaaaggttcaacaactttaggatcaactagaggtcgagcaacaagaaaaagatggacttcatgaagaagtggaaaccttagagactggagcatctcaggacaccattgatagtatgaagaggtcaatgaaaggaaataacaatattcttcatcaactattaagcttcaatcgaggccaagtttttccatcttaactccgcttgaccccaataggacctgcaaccttatgactactttagtagctagttacaatagctctggatttgtagttataggattattttcaattatgcttactgtttaatactttgagttgaagttattggattatatttggattttaagttaaaggatttgcatctatatgttttgaagttatattattatctgttggatgaaatatttgtgttgaacaaattcatatgatattttggttgtgatgtgtaatattccatgacaatatgaatgcttatgaggtgttccttct

SEQ ID NO: 68515 - DNA, 3121 bp, Zea Mays
tcaaaacagtgtttggaaaaaaattagcagttcagttggaagagcacagaggagaacatgccgttaccatggatgcagtatgtaacagaagcaccacatcctacacagaaaatcaacagctgctgcaccacagttttcatcctaacttattggtatccttgttataaaaaatatttgtaattttttatacaagaatgatctgtttcacttatcctaagtcatctggacggagtgatcaattgtaacagatacttcaccacatactacttttcactcctattttacataaagcccttaacactggaatttctcaacattggattcacctgcgagaccattagggcaaaacagaagtgtaacaccttgcccaaacccaattctgtggaggactgacaacacattatatgccttttggatgtctacaaggaatcagcaatacaaagacaatgctgctagtgggtcagcaatgacttctgactattagagtggacacactaacttaagcttttgggtttaaccaattggtgcatgcaacttaatatagtatcaaagtcaaagagttcgaatcctagcagagcccctttacttccacgtttgcgccttcctttctagctgcacgtgagtgggagtgttgaaatatataagtggattgcctatcttctcctaacagcttaaacttttgggttgaactggttagtgcgtctactcttaacactgaccaatcctaatgtccatacactgtggtagcagataaacaagagcaggagattgaagatagatgaccaacactccaacataaatctgagatctgttacactacacaggtctccaaattctcactaacatcatccaagtgtctttgctttttaatcgattataaatgacttagagaatgcaatgggattgagtggatgagaatgttttgttaaagctaggagatggtatgacggaaggacaaaatgcgaaaactagagtacactgtgtggccggtcaatgaacttgtctgttgtaagtccctaaattccaaaatgcagaattgactcactgaccttgatatggatctcactcatggtccaatagggtatagaccaacatggtgcgctgttgtggttcgctatgagatccgtcatgcagctccatgtccacacctgtgcatcacattcacatgggtggtggtgccaaaacgccaccatggtcgtcatctccctccttgagacactggcctcaactcctcaaaccctcctgtgtagccacacctgctcccaatgtcccactcctaccccactgcagcctccaactccttaggtccccatgcctcccctctctccgcacccaccaccttcccaccatcatctcccctctcggacacgaaggaggccctaaacactcatcatcctcaacaccctcacaaggtccatcctcaactcacttgtgctcctgctcagcgctgacaaccgccggcaaaacccacagtgtgcacctgctcccagacggtatggtgatgtccttctacttgtttgtcgcactagatagcgtttgccgaggccacagaccccctcgacttattcatcaggtgcaagtcctgtttggtcaccctgtctgctgccaatgtccttcagggagaacaggtgaacgagtgtggagagatgatgcagggccaggaaggctagaaggtgaaagcaagcagcagttgctgggatgtctaatgcaactgcatcaaagcaagggagcttctcgggtgcagaagcacagtggtatatgtcaagggcgtcgagcccccgactagctggaccgcggctacacagctcgtagcagccggtcgtcctctccggtgaggttatccccctcaaccgcaggcttatcagagagagagattaaggatataattcttgcttaattgattgtcaagtgattacaagcatatatagccaatggtccaactgacatgaagaaggctctccatgattctagggatttccaaaacaacttcctaatctaatccctgcggcgcctgcccagcgcgctcagccgcgcggcgcacgtcgcaggcgcgtccgcgcctggcatatgtgcgtccccacatgacatctctccccgcttcgaagtccagctcgtcctggagctgaaaggaagggaactgagcccggaggtcatccagatcctcccatgtagccgaaacaagtggttcgccctgccattcaacgagcacatggcgcactcctcgggccagccgagcttgagtcacccagacagttgcaggcaccacagcaccgtgcaggagcagaggcagcagcgatggaacgaccggcggggtaccaacaaacttcttgaggactgtaagtatagggactctaactctcatcaagaggatgacactatgagttggggcaattttctgtttatttcctcaaacactacacaatgtcatacccttagaagggttggagacacatatttatagccctaggggctgcactacactgcactacatactacactacacaccgcagcacacaggtgctgtcctctagatactaaagtgctaaagtgcagtcaaaactgcaactactgtcttgctgctgtgcctaactgctactgtcctgctggctgcagcagtcaaaagactgctactgcagtgcagtcaaaagactgcaactgctgctgtctccaactgcactgctgctattctgcagcagtcaaaagatgttgtctccaactgcactgctgctgttctgcagcagtcaaaaggtgttgtctgctgtcctgttcaccacacaagaccacatgacttattctatcattctccccctaagtcttgtgcgtcgtcctgtgggaaagtggagccatcccagacctggaacaaagctcaaggagcttaatcctcccaaggggcttggtgagcaaatctgcaagctgatccttggtgttgatgtagcgtgcatggatgctcccttctgccaaacagtcacggataaagtggtatctcacccggatgtgcttgctccgttcatggaacacggggttcttggccaatgccaaggcggacaggctgtccacccgaagttccactgctccaacgtctctcccgaggagatcactgagtaggcgagcaagccagagc

SEQ ID NO: 68516 - DNA, 1261 bp, Zea Mays
acaattttgcacttccacccctagccgccacaacctttctccctctcctctcctttcagccaacgtgcggctccagcagggagcctttctccccaagcgcatagaagcatctcctggcgtcttccccttcccagcgtaggagcaagggcttcccatggcggcctcccttgtgacatctccccctacaggttccaggtcggcgcccttctctagcctggacttgtagcgcctgatgcccatcttcgccctctgctgtcgaaggcacgggcaccattttcccccatggccgagctcaacacctgccaggacaagctgcgggcccctctgctccagccatggcgtgggaccttctctggttggagctcgagcaggtgagctcgccccatggccttggctccttgtttgcttgctgcacgtacgctccctctcccatctggctttctgcccttctcaagtccggccatccccgccttgccgtggatttcctcgagcagccccacctggccgccatcctcctcagatcgacctcccctttttgtgtagctcaccatctccccatacgcgcgctagctggacgccatccgagctccgccagccggtctgcaactccctctcgctgcttcccttggacgccggagctccaaggtcgtacctccgtctccatggccgaccagcaaacctcgatggacgagctctctagcactttcctctcctatggcgcgcctgcccccatggatgaagccccagtttgccggtctcctctctgctccatggccgagggcccattccctagcaccctcctcgcatgggcaggctgcgggtgctcggcacccccctaccaaccttcgccgagttcggccacccctcctcgtccttgtgatagtagcaggtgctcgacaaaatgcctgtgagaggcttggtgttgtggacaaccccgtccgcgacgtcgtcgacccccggtgaggcaccccgctatccttgctgtttttgcgtccgtagtgttcgacgatatgccaaattcatgaactcttgtgttatcgcagcagccatcgatgtcgcgcttcgagctggtccgttcagcgaaatgtcgagccacgtggacagcccctgtgactagtcccatttcgcttaggaccgagagatgatgaccgtgcaagtgatgtggtgccaacaaccagatgcagttggtggacaacctaaggaaggatggacatgtaatacccaacttgtaatttgtggaggataaccaaaaaggagaaat

SEQ ID NO: 68517 - DNA, 1331 bp, Zea Mays
acaattttgcacttccacccctagccgccacaacctttctccctctcctctcctttcagccaacgtgcggctccagcagggagcctttctccccaagcgcatagaagcatctcctggcgtcttccccttcccagcgtaggagcaagggcttcccatggcggcctcccttgtgacatctccccctacaggttccaggtcggcgcccttctctagcctggacttgtagcgcctgatgcccatcttcgccctctgctgtcgaaggcacgggcaccattttcccccatggccgagctcaacacctgccaggacaagctgcgggcccctctgctccagccatggcgtgggaccttctctggttggagctcgagcaggtgagctcgccccatggccttggctccttgtttgcttgctgcacctcaccatctccccatacgcgcgctagctggacgccatccgagctccgccagccggtctgcaactccctctcgctgcttcccttggacgccggagctccaaggtcgtacctccgtctccatggccgaccagcaaacctcgatggacgagctctctagcactttcctctcctatggcgcgcctgcccccatggatgaagccccagtttgccggtctcctctctgctccatggccgagggcccattccctagcaccctcctcgcatgggcaggctgcgggtgctcggcacccccctaccaaccttcgccgagttcggccacccctcctcgtccttgtgatagtagcaggtgctcgacaaaatgcctgtgagaggcttggtgttgtggacaaccccgtccgcgacgtcgtcgacccccgccatcgatgtcgcgcttcgagctggtccgttcagcgaaatgtcgagccacgtggacagcccctgtgactagtcccatttcgcttaggttattttccttgtggtttgttctacttataaaattggtcgatatcgtgtatgtacatgtgtgtaaataaaaaaaattaagcgaattatgcttgtttgatgtggtgagaagaattaaaaatatttgtctaatttatacgaaggacgcatcgacatatgattgtgtgtgccgaaatgcgttgtagtagtgattgcgtcaagttaaacggtaatgtctcgagtgcacgcaacaacatggttgtatgcgagacagggtaaaataaggtgtgctcggcatgaatgttcggtcattgtaggtagaaattttcttgcttaaatagagaggtggtgacatgccaaagtagtcatcgcttctctatatttataagtcgagtcgtgacgatgcgcattatgtgttcgttaaattatgttttgc

SEQ ID NO: 68518 - DNA, 2128 bp, Zea Mays
taatgctaatgctacattaggtctcttttcagcattgtagaagactgcataaatgcctttgtgggcaaccaaacatgaacaatctacattgcaaagtctagagcagttattggacacagctgggaattgtgaccctctatgctcggctgatgaagttagctcacaatactttgaagctaactacaaaccaaaaaatgaccttctaaaagctttaactatcattggcacagccttgactggagcagccgcaataaaccattcctgggttgctgctaatcaggacattgcaatggtgttggtttttgctattggctatgcaggtatcgtttttgaggaatcactagcatttaacaaaagtggagttgcgttattgatggctgtctgcctatgggttatcagaggcattggggctccctcgactgatgtagctgttcaagagttgagccagtcaacttctgaagttagtgaaattgtgtttttcttgcttggtgcaatgactattgtggaaattgttgatgcacatcaaggttttaagctggtgactgataatatatctactcgaaacccaaaaactcttctgtgggtgattggtattgtaactttcttcctgagttcgatcctcgacaacctgacttccactattgtgatggtatccttgcttcgaaaactagtacctccatcagaatatagaaaattgttaggtgctgttgttgtaatagcagcgaatgctggcggtgcatggacaccaattggtgatgtgacaaccactatgttgtggattcatggtcagattacaacattgaaaataatgcagggcttgtttattccctccactgtttcgttggctgtcccactggctctgatgtccctcaccagtgaagcaaatgggtcatctgagaaatcttccagcttgctgtcatcagagcaggtggctcctcggggacaacttgtactaggtgttggaattggagcattaatgtttgttccagtctttaaagctctcactggtctgccacctttcatgggtatgctacttggtcttgggattctctggatcctgacagatgcaatacattacggagactctgaaaggcagcggctgaaagttccacaagcactatcacggattgatacacaaggaattttattcttcttaggtattcttttatcagttggcagcttggaatctgcagggattttgaggcagttagcaaattatcttgatgccaatattccaaatgctgatcttattgctagtgcaattggtgtggcatcagcaattatagacaatgttccacttgttgctgcaaccatggggatgtatgacctgacttcgttccctcaagactcggacttctggcagcttgttgcattctgtgcgggtactggtggttcaatgcttatcattggctccgcagcaggagttgcttttatgggagtggagaaggtggatttcttttggtattttcgcaaggtgagcggttttgcctttgcaggttatgcagctggtataatctcttaccttgctgttcaaaatctccatctatcccttcccacgtcgctggttgagatcccttttatttcgggatcataaaagcttggcctttgtggtcattttagaatgatcacactctacatatggaggtgaacatcattattgtttccatatcttatgtaaggtccagtgtgtcggcatgtagagtattcagaatttgggggataagacagccctgagcttcaaggccagacatcagttttggacaggcttatctcgtgctgatgaactttagggtagggttgagctccttactagggggctgtttggttcgtggctaaatatgccacactttgcctaaggttagtcgttcgaattgaagaattaaccttaggcaaaaaagttaagcaaagtgtggcaagttagacatcaaaccaaacaagccctagaactgtgggttcgaaccaaagtatgccactctggatatttgtgaacctactcggcaaacaaaggagcaacttagaaatgtgcaattttgtaagaaacaatcccttgtaagctaagagtgtaataagatacagaaatcttgtataactgctgtctggtaatctcattgatggtcttgttaggcag

SEQ ID NO: 68519 - DNA, 2250 bp, Zea Mays
ctattcgagtgaaagcggcccccaatttctactgtaagcagcaatggcgctctcctgttacttgctcgccggcgcccgggcggcagcctccccttccttctcatcctccgctgccatccgccggcgggaccaccgtctgctgaccttgtccgtggttccgctttcgctctctcagcgatgtcgccacggcctccgcgtgtgctgcgcctcctccacctcttcctcatctccgccgccggcaactcccgaggagcccgacgactacgagttattggacacagctgggaattgtgaccctctatgctcggctgatgaagttagctcacaatactttgaagctaactacaaaccaaaaaatgaccttctaaaagctttaactatcattggcacagccttgactggagcagccgcaataaaccattcctgggttgctgctaatcaggtatcgtttttgaggaatcactagcatttaacaaaagtggagttgcgttattgatggctgtctgcctatgggttatcagaggcattggggctccctcgactgatgtagctgttcaagagttgagccagtcaacttctgaagttagtgaaattgtgtttttcttgcttggtgcaatgactattgtggaaattgttgatgcacatcaaggttttaagctggtgactgataatatatctactcgaaacccaaaaactcttctgtgggtgattggtattgtaactttcttcctgagttcgatcctcgacaacctgacttccactattgtgatggtatccttgcttcgaaaactagtacctccatcagaatatagaaaattgttaggtgctgttgttgtaatagcagcgaatgctggcggtgcatggacaccaattggtgatgtgacaaccactatgttgtggattcatggtcagattacaacattgaaaataatgcagggcttgtttattccctccactgtttcgttggctgtcccactggctctgatgtccctcaccagtgaagcaaatgggtcatctgagaaatcttccagcttgctgtcatcagagcaggtggctcctcggggacaacttgtactaggtgttggaattggagcattaatgtttgttccagtctttaaagctctcactggtctgccacctttcatgggtatgctacttggtcttgggattctctggatcctgacagatgcaatacattacggagactctgaaaggcagcggctgaaagttccacaagcactatcacggattgatacacaaggaattttattcttcttaggtattcttttatcagttggcagcttggaatctgcagggattttgaggcagttagcaaattatcttgatgccaatattccaaatgctgatcttattgctagtgcaattggtgtggcatcagcaattatagacaatgttccacttgttgctgcaaccatggggatgtatgacctgacttcgttccctcaagactcggacttctggcagcttgttgcattctgtgcgggtactggtggttcaatgcttatcattggctccgcagcaggagttgcttttatgggagtggagaaggtggatttcttttggtattttcgcaaggtgagcggttttgcctttgcaggttatgcagctggtataatctcttaccttgctgttcaaaatctccatctatcccttcccacgtcgctggttgagatcccttttatttcgggatcataaaagcttggcctttgtggtcattttagaatgatcacactctacatatggaggtgaacatcattattgtttccatatcttatgtaaggtccagtgtgtcggcatgtagagtattcagaatttgggggataagacagccctgagcttcaaggccagacatcagttttggacaggcttatctcgtgctgatgaactttagggtagggttgagctccttactagggggctgtttggttcgtggctaaatatgccacactttgcctaaggttagtcgttcgaattgaagaattaaccttaggcaaaaaagttaagcaaagtgtggcaagttagacatcaaaccaaacaagccctagaactgtgggttcgaaccaaagtatgccactctggatatttgtgaacctactcggcaaacaaaggagcaacttagaaatgtgcaattttgtaagaaacaatcccttgtaagctaagagtgtaataagatacagaaatcttgtataactgctgtctggtaatctcattgatggtcttgttaggcag

SEQ ID NO: 68520 - DNA, 2220 bp, Zea Mays
ctattcgagtgaaagcggcccccaatttctactgtaagcagcaatggcgctctcctgttacttgctcgccggcgcccgggcggcagcctccccttccttctcatcctccgctgccatccgccggcgggaccaccgtctgctgaccttgtccgtggttccgctttcgctctctcagcgatgtcgccacggcctccgcgtgtgctgcgcctcctccacctcttcctcatctccgccgccggcaactcccgaggagcccgacgactacgagttattggacacagctgggaattgtgaccctctatgctcggctgatgaagttagctcacaatactttgaagctaactacaaaccaaaaaatgaccttctaaaagctttaactatcattggcacagccttgactggagcagccgcaataaaccattcctgggttgctgctaatcaggacattgcaatggtgttggtttttgctattggctatgcaggtatcgtttttgaggaatcactagcatttaacaaaagtggagttgcgttattgatggctgtctgcctatgggttatcagaggcattggggctccctcgactgatgtagctgttcaagagttgagccagtcaacttctgaagttagtgaaattgtgtttttcttgcttggtgcaatgactattgtggaaattgttgatgcacatcaaggttttaagctggtgactgataatatatctactcgaaacccaaaaactcttctgtgggtgattggtattgtaactttcttcctgagttcgatcctcgacaacctgacttccactattgtgatgcagcgaatgctggcggtgcatggacaccaattggtgatgtgacaaccactatgttgtggattcatggtcagattacaacattgaaaataatgcagggcttgtttattccctccactgtttcgttggctgtcccactggctctgatgtccctcaccagtgaagcaaatgggtcatctgagaaatcttccagcttgctgtcatcagagcaggtggctcctcggggacaacttgtactaggtgttggaattggagcattaatgtttgttccagtctttaaagctctcactggtctgccacctttcatgggtatgctacttggtcttgggattctctggatcctgacagatgcaatacattacggagactctgaaaggcagcggctgaaagttccacaagcactatcacggattgatacacaaggaattttattcttcttaggtattcttttatcagttggcagcttggaatctgcagggattttgaggcagttagcaaattatcttgatgccaatattccaaatgctgatcttattgctagtgcaattggtgtggcatcagcaattatagacaatgttccacttgttgctgcaaccatggggatgtatgacctgacttcgttccctcaagactcggacttctggcagcttgttgcattctgtgcgggtactggtggttcaatgcttatcattggctccgcagcaggagttgcttttatgggagtggagaaggtggatttcttttggtattttcgcaaggtgagcggttttgcctttgcaggttatgcagctggtataatctcttaccttgctgttcaaaatctccatctatcccttcccacgtcgctggttgagatcccttttatttcgggatcataaaagcttggcctttgtggtcattttagaatgatcacactctacatatggaggtgaacatcattattgtttccatatcttatgtaaggtccagtgtgtcggcatgtagagtattcagaatttgggggataagacagccctgagcttcaaggccagacatcagttttggacaggcttatctcgtgctgatgaactttagggtagggttgagctccttactagggggctgtttggttcgtggctaaatatgccacactttgcctaaggttagtcgttcgaattgaagaattaaccttaggcaaaaaagttaagcaaagtgtggcaagttagacatcaaaccaaacaagccctagaactgtgggttcgaaccaaagtatgccactctggatatttgtgaacctactcggcaaacaaaggagcaacttagaaatgtgcaattttgtaagaaacaatcccttgtaagctaagagtgtaataagatacagaaatcttgtataactgctgtctggtaatctcattgatggtcttgttaggcag

SEQ ID NO: 68521 - DNA, 2242 bp, Zea Mays
ctattcgagtgaaagcggcccccaatttctactgtaagcagcaatggcgctctcctgttacttgctcgccggcgcccgggcggcagcctccccttccttctcatcctccgctgccatccgccggcgggaccaccgtctgctgaccttgtccgtggttccgctttcgctctctcagcgatgtcgccacggcctccgcgtgtgctgcgcctcctccacctcttcctcatctccgccgccggcaactcccgaggagcccgacgactacgagttattggacacagctgggaattgtgaccctctatgctcggctgatgaagttagctcacaatactttgaagctaactacaaaccaaaaaatgaccttctaaaagctttaactatcattggcacagccttgactggagcagccgcaataaaccattcctgggttgctgctaatcaggtatcgtttttgaggaatcactagcatttaacaaaagtggagttgcgttattgatggctgtctgcctatgggttatcagaggcattggggctccctcgactgatgtagctgttcaagagttgagccagtcaacttctgaagttagtgaaattgtgtttttcttgcttggtgcaatgactattgtggaaattgttgatgcacatcaaggttttaagctggtgactgataatatatctactcgaaacccaaaaactcttctgtgggtgattggtattgtaactttcttcctgagttcgatcctcgacaacctgacttccactattgtgatggtatccttgcttcgaaaactagtacctccatcagaatatagaaagtgctgttgttgtaatagcagcgaatgctggcggtgcatggacaccaattggtgatgtgacaaccactatgttgtggattcatggtcagattacaacattgaaaataatgcagggcttgtttattccctccactgtttcgttggctgtcccactggctctgatgtccctcaccagtgaagcaaatgggtcatctgagaaatcttccagcttgctgtcatcagagcaggtggctcctcggggacaacttgtactaggtgttggaattggagcattaatgtttgttccagtctttaaagctctcactggtctgccacctttcatgggtatgctacttggtcttgggattctctggatcctgacagatgcaatacattacggagactctgaaaggcagcggctgaaagttccacaagcactatcacggattgatacacaaggaattttattcttcttaggtattcttttatcagttggcagcttggaatctgcagggattttgaggcagttagcaaattatcttgatgccaatattccaaatgctgatcttattgctagtgcaattggtgtggcatcagcaattatagacaatgttccacttgttgctgcaaccatggggatgtatgacctgacttcgttccctcaagactcggacttctggcagcttgttgcattctgtgcgggtactggtggttcaatgcttatcattggctccgcagcaggagttgcttttatgggagtggagaaggtggatttcttttggtattttcgcaaggtgagcggttttgcctttgcaggttatgcagctggtataatctcttaccttgctgttcaaaatctccatctatcccttcccacgtcgctggttgagatcccttttatttcgggatcataaaagcttggcctttgtggtcattttagaatgatcacactctacatatggaggtgaacatcattattgtttccatatcttatgtaaggtccagtgtgtcggcatgtagagtattcagaatttgggggataagacagccctgagcttcaaggccagacatcagttttggacaggcttatctcgtgctgatgaactttagggtagggttgagctccttactagggggctgtttggttcgtggctaaatatgccacactttgcctaaggttagtcgttcgaattgaagaattaaccttaggcaaaaaagttaagcaaagtgtggcaagttagacatcaaaccaaacaagccctagaactgtgggttcgaaccaaagtatgccactctggatatttgtgaacctactcggcaaacaaaggagcaacttagaaatgtgcaattttgtaagaaacaatcccttgtaagctaagagtgtaataagatacagaaatcttgtataactgctgtctggtaatctcattgatggtcttgttaggcag

SEQ ID NO: 68522 - DNA, 2283 bp, Zea Mays
ctattcgagtgaaagcggcccccaatttctactgtaagcagcaatggcgctctcctgttacttgctcgccggcgcccgggcggcagcctccccttccttctcatcctccgctgccatccgccggcgggaccaccgtctgctgaccttgtccgtggttccgctttcgctctctcagcgatgtcgccacggcctccgcgtgtgctgcgcctcctccacctcttcctcatctccgccgccggcaactcccgaggagcccgacgactacgagttattggacacagctgggaattgtgaccctctatgctcggctgatgaagttagctcacaatactttgaagctaactacaaaccaaaaaatgaccttctaaaagctttaactatcattggcacagccttgactggagcagccgcaataaaccattcctgggttgctgctaatcaggacattgcaatggtgttggtttttgctattggctatgcaggtatcgtttttgaggaatcactagcatttaacaaaagtggagttgcgttattgatggctgtctgcctatgggttatcagaggcattggggctccctcgactgatgtagctgttcaagagttgagccagtcaacttctgaagttagtgaaattgtgtttttcttgcttggtgcaatgactattgtggaaattgttgatgcacatcaaggttttaagctggtgactgataatatatctactcgaaacccaaaaactcttctattggtattgtaactttcttcctgagttcgatcctcgacaacctgacttccactattgtgatggtatccttgcttcgaaaactagtacctccatcagaatatagaaaattgttaggtgctgttgttgtaatagcagcgaatgctggcggtgcatggacaccaattggtgatgtgacaaccactatgttgtggattcatggtcagattacaacattgaaaataatgcagggcttgtttattccctccactgtttcgttggctgtcccactggctctgatgtccctcaccagtgaagcaaatgggtcatctgagaaatcttccagcttgctgtcatcagagcaggtggctcctcggggacaacttgtactaggtgttggaattggagcattaatgtttgttccagtctttaaagctctcactggtctgccacctttcatgggtatgctacttggtcttgggattctctggatcctgacagatgcaatacattacggagactctgaaaggcagcggctgaaagttccacaagcactatcacggattgatacacaaggaattttattcttcttaggtattcttttatcagttggcagcttggaatctgcagggattttgaggcagttagcaaattatcttgatgccaatattccaaatgctgatcttattgctagtgcaattggtgtggcatcagcaattatagacaatgttccacttgttgctgcaaccatggggatgtatgacctgacttcgttccctcaagactcggacttctggcagcttgttgcattctgtgcgggtactggtggttcaatgcttatcattggctccgcagcaggagttgcttttatgggagtggagaaggtggatttcttttggtattttcgcaaggtgagcggttttgcctttgcaggttatgcagctggtataatctcttaccttgctgttcaaaatctccatctatcccttcccacgtcgctggttgagatcccttttatttcgggatcataaaagcttggcctttgtggtcattttagaatgatcacactctacatatggaggtgaacatcattattgtttccatatcttatgtaaggtccagtgtgtcggcatgtagagtattcagaatttgggggataagacagccctgagcttcaaggccagacatcagttttggacaggcttatctcgtgctgatgaactttagggtagggttgagctccttactagggggctgtttggttcgtggctaaatatgccacactttgcctaaggttagtcgttcgaattgaagaattaaccttaggcaaaaaagttaagcaaagtgtggcaagttagacatcaaaccaaacaagccctagaactgtgggttcgaaccaaagtatgccactctggatatttgtgaacctactcggcaaacaaaggagcaacttagaaatgtgcaattttgtaagaaacaatcccttgtaagctaagagtgtaataagatacagaaatcttgtataactgctgtctggtaatctcattgatggtcttgttaggcag

SEQ ID NO: 68523 - DNA, 2154 bp, Zea Mays
ctattcgagtgaaagcggcccccaatttctactgtaagcagcaatggcgctctcctgttacttgctcgccggcgcccgggcggcagcctccccttccttctcatcctccgctgccatccgccggcgggaccaccgtctgctgaccttgtccgtggttccgctttcgctctctcagcgatgtcgccacggcctccgcgtgtgctgcgcctcctccacctcttcctcatctccgccgccggcaactcccgaggagcccgacgactacgagttattggacacagctgggaattgtgaccctctatgctcggctgatgaagttagctcacaatactttgaagctaactacaaaccaaaaaatgaccttctaaaagctttaactatcattggcacagccttgactggagcagccgcaataaaccattcctgggttgctgctaatcaggacattgcaatggtgttggtttttgctattggctatgcaggtatcgtttttgaggaatcactagcatttaacaaaagtggagttgcgttattgatggctgtctgcctatgggttatcagaggcattggggctccctcgactgatgtagctgttcaagagttgagccagtcaacttctgaagttagtgaaattgtgtttttcttgcttggtgcaatgactattgtggaaattgttgatgcacatcaaggttttaagctggtgactgataatatatctactcgaaacccaaaaactcttctgtgggtgattggtattgtaactttcttcctgagttcgatcctcgacaacctgacttccactattgtgatggtatccttgcttcgaaaactagtacctccatcagaatatagaaaattgttaggtgctgttgttgtaatagcagcgaatgctggcggtgcatggacaccaattggtgatgtgacaaccactatgttgtggattcatggtcagattacaacattgaaaataatgcagggcttgtttattccctccactgtttcgttggctgtcccactggctctgatgtccctcaccagtgaagcaaatgggtcatctgagaaatcttccagcttgctgtcatcagagcagatgcaatacattacggagactctgaaaggcagcggctgaaagttccacaagcactatcacggattgatacacaaggaattttattcttcttaggtattcttttatcagttggcagcttggaatctgcagggattttgaggcagttagcaaattatcttgatgccaatattccaaatgctgatcttattgctagtgcaattggtgtggcatcagcaattatagacaatgttccacttgttgctgcaaccatggggatgtatgacctgacttcgttccctcaagactcggacttctggcagcttgttgcattctgtgcgggtactggtggttcaatgcttatcattggctccgcagcaggagttgcttttatgggagtggagaaggtggatttcttttggtattttcgcaaggtgagcggttttgcctttgcaggttatgcagctggtataatctcttaccttgctgttcaaaatctccatctatcccttcccacgtcgctggttgagatcccttttatttcgggatcataaaagcttggcctttgtggtcattttagaatgatcacactctacatatggaggtgaacatcattattgtttccatatcttatgtaaggtccagtgtgtcggcatgtagagtattcagaatttgggggataagacagccctgagcttcaaggccagacatcagttttggacaggcttatctcgtgctgatgaactttagggtagggttgagctccttactagggggctgtttggttcgtggctaaatatgccacactttgcctaaggttagtcgttcgaattgaagaattaaccttaggcaaaaaagttaagcaaagtgtggcaagttagacatcaaaccaaacaagccctagaactgtgggttcgaaccaaagtatgccactctggatatttgtgaacctactcggcaaacaaaggagcaacttagaaatgtgcaattttgtaagaaacaatcccttgtaagctaagagtgtaataagatacagaaatcttgtataactgctgtctggtaatctcattgatggtcttgttaggcag

SEQ ID NO: 68524 - DNA, 4647 bp, Zea Mays
cgatcaacaccggacgcgccagattaaatcgcgagggtttgaatcggtacgcgccgtgagcagtctgatcacgatccgacggtggacaccctagctccaggaaaaccgttcgatcgccaatcgacgaccgcgatcgatccccaaaacgctacagcccaactaaatctcctccacacgctaatagatcaacggccccagagcatcctctccccaactctagtcctagccgcacatgactcatccaatgccccaccgatcgccttcctccccaggcagaccccggtcagcggcaagcgatccccacggcggagatccaccgacgacaactcgttcttcgcccagtgaactaaccttcgattggagacacacaacacgatgcaagagcggaggcaaggacaacgggtaaggtattaccgacggaggtgttgcagtgatgccggtccgcagcatgaagcggagctgcgacgaagctagagctccgatgaggaattatggcgccaccataatgccccgcacccggaccgactgccggtgagattccttgagcaccagagacgatcctcgcgaactctccatgacgttagcgacgacgagcagtaattcataggtggcggccctctctcttctcaggcactcctcccagagcggcggcaaagcttagcggcgcaactagtgatggctcatggacttgatgccagcaccgtgggtactgcatggtggagacgaaggaggggcgcaggacccggcctggcttccttataacggctgaaggggaaaaacgaaaggagagtccgcacggatcgcgcgatctccggcggtagctgcgttggccgttgacgaagaaaggaggagatgagctgaccggtgggtcccgcaaatcagtgaggcgcgcgcgaaccaccgaagaaacccgagcgactgaccctgggcccttcctgtcagcgcataaattccttgcttccgctgtgcgtgcaacaacacaggatgcgcctgacgacgtggggccaccatgtcataccccccatgcgcctggtgcatcatctgggccgtgcggttggtgatggagtaatgggccgaaaacgaagttggggcccagttagggtagctttgttttattcttttcttttcccctttttttctccattttcaaatccaatttgaattcaagtttaaattcaaactttgtgaataacttgtcctcagtttgaaatgtatagtttaataatataagtgtgaaaggtatttattctgatttttatttttattttatgtagtatttttctcagttcttcccttttcttaattcaaacccaaattctcaatttaggattcaagctttctagtaattattatcttattatcattaacgttattatttcatttaatgcacaaacatataaactccagcatgatgcaattttttatcgtttgcttgacttaatctctaaattgtgtgtgtgctcttttcttatgatgcaaatgaggcacataggattgaggataactctctattattcttggtatacaacttggagtattacagccaggtacagtcccttcgtgggggaagcaccttgctgtggcctcccgggccaccccatggccgtcatcacatgagcaggttgtggtgcgcctgcaagccgcagtgcgcggcttccttgttaggcgggcggtgcggaagctgcacttgctgatcagctcatcgctgcaccaactcgcagcctgcgtgcccaaccaccaggtctcatctatactttttgaaccccctgcagaagtcgagatctaggtatgcagcccccctgcactgccaaagagggtcgtctccttcattcgggcacctgccttggtgttggacagacccaacataagaacgggctggttcctcctccacctttcatccaacgtgaaggccgcagttcagctctttccttgggatccaggaggacaggaggacatagctgcagttcaaatttatattttagttccacaattattttgtattttcgtcttaaataataaaggtaagccgagatgtaaaaggcttaaccttaagtcgtgtcaggtaagtctatggcagctcgaggacgagctggtcctcaagggagggggagatgtcatgggcatcatagggagcggtcactcatgtggggtcgcacctatgtgcgccaaaagcgagaggccgcaggtggcgctggcagcagcgcgcgcaaggaaggcacgagcgctggcagcagcgcgcgcaaggaaggcatggcaaaggaaagcgcgcacaaggaaggcatggcaaaggaaagcgtgcgcaaggaaggcatggcaaaggaaagtgactgatttggtggctaaattgatagacctaaatttaggggagataatttcaattagtcacttgcctaattagtggttgcctagttggtcaaccggtggcctatatataggcctgtacgcaggagacaaaggaagaaggaatacattatcaaaccaatctctctctctctctcttgcaatgaccctcaagcgcctagggctgctaccctagaaccaagcctgcggcagaggggtataacctcgccggagaagacaactatccccatggaccgaaggtccatgacacttggagacatagcgatagtatggctgactaagcttttcaacaccatctttcggacaaacagaatgcccgacgagtggcggcgaagtacgttagtaccaatcttcaaaaacaaaggagatgttcagaattgtactaattatcgtggaattaagctcatgagccatacaatgaagctatgtgagagtcattgaacaccgtctgtggaagatgacgagtgtgacccaaaatcagtttgatttcatgcctgggagatcaagtatggaggccatcttcttactaagacaacttatggagagattcagagaacaaaagaaagacctgcatatggtcttcatagacttggagaaggcttatgacaaagtacgtaggagtgtaatgtggtgggccttggaaaaacacaaagtatcaacaaagtacattaatcttattaaagatatgtacattaatgttgtgacaagtgtccgaacaagtgatggagacaccgacgacttttcaattaacataggactacatcaagggtcggctttgagcccttatcttttcgctttggtgatagatgaggtcacaagggacatacaaggagatataccgtggtgtatgctttttgccgatgatgtggtacttattgaggagagtaggagtggtgttccgcaaaagttggaattgtggaggcagacgctggaagcaaaagattttaggcttagtaggtctaaaacagagtatatgaagtatgatttcagtgccatggggtatgaggatggcgatgttagtcttgatgggcaagtggtacccaagaaagacacttttcgttacttaggatcaatgctttagaaggagggagacatcgatgaggatgtcagtcatagaattaaagctggatggttgaagtggcggcaagctgcgggtgtcttatgcgacccccgggtgccacacaaactaaaaggcaaattctacaggacaacaatccggccggctatgttgtatggagcagaatgttggcccactaaaagacgacatgtccaacaactaagtgtaacagagatgcgtatgttgcgctggatatgtgtccacacaaggagagatcgagtccggaatgatgatatacgagagagagtaggagtgacgccaattgaggagaagcttatgcaacatcgtttgatatggtttggacatatccaacgaagacctgaagaggcaccagtgcatatcggaataattaggcgccccgagaatgtgacataggctgtgaagagggacctgaaggagtggaatattgataatgagctcgtcgtggataggaaggggtggaagtgtgcaattcacgtgccagaaccatgatttgtagtttcgcttttcctccttaatcgtttgaccttttcttgtgcccctttagatcttgctggttcttgcgggttttatccctttttatgtgtttccccgtttcgtcgtttttcggttctcctttgcctttgactcctttttcttttctttgggggttgagctctgaggttttcatatggggtttcatctctagcctactccaacgtgcttgggacataaaggctttgttgttgttgtacctttgatttttgttgccccaagcactgatctgatgttgtaatagagagtagcatgtgttcagatcagttaggataggaagctgagctcgctgccaactaggcgaacactagcattatcagttattctcttaaggaagttaaacatattcagttagttttatattcttcctgtatacctttgatttttgttgccctaagcactgatctgatgttgtaatagagagtagcatgtgttcagatcagttaggataggaagctgagctcgctgctaactaggccaacactagcatccatttttttttccaaactgacactacaactgttataaagttctccaaatctgatgccaattgccaaggctcaggaggagagccgatgtcgaggatgacttgatacaaatgttttttaaatgacatatagatgctgatgctactttcagttctgtgtgttatggat

SEQ ID NO: 68525 - DNA, 2149 bp, Zea Mays
ttcattcttagaatagataagaatatcgtcgataaacaccacgacgaatctgtccaaatactccataaacaccttgttcatcaaattcatgaaataagccggtgcattggttaatccaaatgacataacagtaaactcatataatccatatcgggttgagaaagccgtcttaggaatatctgagggtctaatcttcatctgatggtatcccgatcggagatcaatcttcgagaataccctggctcctctcatctgatcaaacaaatcctcaatacggggtaatggatacttgttcctcaccgtgacatcattgagtgatctatagtccacacacatccgttgcgatccatccttcttctgcacaaataacaccggtgctccccaaggtgaggaactcggacgaatatacccaacctcttgcaactctgttaactgtttcttaagctcctttaattcttctatggacatcctatatggccgtttagaaataggagcagccccaggtaagagatcaatgaccaactcaacttccatatctggtggcatccttggtaactcctctagaaagacatccggaaaatctctaaccacccggatgttatcaccaacaaacttctcatctactaagaatgctgctagtctgatggtggtagttactgcaacttcaacttcaaatctttgtcccttggaactggtgagttctacggttcccttagcacagtgtatatactgcctttgcctttcttaaccatgatataccagggatcaagtctatagtgctctcttctaacactataggggtatagcccatctgggttagaaacacaggataagaagggaagaattgtagacaaggcgagtaattacgaggaatgttactgcggtagatttattagctaagtagattagtgttttatccactaaagctaatacattaccttatggtggtacatgctaagatgcccaactataatgtttcaatcaatcaaagaagcaaatcaagcatttatcatcagaacaatcatccaacatttttaatagagaaaataattttaatttcgtcttaggtctcctatctcttaaaaaaaagttcataaatgtaggattccaaggtgtgaaatccatcttgtcttagaatagaaaaggtaagaatcatcagagtagaacagtagaaggtgagacatgatcaagataagtatagagagaatcagagtaaggtaagtaggaaaggtttgtccatttctatctaggtttcgtcctacagtcaacatttcctctgataccacttctgtcacacccggctttaaggaacaaagccaggtgcatctcatacatgcgccaagaagacaacatatataataacagagtgtatagagataaatgtcacaataacatcagagtatttattacatagcggaagacttattacaaaataaaagagtaaatataaaacgaactaaggatcgtcggcgcaaatgtcaactgagaatcgccacctagatcagatcaaactcctcgccttgtggctcctcctgaaccacctgttcttctcctatgggggggtgtgagacagcaagagtgagctcacatatgttcatagctcaacaagtcgtggggaataatgtggcatgaactcaccgaaggtgggagttcatgaagtgtaaggctgatcaatggaataaaggctgaagctgagcattgcttttataagttggtcaaaattttattagcaattactaagtgtaagtaaataccaaaccttaataataataaataaagtaatagtaaaataatcccaaatgcgatgcaaatgtcaaattgaatttaagttccataaattaatcatgtgagggtccgagccgctcatgaccgtgagcacggctagtataccagttttacactctgcagaggttgcgcatctttacccacaagtcatgttacccatctgccaagagatggccaatcccatacacctctaccgaggaggcgaggcagggtaacactacgaggcctttacaaagttccactagcttcagaaatcccgctacagtttatacgaagctctagtgcagggttcttgcctgaccgccatcgcagcaaaatcaaccaaggacctccctacactgaccactcccctactgcccttgcc

SEQ ID NO: 68526 - DNA, 3440 bp, Zea Mays
ctgggtgctccaccaccgtcggccaggggttatcacagcgttctagagtgctgggcgactttgtgacgccgacgtgtggctccactgtttcaacggtagggcgtggcactaaccttgacgcgctccctctcgtgttgtcctagtgtcccacgaactggcggcggcggttcatacgctcgcgaagagaactagggctgcgggcgtggcaacacctagcagaagcaaattggcgtggcgtggcacccgccgggcgtcgctccctgccatggtcctaggtcatctgaactatgcggactgcggttccacctcgccacggtcgccgccctcgcccacaccgctgttctctcccctaggtgcccgtaaccccctcctccgtgccatcgtcgatcggcgtaaccatctccgctgcggggacaaggtacctagcaagcaggaagcagccgagcatcttgctaggacaatgaagtactggccgccagctcccaatcttccaaacaggacttgaaaggcttgttgatgtgaaacatagttcatttaaaaaggcaagaacaattttgggggatggagatgttaaaagaagtggtaaaaacactcattcaagcttattatttacttatttatataaagtttatttccctttgtgagatttaggtaatggacataccaaggtttgtacaacaacttttcaatttgaaacaccaaaatccgttttaatgagtggcagtttgattatgaatggcatgccagttacactagagaaaaataccgcagtgcaaggtatatgcctgatttcactgtgattttttttctcttttgtgacatcatgtgtaccatctgttcaatttatttactgtacaaaaattatcactattagtacaatctagatgtttctcacttgataatctttgttttccagcaaaaaatgttttcaatgttgatgaccaattgtcgttgtttcagactgggtcagtactctgctataaatacactattttctacaaacgttcctttaccgtatcaacactttctacatagaaatattgtccaacttttaatctattgttatcagttattctcttaaggaagttaaacatattcagttagtttcatattcttcctgtgtacctttcatattcttcttggggcgtaaccctcttagcgacgcgccatatcggaacccgggtatggtgttaaatgagcaagggcctggccgtcaccccttaagtgacgcgccgtctcttgatctggagccggtgataagtgagcaaggatcaggtcgtcgcatccttagtggcgtgctacatcggcgcccgtgtgtagtggaaaatgagcaagggtctttgcatcttcctcggcgggtgcgaagggtaaggaagctagtcgagccaactagggtccgtgtaggtagttggaacgtaggttccttaacaggtaagttacgagaaatagtcgacgttgcggtgaggagacgggtaaatattttatgcgttcaagagaccaagtggaaaggacaaaaggcgaaggaagtggaaggtacaggcttcaagttgtggtacacgaggactgcaacaaacaagaatggagtaggcgtcttgatcgacaagagccttaaagatggggtagtagatgttaagaggctaggagatagaatcatcctagtcaaactggtcattggggacttggttctcaatgttatcagcgcgtatgctcctcaagtaggccttaatgagaactcaaagagggagttctgggaaggcctggaggacatggttagtagtgtgccagttggcgagaagctcttcataggaggagatctcaatggccatgtgggtacatctagcaccagtttcgagggtgtgcatggaggcttcagctttgggactaggaatcaagaaggagaggaaatcctgaactttgctctagcctatgacatgtttatagcaaacactttctttaggaagaggaaatcccacctggtgacattcagtagtggccaatgcactagccagattgatttcgtcctcttgagaaaagaggacatgcatgcctgcttagattgcaaggttatacctggagagtgtgtggtaacccaacataagcttgtcgtagctgacttccgttttaagattcgtttacaacggaataagcataacaaggtcactagaacaaagtggtggaagcttaaaggggatgtggcccaaactttcaaggagagagttatcgaggagggcccttgggcagaagagggagacacaaacatcatgtggaggaagatggcgacatgcatccgaaagataacttcagaagagtttgggttgagtcaatgaaacagaagggaagttaaagacacttggtggtggaacgaagatgtccaaaaggctatcaaggagaagaaagattgctacaaacgcttacatcatgacaagtgtgcagacaacatagagaagtacaggatagcgaagaagtctgcaaagcgaggggttagtagagcccggggtcaagcctatgacgacctttatcaacggttggacacaaagcagggagaaaaggatatctataggatggccaagattcgtcaaaggaagacaagggatgtcaaccaagtcaaatgcatcaaggatgaagcaaaccaactattagtgaagaatgaagagatcaagaacagatggaaggagtacttcaacaaattgttcaatggagggaatgagagttctacaatagaattggacgaaccattcgatgacaacaacaggggttttgtacgaaggatacaagaatatgaagttaaggaggcactaaaaaggatgaaggtaggaaaggcgatgggccctgatggtatcactatcgaggtatggagatgccttggtgtcatgggcatcatagggagcggtcactcatgtggggtcgcacctatgtgcgccaaaagcgagaggccgcaggtggcgctggcagcagcgcgcgcaaggaaggcacgagcgctggcagtagcgcgcgcaaggaaggcatggcaaagaaaagcgcgcacaaggaaggcatggcaaaggaaagcgcgcgcaaggaaggcatggcaaaggaaagtgactgatttggtggctaaattgatagacctaaatttaggggagataatttcaattagtcacttgcctaattagtggttgcctagttggtcaaccggtggcctatatataggcctgtacgcaggagacaaaggaagaaggaatacattatcaaaccaatctctctctctcttgcaatgaccctcaagcgcctagggctgctaccctagaaccaagcctgcggcagaggggtataacctcgccggagaagacaactatccccatggactgaaggtccatgacacctgcggcagaggggtataacctcgccggagaagacaactatccccatggaccgaaggtccatgacacctggtatcagag

SEQ ID NO: 68527 - DNA, 1885 bp, Zea Mays
cactggcttctctgttgttctagttttcttcacgggcaggctgcagctctgtagattttctccatcccgccagcagcccagcacaaccgctcgtcagatttgctgctagcttctcccgtggctgttcttcaagagtccgacgcccacgagcttccaccctctgactcccatgctgcccgcactaccatctcgtgtgaaggaagagctgtgcccgagaaagttctgcagatgtgttgctggcctgctgtgcaccagttcttcacgtggcggctctccaaaagacagcaccaagcgctggacagcgacgagatgggtggaggcgctagcactgttcctgcgatgttgtgggattcggacagcgaagataaagtgcacgtggttaaccatcctactgatcgtcgtgctactactgacacatagaaaggaaagaccatggctgatgccaacacatcttctagtagtgctgatgtggtgcttgatcgatatgggaaaccagtgaagctaaatggaccaattgatgtgacttggaaccatggtgaaccatatcctggacctcatggggctggctttaagtgcttttattgttttaccaccaaaaaaggcggggggtgtctcgattaaaagagaatctaggtcacatactagggagtgtggaggcatgtcgtaaagtgccaaatcatgtgaaggacctaatgtctcaaaaagtaacggatgggagaattaggagggcacgtggtaagaagcttcgtttgtttgttgaaaaggaggttagtgcaataagacatggttatcaaagtgcaagaattccttttgatgaagaagcacagattgatatggcaatgagaaattcattgagggattctttttccacattggaacatgatagttgttcaccttttgataagtcaactggtagtgcaagtggagctgcaagttgttctacagggaagcaaagtaggctgtcaaggtactacaagaatacacaagatacctctagaggtccttttgacattgacttggcacgcagtaggacacaagtgcagccacacatagatgttatgctagagaggggtcacaaagagaagctagggatagcattggcaaaaaagttccatgctaatgacattcctggaaggaaggcagactgcccatactttcgttcagcccttaagttagctcaacaacttggtgatggagtaccaattccacgtgggagagaaatagatggtccattattggatatgaattatgcaaacatggtggctcacatggctaaatttaaagaggattggaaggattatggagttacagtcatgtgtgattcatgtacaggtcctaccatgatgtccattattaactttatgatcttttgcaatgggcgcatgttcttccacaagtcagtaaatgcaactggtctaattcaaaattctgattatatctatggagttatatctgaggtggttgctgatattgggatcaagcatgttgttcagatcatcactaataatggctcaaactataaaaaggcctgtctagacttcacaacaaaatatccacattgtaacgccctgaatttgggggtagaattttttcttctttaatactcaccaaattcaggtgttactctctttttctcttcccgcttcgctccttccttcccaaattcaaagcagtatagcgactagtgtcagtatcgtgtgtaaacaaaaacctaagttgtcatgggtgttgcatcatgccgaagcatatctcttttgtttgatgtcatgtttaatcgagcatttgtctcgtctcattgtggatttcgttttgcatttgggattccgatcagtggttgtgcgtgtcgtgagattttgacccgcggcgcgacccagcccggtctggc

SEQ ID NO: 68528 - DNA, 1691 bp, Zea Mays
gattttttcactggcttctctgttgttctagttttcttcacgggcaggctgcagctctgtagattttctccatcccgccagcagcccagcacaaccgctcgtcagatttgctgctagcttctcccgtggctgttcttcaagagtccgacgcccacgagcttccaccctctgactcccatgctgcccgcactaccatctcgtgtgaaggaagagctgtgcccgagaaagttctgcagatgtgttgctggcctgctgtgcaccagttcttcacgtggcggctctccaaaagacagggaaaccagtgaagctaaatggaccaattgatgtgacttggaaccatggtgaaccatatcctggacctcatggggctggctttaagtgcttttattgttttaccaccaaaaaaggcggggggtgtctcgattaaaagagaatctaggtcacatactagggagtgtggaggcatgtcgtaaagtgccaaatcatgtgaaggacctaatgtctcaaaaagtaacggatgggagaattaggagggcacgtggtaagaagcttcgtttgtttgttgaaaaggaggttagtgcaataagacatggttatcaaagtgcaagaattccttttgatgaagaagcacagattgatatggcaatgagaaattcattgagggattctttttccacattggaacatgatagttgttcaccttttgataagtcaactggtagtgcaagtggagctgcaagttgttctacagggaagcaaagtaggctgtcaaggtactacaagaatacacaagatacctctagaggtccttttgacattgacttggcacgcagtaggacacaagtgcagccacacatagatgttatgctagagaggggtcacaaagagaagctagggatagcattggcaaaaaagttccatgctaatgacattcctggaaggaaggcagactgcccatactttcgttcagcccttaagttagctcaacaacttggtgatggagtaccaattccacgtgggagagaaatagatggtccattattggatatgaattatgcaaacatggtggctcacatggctaaatttaaagaggattggaaggattatggagttacagtcatgtgtgattcatgtacaggtcctaccatgatgtccattattaactttatgatcttttgcaatgggcgcatgttcttccacaagtcagtaaatgcaactggtctaattcaaaattctgattatatctatggagttatatctgaggtggttgctgatattgggatcaagcatgttgttcagatcatcactaataatggctcaaactataaaaaggcctgtctagacttcacaacaaaatatccacattgtaacgccctgaatttgggggtagaattttttcttctttaatactcaccaaattcaggtgttactctctttttctcttcccgcttcgctccttccttcccaaattcaaagcagtatagcgactagtgtcagtatcgtgtgtaaacaaaaacctaagttgtcatgggtgttgcatcatgccgaagcatatctcttttgtttgatgtcatgtttaatcgagcatttgtctcgtctcattgtggatttcgttttgcatttgggattccgatcagtggttgtgcgtgtcgtgagattttgacccgcggcgcgacccagcccggtctggc

SEQ ID NO: 68529 - DNA, 977 bp, Zea Mays
ctcctttcctctctcgtcgtatactagtcactgccgccgaagccacagaaagagagactgctcgcgccgccgcagctaatactcacggttgacgccatctaaccgtcgacgcgaggactgcgaagatcacataggcatgccgtttgggataggagccatccgagaccaaatcgtgggctgttcgttgtcgaattcctcaccggagatcaaaacaggggcggaactacccccttcccatgggcagtgcacgtcgcgccaccgtcgccgtacatggacaggcaactgaggacccaggtgctcagccggtggaaactactgagtaggagctcattgaaggcaagttgtgcccttgatcacttctatttacccaataatgttcatgttaaccattatgatctgtatagttttattttgatggaacccaataggtcaccccagtttggctatctttataccttgtttaccacagaacttttaggtagtacctactattgctttatgtggttttgggtgttaagatacacattattcatgatcatgcttttattatcaatttgttacttactattcatgacaagatctttatgttaattggaacatggagcgaccacccgagtggtatcggacgcctttggctaactaattaagaaagctagtggagtactaccttacccgaaaggggcaagggcagtaggggagtggtcagtatagggaggttttcgggttgattttgctgcgatgcttttcagacacgggattcgtatactgcgcttcctagaaactgtagcggattttttgaagctagtggaactttgtaaaggccttgtagtgttatcctgccgcgcttccttggtagatgtgtatggggtctgatcaaccccgtggaaaatgggtaacacgacttgtggataaagatgagcaacctctgcagtgtaaaattggtatatcagtcgtgctcacggtcatgagcggctcgg

SEQ ID NO: 68530 - DNA, 2050 bp, Zea Mays
acccttccttttccggttcgactttcgacctttcgacgcgttccccaatccagctgaaatcaatccctgatccccaatccccgtccaccctcccaacaaaccctaactctacccctcaaccgagcgcaaccggcggcgatccaagatgccggcgacggcggggcgcgtccgcatgcccgcaaacaaccgcgtgcacagcagcgcggcgttgcagactcacggcatctggcagagcgccatcggatacgacccctacgcgcccgagaacgacaagcaacagccggggcggccttcgtcctccgtctccgccaacgccgccgccgcagctgccaacgacgccaacgcagccgccagcgccgccgcagcttccggatccggctcgggcgatggcaacgcctacaccagcttccagggccttctcgcgctcgcccgcatcacaggctccaactccgatgagacacgcggcgcctgcaagaagtgcggccgcgttggccacctcactttccagtgccgcaacttcctctccgtcaaggacctggacctggacgacgccgacgcccaggccgctgcacaggcggccgcgcaagccaagttcgacgagataaaaaagaaagctgctgccggtggggatgcagatgatgcttctgatgatgtggaagaggacgaggacagcgattcctctgattcagacatcgaccctgagctggagaagataattgctcagcgcgagcgctccaggaatggagcaaggtggcccaggaaggaaaagaagtcgtccagccaccaccataggaacagcagcagcaagagaaaatcaaagcacacaaggagtaggagtgatgatagtgaggaggatgaaggcagaagaggccgggacaggaagaagatgtccggcagatcgaagaagcatgaaagatctgatgaggctagcagcgatgacactgattcagatagacagaggcacaggaagagcaggaaggacaggaagaggaggagccaccgcaggagtgacgacacgttggatgagaaggatgtatctggaggtgaagaaaggaggcatcaacgtcaccagcggagccatcactggagggatgcatctgactgtgacaatggtgacagtgattctgcacatgacaagaagcaatccagcaggcggaggaggcattgccagtcagaaaacagtgggctagatgaggatgagcgacatgaccaccggggagcaaagcgatcacggaagaatagggaccacaagaggagctaaagaggagcattgaattggctctgcttttgtggtatttgaacaatcagcttttggggtatccttgtatgagatttttgagtacatggacaggcaactgaggacccaggtgctcagccggtggaaactactgagtaggagctcattgaaggcaagttgtgcccttgatcacttctatttacccaataatgttcatgttaaccattatgatctgtatagttttattttgatggaacccaataggtcaccccagtttggctatctttataccttgtttaccacagaacttttaggtagtacctactattgctttatgtggttttgggtgttaagatacacattattcatgatcatgcttttattatcaatttgttacttactattcatgacaagatctttatgttaattggaacatggagcgaccacccgagtggtatcggacgcctttggctaactaattaagaaagctagtggagtactaccttacccgaaaggggcaagggcagtaggggagtggtcagtatagggaggttttcgggttgattttgctgcgatgcttttcagacacgggattcgtatactgcgcttcctagaaactgtagcggattttttgaagctagtggaactttgtaaaggccttgtagtgttatcctgccgcgcttccttggtagatgtgtatggggtctgatcaaccccgtggaaaatgggtaacacgacttgtggataaagatgagcaacctctgcagtgtaaaattggtatatcagtcgtgctcacggtcatgagcggctcgg

SEQ ID NO: 68531 - DNA, 1446 bp, Zea Mays
acccttccttttccggttcgactttcgacctttcgacgcgttccccaatccagctgaaatcaatccctgatccccaatccccgtccaccctcccaacaaaccctaactctacccctcaaccgagcgcaaccggcggcgatccaagatgccggcgacggcggggcgcgtccgcatgcccgcaaacaaccgcgtgcacagcagcgcggcgttgcagactcacggcatctggcagagcgccatcggatacgacccctacgcgcccgagaacgacaagcaacagccggggcggccttcgtcctccgtctccgccaacgccgccgccgcagctgccaacgacgccaacgcagccgccagcgccgccgcagcttccggatccggctcgggcgatggcaacgcctacaccagcttccagggccttctcgcgctcgcccgcatcacaggctccaactccgatgagacacgcggcgcctgcaagaagtgcggccgcgttggccacctcactttccagtgccgcaacttcctctccgtcaaggacctggacctggacgacgccgacgcccaggccgctgcacaggcggccgcgcaagccaagttcgacgagataaaaaagaaagctgctgccggtggggatgcagatgatgcttctgatgatgtggaagaggacgaggacagcgattcctctgattcagacatcgaccctgagctggagaagataattgctcagcgcgagcgctccaggaatggagcaaggtggcccaggaaggaaaagaagtcgtccagccaccaccataggaacagcagcagcaagagaaaatcaaagcacacaaggagtaggagtgatgatagtgaggaggatgaaggcagaagaggccgggacaggaagaagatgtccggcagatcgaagaagcatgaaagatctgatgaggctagcagcgatgacactgattcagatagacagaggcacaggaagagcaggaaggacaggaagaggaggagccaccgcaggagtgacgacacgttggatgagaaggatgtatctggaggtgaagaaaggaggcatcaacgtcaccagcggagccatcactggagggatgcatctgactgtgacaatggtgacagtgattctgcacatgacaagaagcaatccagcaggcggaggaggcattgccagtcagaaaacagtgggctagatgaggatgagcgacatgaccaccggggagcaaagcgatcacggaagaatagggaccacaagaggagctaaagaggagcattgaattggctctgcttttgtggtatttgaacaatcagcttttggggtatccttgtatgagatttttgaggttattccccttcgttgagctcttgtcctatcgtataaaatgtggtgcgtccatactttttggtgatgaaaatatgatcgctattcaagttaagataagatctttt

SEQ ID NO: 68532 - DNA, 362 bp, Zea Mays
tttcaaggtagccaattcatcaaaaggtttccaagcaactcctataaacctaatgcacatttcactagacttaaagtgtgtaaaaatcatttaaaaacacaaggaaggggttgcatgcaccagggcttgcctggaataacactaggttagtgtttgttagatgacgtccacttggcgagcatctcacatcttggcgcttgatccgatcacccaatcttcaagttcattcatcagtatcaccttgcgaagaaacccatgcttaacaacatcttgtggttgactcagctctggtccttcgtatcacgtgatcagctagcgtacctaatgagatgcatggtgcacatgaatagatatgagcaaga

SEQ ID NO: 68533 - DNA, 332 bp, Zea Mays
ctttattacaaaaagttacaggttacaacaaatttacattatatttatcagagtggttacaaaagtggttcaaagcaatatactttgaaatgttataaattatttataagtttgaattatatgctagctcaatgacaatcctcaataagaagtatagaagagctactttaacctataagaaggccgtgcccaccgacgcttaacaccatcaacagcagcacaaattttagtacctgcaacaacatgggttcaaaaaccctgagtacgaagtatactttcgcaagtcttacccgactaaggaaaaagactctcaaggttatgctggatttggg

SEQ ID NO: 68534 - DNA, 1640 bp, Zea Mays
ttagggttttcgaacccatgttgttgcaggtactaaaatttgtgctgctgtggatgatgttaagcgctggtgggcatggccttcttatagatgtctgacaataggcgttgaggtggaaggcgtacccagctagagcagcaggcaccctaggatgaggcaccctagccacggctgcctccaccaccacccccgatgataatagagcagatgttcctgatgcagactcaagcagtgcaggcaattgggtagaccctagcagccatgtagcaggtgcaacaacaaccatagccccaatcgcaagtgcagatgtcacagatgcctagggacaaacgtgtggagttcatgagaggtcttccccctatcttcgcccactctgcagaccccatggatgccgaggattggctacacacagtagagcgggagttgcacactgctcagtgcaaagatcgagagaaggttctgtatggtcctcgtctgttgacgggagcagcacagtcctggtgggagtcttacctcgccacccatgccaaccctgaagccatcacctgggagaaattcagagaaaatttctgtcggtaccatgttccagagggcttgatgatagtgaagaaagggagttcctggcactgaagcagggatccatgtccgtcagcgagtaccgagaccgattcctgcagttgtcttgctacgcttcagaagatgtcaacattgatgccaagagacagtaccgattcctgagaggattggttgatcccctgcattatcagttgatgaatcacaccttctcgaccttctagcatctgatcgacagggctataatgacagagagggatcgccgggagatgggagaccggaagcgcaaaataagtagaccctagcctgggagcaacagtcatccttgtttctcaggcaatccaccccagcagttcaagcaaagtcacccccagggataccagcatcaaagttaacatcaacagcagtatcagaggcagtttcctcagcagcagcagcaacagcagtagtgccgccagaacaatcaaccaagagggaaccaataccagaggcagaacaactaggcacctcgccttcctgccccagcagctaatcagaatggtcagacaaccccagtgcaaggaggaggtcgaggatgttttcactatggagaacaaggccactgggcgtcgcattgcccaaagaaagtagctcaacaacagtcagctcctaatgcccctgcaagacacagtgcatctcagcaaggagcaaacaatcatggacatcctcgtgcctagtatggaaaggtgaaccacctagagaccgacatagttcaggagaccctaggagtggcactaggcacgttctcagtcgaatctcattctgtaaatgtgttatttgatattggagccacacattcttttgtgactgcatcatgggtagaaacacacaacataccagtagcacccatgtacccaccatgagggttagtttagttgatgggaggacctaaacagataaattttgcccaagtgcaatagtccaaataagggggatagagatctccgccgatttgatagtaatgggtacccaggatgtagacatagatgtcatcctagggatgaattggttgaccaagtaccgagcag

SEQ ID NO: 68535 - DNA, 300 bp, Zea Mays
ttagggttttcgaacccatgttgttgcaggtactaaaatttgtgctgctgtggatgatgttaagcgctggtgggcatggccttcttataggttaaaatagctcttctatacttcttattgaggattgtcattgagctagcatatatttcaaacttataaataatttttaacatttcaaagtatattgctttgaaccacttttgtaaccactccgataaatataatgtaaatttgttgtaacctgtaactttttgtaataaagaaattccgctgcaaaatgttggtgtgtgatttgtgttt

SEQ ID NO: 68536 - DNA, 785 bp, Zea Mays
ctattctcatcgagctcccaaatcccagccttatcttctcaagtggtatgcatatctctctgtcagccttatctctcgcttcctgtccacagcaagctgcgcccagcccgtggccatcggcctcttcttccccacatgctctccatgcttgagctcgccccttgtcagcttcagctcatgcccagggcctctgctcgccggacgccgtagcacatgcttcctgctcggcctccctggcgtgctgctccctcgccttggcgtccctgcgagctccttctccctcgcctgatttccagctcgggcctcgccggatgccgacgccgcttctctaacctagccttgacactaaatcgctgcagcacgccataccgtgtgtgttgcactgtcatcgttcgctatcctcatccttgccaattttcctcgtcgtttctcggctacaacctcgtcagctcctgcgcattgtgcacgtcttgtgttcgggtcgagccccaggattttgaggaaaaggaagctctagtgcatcaaccggtgaaataaataaactggtggtagtcatggtccttgcgaaatccgagatcaggtacgctagctgatcacgtgataccaaggaccagagctgagtcgaccacaagatgctgttaagcatgggtttcttcgaaaggtgatactgatgaatgaacttgaagattgggtgatcggatcaagcgccaggatgtgagatgctcgccaagtggacgtcatctaacaaacactaacctagtgttattccaggcaagccccggtgc

SEQ ID NO: 68537 - DNA, 1883 bp, Zea Mays
ctattctcatcgagctcccaaatcccagccttatcttctcaagtggtatgcatatctctctgtcagccttatctctcgcttcctgtccacagcaagctgcgcccagcccgtggccatcggcctcttcttccccacatgctctccatgcttgagctcgccccttgtcagcttcagctcatgcccagggcctctgctcgccggacgccgtagcacatgcttcctgctcggcctccctggcgtgctgctccctcgccttggcgtccctgcgagctccttctccctcgcctgatttccagctcgggcctcgccggatgccgacgccgcttctctaacctagccttgacactaaatcgctgcagcacgccataccgtgtgtgttgcactgtcatcgttcgctatcctcatccttgccaattttcctcgtcgtttctcggctacaacctcgtcagctcctgcgcattgtgcacgtcttgtgttcgggtcgagccccaggattttgaggaaaaggaagctctagtgcatcaaccggtgaaataaataaactggtggtagtcatggtccttgcgaaatccgagatcagcatactatttaaattggatggtggagagtgaagtttcgtgcgtcgatcgcttgatatttggtgtattgcccaactcggaatcatcgtcgtatttgcggatctcgacttgagttaagtattatatagacttatagtagtttgaggaatagtttgatttaatttagagtgtgttttgttagtcaacaaattttcacgtaattagaaatatttttcctttagtgaaataaataactttaaaaacaattaaattgttacactagttttgaattttatggagtccatggacccaattctaaatttaatctatggttgcgttttatgttggctagggccatattttaattatttgatggagtcgatattctacgttaatagttagtataatcgatctatgtctgtgatcggtaaatgtcatactcagatattgattagttagattagtagtcatgactaaatgtttatttttaccttggctatggttacccaaaataattaggaagtgagtaaccttgataattctatttctgtaaaaaccggaggactaccggtggagaatgcgcataagcgctttagatctttagttgctaggaaagcggtttcgtagaactttatgttgtatgataacgttctacttgttagattatggctaaatgagatattttatttagttggtgtattatgcatgatagtctagaataataattataaaaaaactagttagtggacattgttctttagtgtttaaatctttcggatttaagtggtttacaaagttgattaatatgtttctatccttattctgaattattggtatttaaaaatagtgaatcaaagtttggcgagtcgtttgacattgggcgttagctaaggatggtataagacttgtgcttagtttattatcgcttgttgttcgaattgggctcgtttaagataaaatagtgtgggcatggtatttagtaccgtctcgacatctagtatttgtttttaagtgctattatgtgcctcgctgctaagtgtttaatttgttatcgtacaacattatttaggcttgtgttattcttgctcatatctattcatgtgcaccatgcatctcattaggtacgctagctgatcacgtgataccaaggaccagagctgagtcgaccacaagatgctgttaagcatgggtttcttcgaaaggtgatactgatgaatgaacttgaagattgggtgatcggatcaagcgccaggatgtgagatgctcgccaagtggacgtcatctaacaaacactaacctagtgttattccaggcaagccccggtgc

SEQ ID NO: 68538 - DNA, 895 bp, Zea Mays
ctattctcatcgagctcccaaatcccagccttatcttctcaagtggtatgcatatctctctgtcagccttatctctcgcttcctgtccacagcaagctgcgcccagcccgtggccatcggcctcttcttccccacatgctctccatgcttgagctcgccccttgtcagcttcagctcatgcccagggcctctgctcgccggacgccgtagcacatgcttcctgctcggcctccctggcgtgctgctccctcgccttggcgtccctgcgagctccttctccctcgcctgatttccagctcgggcctcgccggatgccgacgccgcttctctaacctagccttgacactaaatcgctgcagcacgccataccgtgtgtgttgcactgtcatcgttcgctatcctcatccttgccaattttcctcgtcgtttctcggctacaacctcgtcagctcctgcgcattgtgcacgtcttgtgttcgggtcgagccccaggattttgaggaaaaggaagctctagtgcatcaaccggtgaaataaataaactggtggtagtcatggtccttgcgaaatccgagatcagcatactatttaaattggatggtggagagtgaagtttcgtgcgtcgatcgcttgatatttggtgtattgcccaactcggaatcatcgtcgtatttgcggatctcgacttgagtacgctagctgatcacgtgataccaaggaccagagctgagtcgaccacaagatgctgttaagcatgggtttcttcgaaaggtgatactgatgaatgaacttgaagattgggtgatcggatcaagcgccaggatgtgagatgctcgccaagtggacgtcatctaacaaacactaacctagtgttattccaggcaagccccggtgc

SEQ ID NO: 68539 - DNA, 2193 bp, Zea Mays
cttttgggttggtataaacagagttgctttgccaagcattgaattttgtggactttgcactcttatcatttgcacttgataatttgacacttgatgtatcatgggcatttggttcatggggacacatgttagtgaaacaattgattagtcaatcatcatatccttgttctcttcaattatgacctatcttggcatggtactatgacttaaaagaggaacttggtaacttgtcgtcatgatttataatttggacagcacaatatcaatcactgaccatgatattagtagcaaagtttcagtgtaacacgtaactttttcagatacttttatttaaattttagcaattatcagtattttctttgttatttggggaagtttgtggagccacaaaatctttcacattgttttctcctttttattcctgcgactttgtgcctccagtatttttttcatggaaccatattttatcaacccatatccctaagccttgttcccttatactgcatcctgcatacatgcactatgttctgatgtagtgattggtttaatgccaaggaaaagattggcatggatgaagaacggccaatggcattataaagtttcagcaaaagatgaacttgtgcctggtgatattctctttctacctgttaacattcaagaatcttctgttaccgagaagaccaagaaatttggtaacaagaatgagattgattttctacgtgaccttgaaatctacaaggatagagccatcattgtgctcaacaaaccacctggaatgccagtacaagtccacaggcttgatagggattgcagtggcgtccttgttctgggaagaactcaatttagcgcttcccttatgcatgctatatttcgtgagaaaactgctgatgctttaggtgatggtactcaacaagtactgcaaagaaaatatgttgcacttgttattggaagacctaggcatcccaagggtttattgtcagcaccacttgcgaagaatcaaggaaacatgtttgacttgccattgggatatggtaaagcaatataatagtgttataggcacatgatggctggacaaatgggtcgctcggctgatgttcttatggaccatgcgactacacgtaattaggatgatcatcgagtaaataggaatagtaccacattgcttaccgcctctgaggctcaatccagttcatcaattctatgtcattctcgcttacaaaaagaatgcattggtgaattgtgccactagtaaccaactgctgcaacctctggctgttcagcacgccatacatcggattggctgtaaaatccatcttaaacttgtttggtgatgttttaggtctgcacactaacctctataaaagctctgtcgcccccatccattgctctgatgaagaaaggcaccaaatagacgaagtcttggcctgccacatcaaagagaggtggcaccgacggccaaggcaaaggcagacctctcggtgctgggaggaggttgtattacaagatggcaggtcagagcgtctgactgtttgcgctggttcaaatactgcttctgttcaagatgctttgacagagtaccgtgtgattgagtcttttcctcaagggtacacttggttagaactattccctcgaactggaaggaagcatcagctccgagtccattgtgcggaggttctgggaacacccatcgttggggattacaagtatggacgccaagcacaccagaactggatgcctctccccatgccacaaacaatcgacaaggaaatgctgaagaagaggaagcttccctttggtcttactttgggcggtggaagcgtagctgagcagcagcctcagctgcatctacactgcaagcagatgatccttcctgacatctcagcagctatgcaacagctgcggtcttcagatgctgaccacgatttctctgatctggagaagctgagctttgtcgcgccattgccattgcacatgcagttaagctggaagattttgttgtccgtaggcaagtagtgttgtcatttcttctttaggcatgcttgcttgctgtgctgtaataactttataactgcgaggtttgcgttaagacgtcgtagaaagcttaatttgggctgttggagcagcggacctctaatgaggtgaaagatgacatcacactcagaaacgatgttgataaatattttattgtttttt

SEQ ID NO: 68540 - DNA, 1515 bp, Zea Mays
gagagaggctcgatggcgatcaggatgccggcgctcatcttccgccgccgggcggccgccgcagctccaaagccgatacaacagtacctcgctggtctatccaccgcagtggagcacgttattccagaagataacggtcacattgccggtggggaggagaacaagaagcggtgggtggagcttcctcccttcgcaccactcgacgccaacgccaccgctcgagctatctctcggggagatggtggggaaggagcatgctccaatgccacggctatcaggtgggtccgacactgctgcccacacgtaccagcgtcgctggtccagaagctgttccgcctccgcaaggtgaagaagaatctggtgactgctgatacctcttcaacagacagtattactctgcaactccggttgagaagggtttcagcaaaagatgaacttgtgcctggtgatattctctttctacctgttaacattcaagaatcttctgttaccgagaagaccaagaaatttggtaacaagaatgagattgattttctacgtgaccttgaaatctacaaggatagagccatcattgtgctcaacaaaccacctggaatgccagtacaagtccacaggcttgatagggattgcagtggcgtccttgttctgggaagaactcaatttagcgcttcccttatgcatgctatatttcgtgagaaaactgctgatgctttaggtgatggtactcaacaagtactgcaaagaaaatatgttgcacttgttattggaagacctaggcatcccaagggtttattgtcagcaccacttgcgaaggttgtattacaagatggcaggtcagagcgtctgactgtttgcgctggttcaaatactgcttctgttcaagatgctttgacagagtaccgtgtgattgagtcttttcctcaagggtacacttggttagaactattccctcgaactggaaggaagcatcagctccgagtccattgtgcggaggttctgggaacacccatcgttggggattacaagtatggacgccaagcacaccagaactggatgcctctccccatgccacaaacaatcgacaaggaaatgctgaagaagaggaagcttccctttggtcttactttgggcggtggaagcgtagctgagcagcagcctcagctgcatctacactgcaagcagatgatccttcctgacatctcagcagctatgcaacagctgcggtcttcagatgctgaccacgatttctctgatctggagaagctgagctttgtcgcgccattgccattgcacatgcagttaagctggaagattttgttgtccgtaggcaagtagtgttgtcatttcttctttaggcatgcttgcttgctgtgctgtaataactttataactgcgaggtttgcgttaagacgtcgtagaaagcttaatttgggctgttggagcagcggacctctaatgaggtgaaagatgacatcacactcagaaacgatgttgataaatattttattgtttttt

SEQ ID NO: 68541 - DNA, 1468 bp, Zea Mays
gagagaggctcgatggcgatcaggatgccggcgctcatcttccgccgccgggcggccgccgcagctccaaagccgatacaacagtacctcgctggtctatccaccgcagtggagcacgttattccagaagataacggtcacattgccggtggggaggagaacaagaagcggtgggtggagcttcctcccttcgcaccactcgacgccaacgccaccgctcgagctatctctcggggagatggtggggaaggagcatgctccaatgccacggctatcaggtgggtccgacactgctgcccacacgtaccagcgtcgctggtccagaagctgttccgcctccgcaaggtgaagaagaatctggtgactgctgatacctcttcaacagacagtattactctgcaactccggttgagaagggtttcagcaaaagatgaacttgtgcctggtgatattctctttctacctgttaacattcaagaatcttctgttaccgagaagaccaagaaatttggtaacaagaatgagattgattttctacgtgaccttgaaatctacaaggatagagccatcattgtgctcaacaaaccacctggaatgccagtacaagtccacaggcttgatagggattgcagtggcgtccttgttctgggaagaactcaatttagcgcttcccttatgcatgctatatttcgtgagaaaactgctgatgctttaggtgatggtactcaacaagtactgcaaagaaaatatgttgcacttgttattggaagacctaggcatcccaagggtttattgtcagcaccacttgcgaaggttgtattacaagatggcaggtcagagcgtctgactgtttgcgctggttcaaatactgcttctgttcaagatgctttgacagagtaccgtgtgattgagtcttttcctcaagctccgagtccattgtgcggaggttctgggaacacccatcgttggggattacaagtatggacgccaagcacaccagaactggatgcctctccccatgccacaaacaatcgacaaggaaatgctgaagaagaggaagcttccctttggtcttactttgggcggtggaagcgtagctgagcagcagcctcagctgcatctacactgcaagcagatgatccttcctgacatctcagcagctatgcaacagctgcggtcttcagatgctgaccacgatttctctgatctggagaagctgagctttgtcgcgccattgccattgcacatgcagttaagctggaagattttgttgtccgtaggcaagtagtgttgtcatttcttctttaggcatgcttgcttgctgtgctgtaataactttataactgcgaggtttgcgttaagacgtcgtagaaagcttaatttgggctgttggagcagcggacctctaatgaggtgaaagatgacatcacactcagaaacgatgttgataaatattttattgtttttt

SEQ ID NO: 68542 - DNA, 1616 bp, Zea Mays
gagagaggctcgatggcgatcaggatgccggcgctcatcttccgccgccgggcggccgccgcagctccaaagccgatacaacagtacctcgctggtctatccaccgcagtggagcacgttattccagaagataacggtcacattgccggtggggaggagaacaagaagcggtgggtggagcttcctcccttcgcaccactcgacgccaacgccaccgctcgagctatctctcggggagatggtggggaaggagcatgctccaatgccacggctatcaggtgaagaagaatctggtgactgctgatacctcttcaacagacagtattactctgcaactccggttgagaagggtaatgaatgacgaataaatcagaaatacctgacattctgagttctaattttcacttatatgcttttacatagcattttttgtatcatatgtctagtttggaaattgggatacatcatacattgctggcatatgcacagttataagaaaatatgaaagtttgatattgtttgaaataaaataaatctgttatctgagttaagtataatttaaggggtgtgcttctgcagtgatttcttaaaatgttttatcatcttaaaacaaagtgattaaggtgcagcaatctgtgttccctacacgctaattttctgttacggatcctaaaaagatgcttataaccgattgtcactggcagatctagaaaggaataagtacttctgaaaaggccaccacattgctaaacagatccttgttcttttgggttggtataaacagagttgctttgccaagcattgaattttgtggactttgcactcttatcatttgcacttgataatttgacacttgatgtatcatgggcatttggttcatggggacacatgttagtgaaacaattgattagtcaatcatcatatccttgttctcttcaattatgacctatcttggcatggtactatgacttaaaagaggaacttggtaacttgtcgtcatgatttataatttggacagcacaatatcaatcactgaccatgatattagtagcaaagtttcagtgtaacacgtaactttttcagatacttttatttaaattttagcaattatcagtattttctttgttatttggggaagtttgtggagccacaaaatctttcacattgttttctcctttttattcctgcgactttgtgcctccagtatttttttcatggaaccatattttatcaacccatatccctaagccttgttcccttatactgcatcctgcatacatgcactatgttctgatgtagtgattggtttaatgccaaggaaaagattggcatggatgaagaacggccaatggcattataaatatgtgaccttgttttaactgcttcaaaggtttcagcaaaagatgaacttgtgcctggtgatattctctttctacctgttaacattcaagaatcttctgttaccgagaagaccaagaaatttggtaacaagaatgagattgattttctacgtgaccttgaaatctacaaggatagagccatcattgtgctcaacaaaccacctggaatgccagtacaaggtggtgttggcataaagaatagcattgatatactgg

SEQ ID NO: 68543 - DNA, 1587 bp, Zea Mays
gagagaggctcgatggcgatcaggatgccggcgctcatcttccgccgccgggcggccgccgcagctccaaagccgatacaacagtacctcgctggtctatccaccgcagtggagcacgttattccagaagataacggtcacattgccggtggggaggagaacaagaagcggtgggtggagcttcctcccttcgcaccactcgacgccaacgccaccgctcgagctatctctcggggagatggtggggaaggagcatgctccaatgccacggctatcaggtgaagaagaatctggtgactgctgatacctcttcaacagacagtattactctgcaactccggttgagaagggtaatgaatgacgaataaatcagaaatacctgacattctgagttctaattttcacttatatgcttttacatagcattttttgtatcatatgtctagtttggaaattgggatacatcatacattgctggcatatgcacagttataagaaaatatgaaagtttgatattgtttgaaataaaataaatctgttatctgagttaagtataatttaaggggtgtgcttctgcagtgatttcttaaaatgttttatcatcttaaaacaaagtgattaaggtgcagcaatctgtgttccctacacgctaattttctgttacggatcctaaaaagatgcttataaccgattgtcactggcagatctagaaaggaataagtacttctgaaaaggccaccacattgctaaacagatccttgttcttttgggttggtataaacagagttgctttgccaagcattgaattttgtggactttgcactcttatcatttgcacttgataatttgacacttgatgtatcatgggcatttggttcatggggacacatgttagtgaaacaattgattagtcaatcatcatatccttgttctcttcaattatgacctatcttggcatggtactatgacttaaaagaggaacttggtaacttgtcgtcatgatttataatttggacagcacaatatcaatcactgaccatgatattagtagcaaagtttcagtgtaacacgtaactttttcagatacttttatttaaattttagcaattatcagtattttctttgttatttggggaagtttgtggagccacaaaatctttcacattgttttctcctttttattcctgcgactttgtgcctccagtatttttttcatggaaccatattttatcaacccatatccctaagccttgttcccttatactgcatcctgcatacatgcactatgttctgatgtagtgattggtttaatgccaaggaaaagattggcatggatgaagaacggccaatggcattataaagtttcagcaaaagatgaacttgtgcctggtgatattctctttctacctgttaacattcaagaatcttctgttaccgagaagaccaagaaatttggtaacaagaatgagattgattttctacgtgaccttgaaatctacaaggatagagccatcattgtgctcaacaaaccacctggaatgccagtacaaggtggtgttggcataaagaatagcattgatatactgg

SEQ ID NO: 68544 - DNA, 643 bp, Zea Mays
gagagaggctcgatggcgatcaggatgccggcgctcatcttccgccgccgggcggccgccgcagctccaaagccgatacaacagtacctcgctggtctatccaccgcagtggagcacgttattccagaagataacggtcacattgccggtggggaggagaacaagaagcggtgggtggagcttcctcccttcgcaccactcgacgccaacgccaccgctcgagctatctctcggggagatggtggggaaggagcatgctccaatgccacggctatcaggtgggtccgacactgctgcccacacgtaccagcgtcgctggtccagaagctgttccgcctccgcaaggtgaagaagaatctggtgactgctgatacctcttcaacagacagtattactctgcaactccggttgagaagggtttcagcaaaagatgaacttgtgcctggtgatattctctttctacctgttaacattcaagaatcttctgttaccgagaagaccaagaaatttggtaacaagaatgagattgattttctacgtgaccttgaaatctacaaggatagagccatcattgtgctcaacaaaccacctggaatgccagtacaaggtggtgttggcataaagaatagcattgatatactgg

SEQ ID NO: 68545 - DNA, 819 bp, Zea Mays
ccgagttgggccatgggacatcgaggcccatcgcgtggtgagccggtgccgggtgttacaggtcaaaactgttgtttcaattcatctcggattgactattatttggagtatgaaccccatccgtcatcaacaaaaaatttgcggcatcttttccagatgatcaggaaaggcagcttcgcaaagtacgactatggatggtggggaaacctaaggcgctacggccagctgcgtcctccctcattcgatctaagcagcataccggaatcactgccgatatggatggggtatggaggccttgatgccctggctgacgtaacagacgttgagcgcaccatcaaagagctgagatccacgccagagctcttgtacattggtggttatggccacattgatttcatcatgagcgtcaaggcaaaggaagatgtttatgttgacttaatgaggtttctcagggcccagcagggaatgcacagtagctattaggacgcacgtcacgtacgccttcaaataaatgcttatgctatgatgacagtacgaccatgtaaatacggacacagcatagcatgtaaatacaaacagtctattgcattgcatgtaaagtggtgtgtggattgttctccatttgatgtactgctttctgagtacagtacacatgtacatcagtacatgtaacatgtgtatatgacaaaaatgtagcacatgcaacttggcttatttcgtgccgattgtgtgcttgcatttggggaggaaatcgagttgcaaatacataagactatctctagcaccttaggcatctctagcagcttaaccatcaccatt

SEQ ID NO: 68546 - DNA, 1208 bp, Zea Mays
acgacatggtggtggacttgggcgtcgatgctgggagcaagagctggcggatgcagcagcaccaacgttggcagcttttctgggattggagttggcaagaccttgctgaatacgacgttttggcaatgttaagctatgtatatacagttgcacagtccaaaattttgtatgtgggacattcacagggaactatcatgggtttggctgcgtttacaatgcctgaaacagtaaagatgataagctctgctgcgcttctttgtcccatttcttaccttgatcacgtcagtgctagttttgttcttagagcagttgccatgcatcttgatgagatgcttgttattatgggcatccatcagttgaacttccggagcgatatgggtgtacagatattagattcgctgtgcgatgatgaacatttggactgcaacgatctgttatcttcaataacaggtcaaaactgttgtttcaattcatctcggattgactattatttggagtatgaaccccatccgtcatcaacaaaaaatttgcggcatcttttccagatgatcaggaaaggcagcttcgcaaagtacgactatggatggtggggaaacctaaggcgctacggccagctgcgtcctccctcattcgatctaagcagcataccggaatcactgccgatatggatggggtatggaggccttgatgccctggctgacgtaacagacgttgagcgcaccatcaaagagctgagatccacgccagagctcttgtacattggtggttatggccacattgatttcatcatgagcgtcaaggcaaaggaagatgtttatgttgacttaatgaggtttctcagggcccagcagggaatgcacagtagctattaggacgcacgtcacgtacgccttcaaataaatgcttatgctatgatgacagtacgaccatgtaaatacggacacagcatagcatgtaaatacaaacagtctattgcattgcatgtaaagtggtgtgtggattgttctccatttgatgtactgctttctgagtacagtacacatgtacatcagtacatgtaacatgtgtatatgacaaaaatgtagcacatgcaacttggcttatttcgtgccgattgtgtgcttgcatttggggaggaaatcgagttgcaaatacataagactatctctagcaccttaggcatctctagcagcttaaccatcaccatt

SEQ ID NO: 68547 - DNA, 1571 bp, Zea Mays
gcttactagattgattgcattatggttcaaacggatgatggctttcttttgtctcttcagcatattccacatggcagaaatggaattgcagataatactggacctccagtttttcttcagcacggtcttttccagggtggagatacatggttcataaactccaatgaacaatcacttggatatatccttgctgacaatggttttgatgtttgggtcggaaatgttcgtggcacacgttggagtaaaggccactctactctctctgttcatgataagcttttctgggattggagttggcaagaccttgctgaatacgacgttttggcaatgttaagctatgtatatacagttgcacagtccaaaattttgtatgtgggacattcacagggaactatcatgggtttggctgcgtttacaatgcctgaaacagtaaagatgataagctctgctgcgcttctttgtcccatttcttaccttgatcacgtcagtgctagttttgttcttagagcagttgccatgcatcttgatgaggtaatatagcattcctaaacaaatccaccaaataaatgtccataacttgtgaatcaagtatggtgcccttttaccacagatgcttgttattatgggcatccatcagttgaacttccggaggtaaattgacacttctttgcccgactttccttttttttccttgggtgtaattataataatttttaagttactccttgagcagcgatatgggtgtacagatattagattcgctgtgcgatgatgaacatttggactgcaacgatctgttatcttcaataacaggtcaaaactgttgtttcaattcatctcggattgactattatttggagtatgaaccccatccgtcatcaacaaaaaatttgcggcatcttttccagatgatcaggaaaggcagcttcgcaaagtacgactatggatggtggggaaacctaaggcgctacggccagctgcgtcctccctcattcgatctaagcagcataccggaatcactgccgatatggatggggtatggaggccttgatgccctggctgacgtaacagacgttgagcgcaccatcaaagagctgagatccacgccagagctcttgtacattggtggttatggccacattgatttcatcatgagcgtcaaggcaaaggaagatgtttatgttgacttaatgaggtttctcagggcccagcagggaatgcacagtagctattaggacgcacgtcacgtacgccttcaaataaatgcttatgctatgatgacagtacgaccatgtaaatacggacacagcatagcatgtaaatacaaacagtctattgcattgcatgtaaagtggtgtgtggattgttctccatttgatgtactgctttctgagtacagtacacatgtacatcagtacatgtaacatgtgtatatgacaaaaatgtagcacatgcaacttggcttatttcgtgccgattgtgtgcttgcatttggggaggaaatcgagttgcaaatacataagactatctctagcaccttaggcatctctagcagcttaaccatcaccatt

SEQ ID NO: 68548 - DNA, 516 bp, Zea Mays
gaaatatcgggtatgcatgcacttgggttgcgtctggtcggacgggtgcatctaaatccgaacccccccgctcttggtcagagggggagtaaagcaaacaacggcggacatggtgcgcccaggaaaagcgcttgcggcgccccagctcctcctcctcgtgttcctctgccagcagctgctcctgccgcagggttacccgtgcaccgagcacaccgttcaaacggatgatggctttcttttgtctcttcagcatattccacatggcagaaatggaattgcagataatactggacctccagtttttcttcagcacggtcttttccagggtggagatacatggttcataaactccaatgaacaatcacttggatatatccttgctgacaatggttttgatgtttgggtcggaaatgttcgtggcacacgttggagtaaaggccactctactctctctgttcatgataagaccaagtcggctcccctcggctcctctcacgtcgacccactaccccagcc

SEQ ID NO: 68549 - DNA, 1294 bp, Zea Mays
tgcttagtactatttagcgggtttaaagtacacacggatctctagatatcacctgaggcatctgcgtccggtagaacaccctgggcactgcatgcccacgagcccggactttgtccatgactccggaccagaactgtgctgcgaaatccgcagcctgcgcgtagatgcggacgctggtccagtagcagccatcgtgcaggcgagagttcaggaccatgacgtctggaacacgatcaccggacatgaagtaggaccggatgagctgccggaaacctctgttccggagggaatgcaagccgagatagttcatgctcatgttccagtggccgttgaagatgcttgtgatccttagagtccctgccccaccaatgggattggtgaacactgcatcaaactggcgtgtcacagcagacgtgtccgtgatgccgaggacgaaggtgaggaggttccggatggtgtcgacgtggttagagtcgccccagaagaagagccacttcccgtcaaggcaccaccacgacgcatcggccacaaagagcttgaaggagcagtgcgccgagtacacccacccgttgctctccagcgcgccgagcggcccgtcgcaccacggtgccttgcacgggtggtccaactccaagcaccggtaccgccccgctgcgtctgacgcccaaccaccggatacggtcaccagatgccaatgggaaatttctaggatccggctgggttctaggattcggctgggttctgtgccaggtaccttgctggtgaatagatagaagatgcgacacaagctgcggaggaagggggcagatccgaggattttaggaagatgttgggatggggtgctggatccgcttcgagcatggcaacggttaccgcagcaggccaggcgggcaccgcggaggccgaggtcgagaaggcggagtagtacctggcgccgcgtgtcgcggggagcgaggcgaggatggcggggcgacaccttccatcgatggagcgcgggcgcgatgatggcgggagcggcgatggaggatccctggaagggcgcgacggagagcagggcgggcggggcatggtgcaccaggggagaggtcgctcgcgcgagggcacacgggggcacaactccatggagagggcggacgcggagagagcctagcgcggcgatccagggcggaggatgtcacggacgcgggatctggacgcggattgcgggagagagcgacgattgcgggagacaggcgggggcggttgccgcggggcgagcatgcagaaccgtgctgaatgtgaacgtttacaatag

SEQ ID NO: 68550 - DNA, 1235 bp, Zea Mays
atctcgtatatgtatatcatgtgccaagtacatggaccctgttgtgagcaacgaagaaggagcatggttcattaaaaataagttcataatggatagaaattaatttagatcaatgacatctaatgaactcataattgcataacaagatggagagagggatgtagagatagactgaaaaataatatctttataaattcttttgaagatgaaaggcctagtgaggcctagtgagaccgaagatgaaagttttggctaatcgctaattgcaattgaagtaaccttgtactggatcttacttttaaaatctagccctataggacttcatcgagtgtgactgcaagctagcgctctcttaactccaatataatagactgcacctgcacataccttgtatttcaattatttccatttcaactgcaatatgtatagatactgtcatgtgggggaaaatatgccttcccatctttcattgtgtacccaagaacaacaaatgcagtcgattttcctgcagaattctttcgaaagcacaaagaacccctctatataagcatcaatttcatcagacatgacttaaaccaccaccacgaactacatttgctacttcttcaattagtacaaaacctaggagcatgacactcgtgcaccaaacttgatcaattcactgagcaaaatattatataatgaagctaaattcgtaacgaaaagaaatttaatttgatgcgagcaaagctttgatggagagtgaaggaagatagggagcgacccttgaaggtgggcgcagagggtagagttttagcttttctttctagagttggtcaacaaaacaacaataaggttgtttccaatctgccttgaggtcaacagatctggaatcacaaaatctgtaataaaatagaggatcaaaaacttacttctgataagtataagacttttccaaataaaatggaggctgagctgcttgcttccttgtgctatacaggttaaacttccttgtgcttccttccttgtgttgtctactaacaaaatctgtaataaaatggaggctgttaacacaagcatccatggcattaacaccatagtttgttaggaaaattaaacagaaacatggtcaaaaaaatgaaatcaaaatggtatggacaggctaagaataacctaaatggtatgggcatgaactcggtacttacccattttatactttttaggtcaaaatccttagcccttggtttaggatgaag

SEQ ID NO: 68551 - DNA, 910 bp, Zea Mays
agaaaggtttgtaatattcatataatgcaggatataaattagtttagtacaaaagacaactaaaagactacatgataaaacatataaccctaagtatgtagatcataaatgcaatcaaggcacaatgtatatagagagtcatgtatatttttttcacttagcccccatagacccctcaaaagacccctcatttaattgggttgtatattccctaaaatcacatttgttaaggatgagaggagaatggtttcaaataaagggaacactagtacaatgcacatgcattgtgatgtaattattcgagcggggcttactcctacttgtttgggtccacgacaggatatcgttgttgttttgcactatatttgatgagtgactttgacaatctatcctattcctctcatttcaatcgtagaatcggtcatatggacaatgatgaagtagctagctaagagattgatgaatgatgagaaactaaatagtctccttgtctttctcacctacaatcaatctacacaaagctaattttgtggtggcgacgacgacgagcctcttgtcatctcgtccgccactatcatgaggtcctcctcatactccgcctcctccctcgtcacctcctgtagcaatgggctctcgttacaactctacaccgcgatgcacaccatgtcgcggtcatgcctcctccctcaccacctcctgcagcagcgggtgctcgcctcggctctgcactacgatgcacgccacgtcatgaccgtgctccagctcatcctacacgccgcaccatgcggctaaccatgtccaggtccaacacacaatgcaggcatcacgcatggcgacatcgggagagacgtgagggagaggaactgacctactcacttcacgcgtgacacatgactacggtggaaacggt

SEQ ID NO: 68552 - DNA, 2576 bp, Zea Mays
cactgacagattggagcagcagcaaccggcaggcgcggaaggtgcagcggagataagtagtgtgattcaggtttggaccggaccataccaggctgaggcccattaatgatgcaatttgctgggcttctttattttctccgtgcttccatcctcttctccgtcggcggggagaagtgaaatgccgtggagatgggcggcggcggcggcgacgagaaagctcaccgggatctctcagtcgcgagtttcagtagcctttaccggccgtcttctctaccgctcgttcggaagcgactccagtgaaagccgcaagaggtcactgccacggggggtcgtatcgatcggggccatcagccttgctggaggtctcgtgctcagcgccgtcaacgacctcgccatcttcaatggatgcacaacgcaattgagcatgctgctgacaaccctgctgttgtggaagcaattggagtgcctatagtcagaggaccgtggtatgatgcttctcttgagaggatggtctgctttcgtttctgcggcatcacgactggaagatcctattgctggaggctcatcttgaagcaccatcagatgatgaggaccagagaaagctggttaaggtgaatcttgcaagcagtggccgtggggaagatggcgatccagagagtggttaatcttttgtactgaattccatggtgagtggaagatcgtgtcatctgaatggactccaaatattaaatgacacgtagatctagggaagcagatgttttttgctccaaaaatagcagcagggacggcagcaacctgcaagcacgcgggcaatatgctatttgtggccacattggcccagttttggcgttttggcgggtgcgtatggtcgcaacatgacaaccggatcatttgtgtttgttgttgccgccgctgcttctcccgttgccaagcctccatccaattggatagtcgcttcgtgcggtcccgtcccctcgccggccggcggagctcacggcttgccgctgcattgccatcgtgtcacttgtacacaatccaccaatctgattggattcggggggatgcttgggcaaattcgagaatttgctcaggcattcgttccgattgcggctagctagctgatcgcttaatcactcgacacgggcaaatttgcacggcgacgacgatgggcatcttgtgttgtttccagtcccacaccagcgatcacgctgttgcttcgtccccggctacctcttcgtcctctgccccctcgtcgtgccgaaacaacgatcgccgtgctccccccgagcggcaggcccccggcgaggagaagagcaggaggaggaacgacagcgtcgacaacagcaacctggtcgacctcgtcaacgacatcgtcgccgagtcagtgagctaccgtcacaggcgtgtggccgaggatatcctcaagatggaaaaggcgggcaaggtcacggcgcgcgccttcacgtacgccgagctgtccgaggccacgggcggcttccggccggagtcgctgctgggcgagggcgggttcggccccgtgtacaggggccgcctggggtcgtcgtcgggcccggaggtggccgtcaagcagctggaccgcaacggcatgcagggcacgcgcgagttcctggtggaggctctcatgctcagcctgctcaagcactccaacctggtgacgctgctgggcttctgtaccgacgccgaccaccgcatgctcatctacgagtacatgccgctgggctccctggaggaccacctgctggacctgcccccgggtcgcgcgccgctcgactgggcgacgcgcatgcgtgtcgcgcagggcgccgcgcgcggccttgagtacctgcacgacaccgcgcggccgcccgtgatctaccgcgacttcaaggcctccaacatcctgctcgacaccggcttccgcgcccgcctctccgacttcgggctcgccaaggtcggccccgtcggcgacaagtcccacgtttccacgcgcgtcatgggcacctacggctactgcgccccggagtacgcgctcacgggcaagctcaccaccatgtccgacgtctacagcttcggcgtcgtcttcctcgagatcatcaccggaagccgcgccatcgacaccaccaggccgccagagaagcacaacctcgtcctctgggccgccccacggttcaaggacaagcgacggttcgccgagatggccgacccgctgctcaagggcgcctaccccaccaaaggcctctaccaggcgctcgccatcgcagccatgtgcctccaggaggatgccaccatgcgccccgccatcagcgacgtcgtcaccgcactcgactacctcacggtcgcaggcggaggcgccgctgccaacgaaccaccggctcccaatcccaaccagcagcagcaacaaacagacattatcggccacgccggcgagcaagcgtaacatcatgtctcatcgaaaattgttaattaagcgcagcgtgcattcatacatataatgtgataatgttgcgcgtctcccatcgatcgatgaaaggaggacttgtcataacaaactataacgcgtattgattgttacaaac

SEQ ID NO: 68553 - DNA, 2554 bp, Zea Mays
cactgacagattggagcagcagcaaccggcaggcgcggaaggtgcagcggagataagtagtgtgattcagtgaaatgccgtggagatgggcggcggcggcggcgacgagaaagctcaccgggatctctcagtcgcgagtttcagtagcctttaccggccgtcttctctaccgctcgttcggaagcgactccagtgaaagccgcaagaggtcactgccacggggggtcgtatcgatcggggccatcagccttgctggaggtctcgtgctcagcgccgtcaacgacctcgccatcttcaatggatgcacaacgaaggcaattgagcatgctgctgacaaccctgctgttgtggaagcaattggagtgcctatagtcagaggaccgtggtatgatgcttctcttgaggtgggccatcgacggcggtctgtgtcatgcacattccctgtatctgggccacatgggtcaggatttctccagattaagaggatggtctgctttcgtttctgcggcatcacgactggaagatcctattgctggaggctcatcttgaagcaccatcagatgatgaggaccagagaaagctggttaaggtgaatcttgcaagcagtggccgtggggaagatggcgatccagagagtggttaatcttttgtactgaattccatggtgagtggaagatcgtgtcatctgaatggactccaaatattaaatgacacgtagatctagggaagcagatgttttttgctccaaaaatagcagcagggacggcagcaacctgcaagcacgcgggcaatatgctatttgtggccacattggcccagttttggcgttttggcgggtgcgtatggtcgcaacatgacaaccggatcatttgtgtttgttgttgccgccgctgcttctcccgttgccaagcctccatccaattggatagtcgcttcgtgcggtcccgtcccctcgccggccggcggagctcacggcttgccgctgcattgccatcgtgtcacttgtacacaatccaccaatctgattggattcggggggatgcttgggcaaattcgagaatttgctcaggcattcgttccgattgcggctagctagctgatcgcttaatcactcgacacgggcaaatttgcacggcgacgacgatgggcatcttgtgttgtttccagtcccacaccagcgatcacgctgttgcttcgtccccggctacctcttcgtcctctgccccctcgtcgtgccgaaacaacgatcgccgtgctccccccgagcggcaggcccccggcgaggagaagagcaggaggaggaacgacagcgtcgacaacagcaacctggtcgacctcgtcaacgacatcgtcgccgagtcagtgagctaccgtcacaggcgtgtggccgaggatatcctcaagatggaaaaggcgggcaaggtcacggcgcgcgccttcacgtacgccgagctgtccgaggccacgggcggcttccggccggagtcgctgctgggcgagggcgggttcggccccgtgtacaggggccgcctggggtcgtcgtcgggcccggaggtggccgtcaagcagctggaccgcaacggcatgcagggcacgcgcgagttcctggtggaggctctcatgctcagcctgctcaagcactccaacctggtgacgctgctgggcttctgtaccgacgccgaccaccgcatgctcatctacgagtacatgccgctgggctccctggaggaccacctgctggacctgcccccgggtcgcgcgccgctcgactgggcgacgcgcatgcgtgtcgcgcagggcgccgcgcgcggccttgagtacctgcacgacaccgcgcggccgcccgtgatctaccgcgacttcaaggcctccaacatcctgctcgacaccggcttccgcgcccgcctctccgacttcgggctcgccaaggtcggccccgtcggcgacaagtcccacgtttccacgcgcgtcatgggcacctacggctactgcgccccggagtacgcgctcacgggcaagctcaccaccatgtccgacgtctacagcttcggcgtcgtcttcctcgagatcatcaccggaagccgcgccatcgacaccaccaggccgccagagaagcacaacctcgtcctctgggccgccccacggttcaaggacaagcgacggttcgccgagatggccgacccgctgctcaagggcgcctaccccaccaaaggcctctaccaggcgctcgccatcgcagccatgtgcctccaggaggatgccaccatgcgccccgccatcagcgacgtcgtcaccgcactcgactacctcacggtcgcaggcggaggcgccgctgccaacgaaccaccggctcccaatcccaaccagcagcagcaacaaacagacattatcggccacgccggcgagcaagcgtaacatcatgtctcatcgaaaattgttaattaagcgcagcgtgcattcatacatataatgtgataatgttgcgcgtctcccatcgatcgatgaaaggaggacttgtcataacaaactataacgcgtattgattgttacaaac

SEQ ID NO: 68554 - DNA, 2694 bp, Zea Mays
ctgagttttgacgtcgtcgacgtcatcagcatcacctagcgtcgaagcggcgtcgcatcagtgtagaggaggatggggaggagaagagatcgaagcggccgtggacgcagcgcgaggaggcagcaaagcaggttgggctgaggggtagcgcgggcgaccactgacagattggagcagcagcaaccggcaggcgcggaaggtgcagcggagataagtagtgtgattcagtgaaatgccgtggagatgggcggcggcggcggcgacgagaaagctcaccgggatctctcagtcgcgagtttcagtagcctttaccggccgtcttctctaccgctcgttcggaagcgactccagtgaaagccgcaagaggtcactgccacggggggtctcgtgctcagcgccgtcaacgacctcgccatcttcaatggatgcacaacgaaggcaattgagcatgctgctgacaaccctgctgttgtggaagcaattggagtgcctatagtcagaggaccgtggtatgatgcttctcttgaggtgggccatcgacggcggtctgtgtcatgcacattccctgtatctgggccacatgggtcaggatttctccagattaaggcaacccgagatggagaggatggtctgctttcgtttctgcggcatcacgactggaagatcctattgctggaggctcatcttgaagcaccatcagatgatgaggaccagagaaagctggttaaggtgaatcttgcaagcagtggccgtggggaagatggcgatccagagagtggttaatcttttgtactgaattccatggtgagtggaagatcgtgtcatctgaatggactccaaatattaaatgacacgtagatctagggaagcagatgttttttgctccaaaaatagcagcagggacggcagcaacctgcaagcacgcgggcaatatgctatttgtggccacattggcccagttttggcgttttggcgggtgcgtatggtcgcaacatgacaaccggatcatttgtgtttgttgttgccgccgctgcttctcccgttgccaagcctccatccaattggatagtcgcttcgtgcggtcccgtcccctcgccggccggcggagctcacggcttgccgctgcattgccatcgtgtcacttgtacacaatccaccaatctgattggattcggggggatgcttgggcaaattcgagaatttgctcaggcattcgttccgattgcggctagctagctgatcgcttaatcactcgacacgggcaaatttgcacggcgacgacgatgggcatcttgtgttgtttccagtcccacaccagcgatcacgctgttgcttcgtccccggctacctcttcgtcctctgccccctcgtcgtgccgaaacaacgatcgccgtgctccccccgagcggcaggcccccggcgaggagaagagcaggaggaggaacgacagcgtcgacaacagcaacctggtcgacctcgtcaacgacatcgtcgccgagtcagtgagctaccgtcacaggcgtgtggccgaggatatcctcaagatggaaaaggcgggcaaggtcacggcgcgcgccttcacgtacgccgagctgtccgaggccacgggcggcttccggccggagtcgctgctgggcgagggcgggttcggccccgtgtacaggggccgcctggggtcgtcgtcgggcccggaggtggccgtcaagcagctggaccgcaacggcatgcagggcacgcgcgagttcctggtggaggctctcatgctcagcctgctcaagcactccaacctggtgacgctgctgggcttctgtaccgacgccgaccaccgcatgctcatctacgagtacatgccgctgggctccctggaggaccacctgctggacctgcccccgggtcgcgcgccgctcgactgggcgacgcgcatgcgtgtcgcgcagggcgccgcgcgcggccttgagtacctgcacgacaccgcgcggccgcccgtgatctaccgcgacttcaaggcctccaacatcctgctcgacaccggcttccgcgcccgcctctccgacttcgggctcgccaaggtcggccccgtcggcgacaagtcccacgtttccacgcgcgtcatgggcacctacggctactgcgccccggagtacgcgctcacgggcaagctcaccaccatgtccgacgtctacagcttcggcgtcgtcttcctcgagatcatcaccggaagccgcgccatcgacaccaccaggccgccagagaagcacaacctcgtcctctgggccgccccacggttcaaggacaagcgacggttcgccgagatggccgacccgctgctcaagggcgcctaccccaccaaaggcctctaccaggcgctcgccatcgcagccatgtgcctccaggaggatgccaccatgcgccccgccatcagcgacgtcgtcaccgcactcgactacctcacggtcgcaggcggaggcgccgctgccaacgaaccaccggctcccaatcccaaccagcagcagcaacaaacagacattatcggccacgccggcgagcaagcgtaacatcatgtctcatcgaaaattgttaattaagcgcagcgtgcattcatacatataatgtgataatgttgcgcgtctcccatcgatcgatgaaaggaggacttgtcataacaaactataacgcgtattgattgttacaaac

SEQ ID NO: 68555 - DNA, 2335 bp, Zea Mays
taacaatagactggagatgcagatgagggaagcaggttaggaattacaactgtagtttccacagattcgatacgtcacatgatgcgaagctttgttgaagagaataaaaaccctcttctctcggcatcaacttatcatgcaggtgaatgtcttgacccagtagcagttgctgaagcaaaagctaggagtaaagtaaaaaaacgctcaggcgtatcaagcaactcaaatattgattatgcgaaaagtggggctcttaccgaaaaagttgatgggaaatcaatcgggaagaagcaaatggccatcgaaggttataaagcacagagcgagatggtgattgattttgattgatagtttggaacggttaattactgcatgggaggacagaaaagaatcagttgttgtcgaggttgttcacttagccttaattttgtgatgggtctaatgaggaaacatccttcgataatacctttcatgatctacatatctaatgagagtaagcacacagagaggtttgctgtacgtgcgaagtacatgacacttgacccatcgaaaaatatgttaaatacatcagcaacattagaactatccaggagtacctttgcagtagagctgacaagtacctagttcccaaggtcaacaacactaatgttgatcagagtgtggcttcgatccatgccactgtctttagctgcctccgtaggcgaggtaatggagataagttatatgatcctgaagcaaatactgttgctattataaatgaagagtacaaaaaccaatgtgtggctaattccatgagttccaaggggatgtttaaattgatccaacggcttggatcttgaagaaagctcatggccatcattaatgttgatggttgtgtttctaaggcctggccagttgagtccagtggagatggaaaacgcagttctgacaacagtaataagaatccaatttatggacctctcaatatttgcagagcagagtcagtcaatctgcagtttggcacctttgggataagtgcctgccctactgatacgggctgtacaagtgaagctggaaatgccgatgaatcatatgcaaatgctgctgaaggcagtagcagacatgttctttcttcgtctggttctccgaagaagtcggatggtcattgtaaagagatcaaagagtcgtcagcagcatattgcagcgatgaagtagaggaagaagaagctgatgtacggcctaattcagggagtgatgaggacctaagtgaagaagacaacagggaggtcgatgatgaggtgagatgaagtcttttcttggattattacatgctttttgtttttttattttaaacagtcggtaaaaggattcactcatgtagttgcttcactgcactctatgctccgaatcccatcgtaagcatattcgtggatgtctgcatgacatatggaagggtctgtcgatgaggacggcaacaggtccgatgagaaatatgacgacctggccatgctggacagtttggagaacggctgtttaactgacgatggcgtgttttattctggtttaagcaaaccttcaagcagcaagttctttagtcgcaatcaacgaagccacagcatgccaaagaaacacaagagaagttaggtactggtgttcctgagacggcacactcttctgctgctgcaatcgctgtcggtacaagcatcaagcggcatgccgctaggaagtggaagcgctcgctgagtgactcaatcccgttcgcggccacggagtgctccggaattggtgtcagtatgcaagggatcgccgcccgtgcctgggctccagatgagaggtagctgatgcggtgatgcctgatgagctgcacaagacatactgtcattttttcgagcataaattgcaaaaaggaaatacgaatattatttccgtggcaccatggatgcgaaaaaggtcctcaaggcataaaacaccttcgataaaacagtacaagggcaggtgtaacatgaaaatataagttgaagctacgattgaaggagcttcgacatgatggcatgctaaagacgaaggacgataccgacttaaagaggaaaatactgtgtagttcctaatgatctgtactgtaaatgtaattagttgttagggacatggatgtaattttgtccgggctgcgtcccgtacctataaatagatgaacaatacctccgtactgttcaggctggattgtaatcattcttgcgttactcctgctcttccaccttctgtcaaaccaaatgtacaaatgtaatatatatactattgatgtttacacatgtttataaaataagaatataaataatctaatgattcaaaatgattg

SEQ ID NO: 68556 - DNA, 2076 bp, Zea Mays
atggcgtcggcgaagctgctctacattgtggtggttgacgaagacgcctcctccttccgatacacgcgctccctcctccacagcaccctccagctgatgggatgcaagcgacgccacgccttcgaggtccggtgtaaggtgttcgatgtcatccggggtgaccaacagggcctcggcgacacggccacctccgcccgggtgcggaggtacgaggtcgccgaagcaaccccgaccacaagttcccgtcagttccagttcgagctatacaagcgccggaccaccgtcctcctccccagggacctcttcctcgacctcgtcctcgacctcgacgccctcgccctctacaagttcgtcgcccccaaccagcgcaccgatctcatgctcgcctgcagggaagcaggttaggaattacaactgtagtttccacagattcgatacgtcacatgatgcgaagctttgttgaagagaataaaaaccctcttctctcggcatcaacttatcatgcaggtgaatgtcttgacccagtagcagttgctgaagcaaaagctaggagtaaagtaaaaaaacgctcaggcgtatcaagcaactcaaatattgattatgcgaaaagtggggctcttaccgaaaaagttgatgggaaatcaatcgggaagaagcaaatggccatcgaaggttataaagcacagagcgagatggtgattgattttgattgatagtttggaacggttaattactgcatgggaggacagaaaagaatcagttgttgtcgaggttgttcacttagccttaattttgtgagcagagtcagtcaatctgcagtttggcacctttgggataagtgcctgccctactgatacgggctgtacaagtgaagctggaaatgccgatgaatcatatgcaaatgctgctgaaggcagtagcagacatgttctttcttcgtctggttctccgaagaagtcggatggtcattgtaaagagatcaaagagtcgtcagcagcatattgcagcgatgaagtagaggaagaagaagctgatgtacggcctaattcagggagtgatgaggacctaagtgaagaagacaacagggaggtcgatgatgagttgcttcactgcactctatgctccgaatcccatcgtaagcatattcgtggatgtctgcatgacatatggaagggtctgtcgatgaggacggcaacaggtccgatgagaaatatgacgacctggccatgctggacagtttggagaacggctgtttaactgacgatggcgtgttttattctggtttaagcaaaccttcaagcagcaagttctttagtcgcaatcaacgaagccacagcatgccaaagaaacacaagagaagttaggtactggtgttcctgagacggcacactcttctgctgctgcaatcgctgtcggtacaagcatcaagcggcatgccgctaggaagtggaagcgctcgctgagtgactcaatcccgttcgcggccacggagtgctccggaattggtgtcagtatgcaagggatcgccgcccgtgcctgggctccagatgagaggtagctgatgcggtgatgcctgatgagctgcacaagacatactgtcattttttcgagcataaattgcaaaaaggaaatacgaatattatttccgtggcaccatggatgcgaaaaaggtcctcaaggcataaaacaccttcgataaaacagtacaagggcaggtgtaacatgaaaatataagttgaagctacgattgaaggagcttcgacatgatggcatgctaaagacgaaggacgataccgacttaaagaggaaaatactgtgtagttcctaatgatctgtactgtaaatgtaattagttgttagggacatggatgtaattttgtccgggctgcgtcccgtacctataaatagatgaacaatacctccgtactgttcaggctggattgtaatcattcttgcgttactcctgctcttccaccttctgtcaaaccaaatgtacaaatgtaatatatatactattgatgtttacacatgtttataaaataagaatataaataatctaatgattcaaaatgattg

SEQ ID NO: 68557 - DNA, 3164 bp, Zea Mays
cggcgatctccagccacggcacacatgacatggcgtcggcgaagctgctctacattgtggtggttgacgaagacgcctcctccttccgatacacgcgctccctcctccacagcaccctccagctgatgggatgcaagcgacgccacgccttcgagatcagccgcagggtgtaaggtgttcgatgtcatccggggtgaccaacagggcctcggcgacacggccacctccgcccgggtgcggaggtacgaggtcgccgaagcaaccccgaccacaagttcccgtcagttccagttcgagctatacaagcgccggaccaccgtcctcctccccagggacctcttcctcgacctcgtcctcgacctcgacgccctcgccctctacaagttcgtcgcccccaaccagcgcaccgatctcatgctcgcctgcaggattcgtgaacgaaaggaatctatcacagttctttgcggaactagtggcaagtctactctttctatgttgctgggaagcaggttaggaattacaactgtagtttccacagattcgatacgtcacatgatgcgaagctttgttgaagagaataaaaaccctcttctctcggcatcaacttatcatgcaggtgaatgtcttgacccagtagcagttgctgaagcaaaagctaggagtaaagtaaaaaaacgctcaggcgtatcaagcaactcaaatattgattatgcgaaaagtggggctcttaccgaaaaagttgatgggaaatcaatcgggaagaagcaaatggccatcgaaggttataaagcacagagcgagatggtgattgattttgattgatagtttggaacggttaattactgcatgggaggacagaaaagaatcagttgttgtcgaggttgttcacttagccttaattttgtggtatgtgcttccaaaaaactattcatttgcacatctttcctttcatttcagctattattattttttagatcatatcagacccactatgaagtgtagatttggtgcgtggtaagagttgtctcactgagtcaccaggtcacgggttcgaatcaacctctccacatttgcttggggaaggcttacctcggtttatctttaccctagacttcactcatgtgggagcctctgccactgggtgtgcctatctgccatatcagagccactatattgcatttgttttgctaataaaggtggagttgtaactttcattgtttacatgcccactttattccacatttcgttttaattatttcagatgggtctaatgaggaaacatccttcgataatacctttcatgatctacatatctaatgagagtaagcacacagagaggtttgctgtacgtgcgaagtacatgacacttgacccatcgaaaaatatgttaaatacatcagcaacattagaactatccaggagtacctttgcagtagagctgacaagtacctagttcccaaggtcaacaacactaatgttgatcagagtgtggcttcgatccatgccactgtctttagctgcctccgtaggcgaggtaatggagataagttatatgatcctgaagcaaatactgttgctattataaatgaagagtacaaaaaccaatgtgtggctaattccatgagttccaaggggatgtttaaattgatccaacggcttggatcttgaagaaagctcatggccatcattaatgttgatggttgtgtttctaaggcctggccagttgagtccagtggagatggaaaacgcagttctgacaacagtaataagaatccaatttatggacctctcaatatttgcagagcagagtcagtcaatctgcagtttggcacctttgggataagtgcctgccctactgatacgggctgtacaagtgaagctggaaatgccgatgaatcatatgcaaatgctgctgaaggcagtagcagacatgttctttcttcgtctggttctccgaagaagtcggatggtcattgtaaagagatcaaagagtcgtcagcagcatattgcagcgatgaagtagaggaagaagaagctgatgtacggcctaattcagggagtgatgaggacctaagtgaagaagacaacagggaggtcgatgatgaggtgagatgaagtcttttcttggattattacatgctttttgtttttttattttaaacagtcggtaaaaggattcactcatgtagttgcttcactgcactctatgctccgaatcccatcgtaagcatattcgtggatgtctgcatgacatatggaagggtctgtcgatgaggacggcaacaggtccgatgagaaatatgacgacctggccatgctggacagtttggagaacggctgtttaactgacgatggcgtgttttattctggtttaagcaaaccttcaagcagcaagttctttagtcgcaatcaacgaagccacagcatgccaaagaaacacaagagaagttaggtactggtgttcctgagacggcacactcttctgctgctgcaatcgctgtcggtacaagcatcaagcggcatgccgctaggaagtggaagcgctcgctgagtgactcaatcccgttcgcggccacggagtgctccggaattggtgtcagtatgcaagggatcgccgcccgtgcctgggctccagatgagaggtagctgatgcggtgatgcctgatgagctgcacaagacatactgtcattttttcgagcataaattgcaaaaaggaaatacgaatattatttccgtggcaccatggatgcgaaaaaggtcctcaaggcataaaacaccttcgataaaacagtacaagggcaggtgtaacatgaaaatataagttgaagctacgattgaaggagcttcgacatgatggcatgctaaagacgaaggacgataccgacttaaagaggaaaatactgtgtagttcctaatgatctgtactgtaaatgtaattagttgttagggacatggatgtaattttgtccgggctgcgtcccgtacctataaatagatgaacaatacctccgtactgttcaggctggattgtaatcattcttgcgttactcctgctcttccaccttctgtcaaaccaaatgtacaaatgtaatatatatactattgatgtttacacatgtttataaaataagaatataaataatctaatgattcaaaatgattg

SEQ ID NO: 68558 - DNA, 2150 bp, Zea Mays
cggcgatctccagccacggcacacatgacatggcgtcggcgaagctgctctacattgtggtggttgacgaagacgcctcctccttccgatacacgcgctccctcctccacagcaccctccagctgatgggatgcaagcgacgccacgccttcgaggtccggtgtaaggtgttcgatgtcatccggggtgaccaacagggcctcggcgacacggccacctccgcccgggtgcggaggtacgaggtcgccgaagcaaccccgaccacaagttcccgtcagttccagttcgagctatacaagcgccggaccaccgtcctcctccccagggacctcttcctcgacctcgtcctcgacctcgacgccctcgccctctacaagttcgtcgcccccaaccagcgcaccgatctcatgctcgcctgcaggattcgtgaacgaaaggaatctatcacagttctttgcggaactagtggcaagtctactctttctatgttgctgggaagcaggttaggaattacaactgtagtttccacagattcgatacgtcacatgatgcgaagctttgttgaagagaataaaaaccctcttctctcggcatcaacttatcatgcaggtgaatgtcttgacccagtagcagttgctgaagcaaaagctaggagtaaagtaaaaaaacgctcaggcgtatcaagcaactcaaatattgattatgcgaaaagtggggctcttaccgaaaaagttgatgggaaatcaatcgggaagaagcaaatggccatcgaaggttataaagcacagagcgagatggtgattgattttgattgatagtttggaacggttaattactgcatgggaggacagaaaagaatcagttgttgtcgaggttgttcacttagccttaattttgtgatgggtctaatgaggaaacatccttcgataatacctttcatgatctacatatctaatgagagtaagcacacagagaggtttgctgtacgtgcgaagtacatgacacttgacccatcgaaaaatatgttaaatacatcagcaacattagaactatccaggagtacctttgcagtagagctgacaagtacctagttcccaaggtcaacaacactaatgttgatcagagtgtggcttcgatccatgccactgtctttagctgcctccgtaggcgaggtaatggagataagttatatgatcctgaagcaaatactgttgctattataaatgaagagtacaaaaaccaatgtgtggctaattccatgagttccaaggggatgtttaaattgatccaacggcttggatcttgaagaaagctcatggccatcattaatgttgatggttgtgtttctaaggcctggccagttgagtccagtggagatggaaaacgcagttctgacaacagtaataagaatccaatttatggacctctcaatatttgcagagcagagtcagtcaatctgcagtttggcacctttgggataagtgcctgccctactgatacgggctgtacaagtgaagctggaaatgccgatgaatcatatgcaaatgctgctgaaggcagtagcagacatgttctttcttcgtctggttctccgaagaagtcggatggtcattgtaaagagatcaaagagtcgtcagcagcatattgcagcgatgaagtagaggaagaagaagctgatgtacggcctaattcagggagtgatgaggacctaagtgaagaagacaacagggaggtcgatgatgaggtcctcaaggcataaaacaccttcgataaaacagtacaagggcaggtgtaacatgaaaatataagttgaagctacgattgaaggagcttcgacatgatggcatgctaaagacgaaggacgataccgacttaaagaggaaaatactgtgtagttcctaatgatctgtactgtaaatgtaattagttgttagggacatggatgtaattttgtccgggctgcgtcccgtacctataaatagatgaacaatacctccgtactgttcaggctggattgtaatcattcttgcgttactcctgctcttccaccttctgtcaaaccaaatgtacaaatgtaatatatatactattgatgtttacacatgtttataaaataagaatataaataatctaatgattcaaaatgattg

SEQ ID NO: 68559 - DNA, 2204 bp, Zea Mays
gagcgaaccatcaccttcccttctgccggcgatctccagccacggcacacatgacatggcgtcggcgaagctgctctacattgtggtggttgacgaagacgcctcctccttccgatacacgcgctccctcctccacagcaccctccagctgatgggatgcaagcgacgccacgccttcgaggtccggtgtaaggtgttcgatgtcatccggggtgaccaacagggcctcggcgacacggccacctccgcccgggtgcggaggtacgaggtcgccgaagcaaccccgaccacaagttcccgtcagttccagttcgagctatacaagcgccggaccaccgtcctcctccccagggacctcttcctcgacctcgtcctcgacctcgacgccctcgccctctacaagttcgtcgcccccaaccagcgcaccgatctcatgctcgcctgcaggattcgtgaacgaaaggaatctatcacagttctttgcggaactagtggcaagtctactctttctatgttgctgggaagcaggttaggaattacaactgtagtttccacagattcgatacgtcacatgatgcgaagctttgttgaagagaataaaaaccctcttctctcggcatcaacttatcatgcaggtgaatgtcttgacccagtagcagttgctgaagcaaaagctaggagtaaagtaaaaaaacgctcaggcgtatcaagcaactcaaatattgattatgcgaaaagtggggctcttaccgaaaaagttgatgggaaatcaatcgggaagaagcaaatggccatcgaaggttataaagcacagagcgagatggtgattgattttgattgatagtttggaacggttaattactgcatgggaggacagaaaagaatcagttgttgtcgaggttgttcacttagccttaattttgtgagcagagtcagtcaatctgcagtttggcacctttgggataagtgcctgccctactgatacgggctgtacaagtgaagctggaaatgccgatgaatcatatgcaaatgctgctgaaggcagtagcagacatgttctttcttcgtctggttctccgaagaagtcggatggtcattgtaaagagatcaaagagtcgtcagcagcatattgcagcgatgaagtagaggaagaagaagctgatgtacggcctaattcagggagtgatgaggacctaagtgaagaagacaacagggaggtcgatgatgagttgcttcactgcactctatgctccgaatcccatcgtaagcatattcgtggatgtctgcatgacatatggaagggtctgtcgatgaggacggcaacaggtccgatgagaaatatgacgacctggccatgctggacagtttggagaacggctgtttaactgacgatggcgtgttttattctggtttaagcaaaccttcaagcagcaagttctttagtcgcaatcaacgaagccacagcatgccaaagaaacacaagagaagttaggtactggtgttcctgagacggcacactcttctgctgctgcaatcgctgtcggtacaagcatcaagcggcatgccgctaggaagtggaagcgctcgctgagtgactcaatcccgttcgcggccacggagtgctccggaattggtgtcagtatgcaagggatcgccgcccgtgcctgggctccagatgagaggtagctgatgcggtgatgcctgatgagctgcacaagacatactgtcattttttcgagcataaattgcaaaaaggaaatacgaatattatttccgtggcaccatggatgcgaaaaaggtcctcaaggcataaaacaccttcgataaaacagtacaagggcaggtgtaacatgaaaatataagttgaagctacgattgaaggagcttcgacatgatggcatgctaaagacgaaggacgataccgacttaaagaggaaaatactgtgtagttcctaatgatctgtactgtaaatgtaattagttgttagggacatggatgtaattttgtccgggctgcgtcccgtacctataaatagatgaacaatacctccgtactgttcaggctggattgtaatcattcttgcgttactcctgctcttccaccttctgtcaaaccaaatgtacaaatgtaatatatatactattgatgtttacacatgtttataaaataagaatataaataatctaatgattcaaaatgattg

SEQ ID NO: 68560 - DNA, 2884 bp, Zea Mays
ggaaagtagagtcaccggagcgaaccatcaccttcccttctgccggcgatctccagccacggcacacatgacatggcgtcggcgaagctgctctacattgtggtggttgacgaagacgcctcctccttccgatacacgcgctccctcctccacagcaccctccagctgatgggatgcaagcgacgccacgccttcgagatcagccgcagggtgtaaggtgttcgatgtcatccggggtgaccaacagggcctcggcgacacggccacctccgcccgggtgcggaggtacgaggtcgccgaagcaaccccgaccacaagttcccgtcagttccagttcgagctatacaagcgccggaccaccgtcctcctccccagggacctcttcctcgacctcgtcctcgacctcgacgccctcgccctctacaagttcgtcgcccccaaccagcgcaccgatctcatgctcgcctgcagatccacaagcattctattgcctctggattgatcacaaatatttcaaatggaacttttaaaggtgttcatattgtatccttgcccctgtcacttatattctttcatattgccttaggattcgtgaacgaaaggaatctatcacagttctttgcggaactagtggcaagtctactctttctatgttgctgggaagcaggttaggaattacaactgtagtttccacagattcgatacgtcacatgatgcgaagctttgttgaagagaataaaaaccctcttctctcggcatcaacttatcatgcaggtgaatgtcttgacccagtagcagttgctgaagcaaaagctaggagtaaagtaaaaaaacgctcaggcgtatcaagcaactcaaatattgattatgcgaaaagtggggctcttaccgaaaaagttgatgggaaatcaatcgggaagaagcaaatggccatcgaaggttataaagcacagagcgagatggtgattgattttgattgatagtttggaacggttaattactgcatgggaggacagaaaagaatcagttgttgtcgaggttgttcacttagccttaattttgtgatgggtctaatgaggaaacatccttcgataatacctttcatgatctacatatctaatgagagtaagcacacagagaggtttgctgtacgtgcgaagtacatgacacttgacccatcgaaaaatatgttaaatacatcagcaacattagaactatccaggagtacctttgcagtagagctgacaagtacctagttcccaaggtcaacaacactaatgttgatcagagtgtggcttcgatccatgccactgtctttagctgcctccgtaggcgaggtaatggagataagttatatgatcctgaagcaaatactgttgctattataaatgaagagtacaaaaaccaatgtgtggctaattccatgagttccaaggggatgtttaaattgatccaacggcttggatcttgaagaaagctcatggccatcattaatgttgatggttgtgtttctaaggcctggccagttgagtccagtggagatggaaaacgcagttctgacaacagtaataagaatccaatttatggacctctcaatatttgcagagcagagtcagtcaatctgcagtttggcacctttgggataagtgcctgccctactgatacgggctgtacaagtgaagctggaaatgccgatgaatcatatgcaaatgctgctgaaggcagtagcagacatgttctttcttcgtctggttctccgaagaagtcggatggtcattgtaaagagatcaaagagtcgtcagcagcatattgcagcgatgaagtagaggaagaagaagctgatgtacggcctaattcagggagtgatgaggacctaagtgaagaagacaacagggaggtcgatgatgagttgcttcactgcactctatgctccgaatcccatcgtaagcatattcgtggatgtctgcatgacatatggaagggtctgtcgatgaggacggcaacaggtccgatgagaaatatgacgacctggccatgctggacagtttggagaacggctgtttaactgacgatggcgtgttttattctggtttaagcaaaccttcaagcagcaagttctttagtcgcaatcaacgaagccacagcatgccaaagaaacacaagagaagttaggtactggtgttcctgagacggcacactcttctgctgctgcaatcgctgtcggtacaagcatcaagcggcatgccgctaggaagtggaagcgctcgctgagtgactcaatcccgttcgcggccacggagtgctccggaattggtgtcagtatgcaagggatcgccgcccgtgcctgggctccagatgagaggtagctgatgcggtgatgcctgatgagctgcacaagacatactgtcattttttcgagcataaattgcaaaaaggaaatacgaatattatttccgtggcaccatggatgcgaaaaaggtcctcaaggcataaaacaccttcgataaaacagtacaagggcaggtgtaacatgaaaatataagttgaagctacgattgaaggagcttcgacatgatggcatgctaaagacgaaggacgataccgacttaaagaggaaaatactgtgtagttcctaatgatctgtactgtaaatgtaattagttgttagggacatggatgtaattttgtccgggctgcgtcccgtacctataaatagatgaacaatacctccgtactgttcaggctggattgtaatcattcttgcgttactcctgctcttccaccttctgtcaaaccaaatgtacaaatgtaatatatatactattgatgtttacacatgtttataaaataagaatataaataatctaatgattcaaaatgattg

SEQ ID NO: 68561 - DNA, 3649 bp, Zea Mays
cacaagggaaagtagagtcaccggagcgaaccatcaccttcccttctgccggcgatctccagccacggcacacatgacatggcgtcggcgaagctgctctacattgtggtggttgacgaagacgcctcctccttccgatacacgcgctccctcctccacagcaccctccagctgatgggatgcaagcgacgccacgccttcgagatcagccgcagggtgtaaggtgttcgatgtcatccggggtgaccaacagggcctcggcgacacggccacctccgcccgggtgcggaggtacgaggtcgccgaagcaaccccgaccacaagttcccgtcagttccagttcgagctatacaagcgccggaccaccgtcctcctccccagggacctcttcctcgacctcgtcctcgacctcgacgccctcgccctctacaagttcgtcgcccccaaccagcgcaccgatctcatgctcgcctgcaggattcgtgaacgaaaggaatctatcacagttctttgcggaactagtggcaagtctactctttctatgttgctggtaataattttagttaaccttacctcattactttcttgtgcccttttgctccatctcatcctccattaggacctgtcttagacctattcatggatggagcattgttgtgagaatgtaacaatagactggagatgcagatgaggtacatattgtattattaccacatggaagtctgtcacaccaggatagaacaaagcaacgttactagcaaattaaggaggtgtttggtttgattaatcactacattcaatatgaggtggtgcatcataagtctattcctcaattttggtgggattaattcattccttatgttagtactaattaactaactatgaggaatagggtggtgatggaccaattcattccattataaaaatcaaacaaataaaagtgagaagtgagaagatgatggactagcttattactcaaaccaaacacctcataagtttcccccttgattggttttcttttctcgcgaatcttcctccatatctggtattggaaagacataggaaaagtaaattatgttcattccgaaactagattctgtccattgcacgtgtggacaaattttagctttattttttccagagttcttccttacagaggtgttaacgtctcaacagggaagcaggtgaatgtcttgacccagtagcagttgctgaagcaaaagctaggagtaaagtaaaaaaacgctcaggcgtatcaagcaactcaaatattgattatgcgaaaagtggggctcttaccgaaaaagttgatgggaaatcaatcgggaagaagcaaatggccatcgaaggttataaagcacagagcgagatggtgattgattttgattgatagtttggaacggttaattactgcatgggaggacagaaaagaatcagttgttgtcgaggttgttcacttagccttaattttgtggtatgtgcttccaaaaaactattcatttgcacatctttcctttcatttcagctattattattttttagatcatatcagacccactatgaagtgtagatttggtgcgtggtaagagttgtctcactgagtcaccaggtcacgggttcgaatcaacctctccacatttgcttggggaaggcttacctcggtttatctttaccctagacttcactcatgtgggagcctctgccactgggtgtgcctatctgccatatcagagccactatattgcatttgttttgctaataaaggtggagttgtaactttcattgtttacatgcccactttattccacatttcgttttaattatttcagatgggtctaatgaggaaacatccttcgataatacctttcatgatctacatatctaatgagagtaagcacacagagaggtttgctgtacgtgcgaagtacatgacacttgacccatcgaaaaatatgttaaatacatcagcaacattagaactatccaggagtacctttgcagtagagctgacaagtacctagttcccaaggtcaacaacactaatgttgatcagagtgtggcttcgatccatgccactgtctttagctgcctccgtaggcgaggtaatggagataagttatatgatcctgaagcaaatactgttgctattataaatgaagagtacaaaaaccaatgtgtggctaattccatgagttccaaggggatgtttaaattgatccaacggcttggatcttgaagaaagctcatggccatcattaatgttgatggttgtgtttctaaggcctggccagttgagtccagtggagatggaaaacgcagttctgacaacagtaataagaatccaatttatggacctctcaatatttgcagagcagagtcagtcaatctgcagtttggcacctttgggataagtgcctgccctactgatacgggctgtacaagtgaagctggaaatgccgatgaatcatatgcaaatgctgctgaaggcagtagcagacatgttctttcttcgtctggttctccgaagaagtcggatggtcattgtaaagagatcaaagagtcgtcagcagcatattgcagcgatgaagtagaggaagaagaagctgatgtacggcctaattcagggagtgatgaggacctaagtgaagaagacaacagggaggtcgatgatgagttgcttcactgcactctatgctccgaatcccatcgtaagcatattcgtggatgtctgcatgacatatggaagggtctgtcgatgaggacggcaacaggtccgatgagaaatatgacgacctggccatgctggacagtttggagaacggctgtttaactgacgatggcgtgttttattctggtttaagcaaaccttcaagcagcaagttctttagtcgcaatcaacgaagccacagcatgccaaagaaacacaagagaagttaggtactggtgttcctgagacggcacactcttctgctgctgcaatcgctgtcggtacaagcatcaagcggcatgccgctaggaagtggaagcgctcgctgagtgactcaatcccgttcgcggccacggagtgctccggaattggtgtcagtatgcaagggatcgccgcccgtgcctgggctccagatgagaggtagctgatgcggtgatgcctgatgagctgcacaagacatactgtcattttttcgagcataaattgcaaaaaggaaatacgaatattatttccgtggcaccatggatgcgaaaaaggtcctcaaggcataaaacaccttcgataaaacagtacaagggcaggtgtaacatgaaaatataagttgaagctacgattgaaggagcttcgacatgatggcatgctaaagacgaaggacgataccgacttaaagaggaaaatactgtgtagttcctaatgatctgtactgtaaatgtaattagttgttagggacatggatgtaattttgtccgggctgcgtcccgtacctataaatagatgaacaatacctccgtactgttcaggctggattgtaatcattcttgcgttactcctgctcttccaccttctgtcaaaccaaatgtacaaatgtaatatatatactattgatgtttacacatgtttataaaataagaatataaataatctaatgattcaaaatgattg

SEQ ID NO: 68562 - DNA, 2853 bp, Zea Mays
gtgaggagagccagcctattttgacaaattactcgagacaatgctttcggtccggctacggaaaaagcccaaacgaggagccagatcaattagagctgacccaccgaatcagattcaaaataatgagaaccaaaccggaggaaccagacgacacaagggaaagtagagtcaccggagcgaaccatcaccttcccttctgccggcgatctccagccacggcacacatgacatggcgtcggcgaagctgctctacattgtggtggttgacgaagacgcctcctccttccgatacacgcgctccctcctccacagcaccctccagctgatgggatgcaagcgacgccacgccttcgagatcagccgcagggtgtaaggtgttcgatgtcatccggggtgaccaacagggcctcggcgacacggccacctccgcccgggtgcggaggtacgaggtcgccgaagcaaccccgaccacaagttcccgtcagttccagttcgagctatacaagcgccggaccaccgtcctcctccccagggacctcttcctcgacctcgtcctcgacctcgacgccctcgccctctacaagttcgtcgcccccaaccagcgcaccgatctcatgctcgcctgcagggaagcaggttaggaattacaactgtagtttccacagattcgatacgtcacatgatgcgaagctttgttgaagagaataaaaaccctcttctctcggcatcaacttatcatgcaggtgaatgtcttgacccagtagcagttgctgaagcaaaagctaggagtaaagtaaaaaaacgctcaggcgtatcaagcaactcaaatattgattatgcgaaaagtggggctcttaccgaaaaagttgatgggaaatcaatcgggaagaagcaaatggccatcgaaggttataaagcacagagcgagatggtgattgattttgattgatagtttggaacggttaattactgcatgggaggacagaaaagaatcagttgttgtcgaggttgttcacttagccttaattttgtgatgggtctaatgaggaaacatccttcgataatacctttcatgatctacatatctaatgagagtaagcacacagagaggtttgctgtacgtgcgaagtacatgacacttgacccatcgaaaaatatgttaaatacatcagcaacattagaactatccaggagtacctttgcagtagagctgacaagtacctagttcccaaggtcaacaacactaatgttgatcagagtgtggcttcgatccatgccactgtctttagctgcctccgtaggcgaggtaatggagataagttatatgatcctgaagcaaatactgttgctattataaatgaagagtacaaaaaccaatgtgtggctaattccatgagttccaaggggatgtttaaattgatccaacggcttggatcttgaagaaagctcatggccatcattaatgttgatggttgtgtttctaaggcctggccagttgagtccagtggagatggaaaacgcagttctgacaacagtaataagaatccaatttatggacctctcaatatttgcagagcagagtcagtcaatctgcagtttggcacctttgggataagtgcctgccctactgatacgggctgtacaagtgaagctggaaatgccgatgaatcatatgcaaatgctgctgaaggcagtagcagacatgttctttcttcgtctggttctccgaagaagtcggatggtcattgtaaagagatcaaagagtcgtcagcagcatattgcagcgatgaagtagaggaagaagaagctgatgtacggcctaattcagggagtgatgaggacctaagtgaagaagacaacagggaggtcgatgatgagttgcttcactgcactctatgctccgaatcccatcgtaagcatattcgtggatgtctgcatgacatatggaagggtctgtcgatgaggacggcaacaggtccgatgagaaatatgacgacctggccatgctggacagtttggagaacggctgtttaactgacgatggcgtgttttattctggtttaagcaaaccttcaagcagcaagttctttagtcgcaatcaacgaagccacagcatgccaaagaaacacaagagaagttaggtactggtgttcctgagacggcacactcttctgctgctgcaatcgctgtcggtacaagcatcaagcggcatgccgctaggaagtggaagcgctcgctgagtgactcaatcccgttcgcggccacggagtgctccggaattggtgtcagtatgcaagggatcgccgcccgtgcctgggctccagatgagaggtagctgatgcggtgatgcctgatgagctgcacaagacatactgtcattttttcgagcataaattgcaaaaaggaaatacgaatattatttccgtggcaccatggatgcgaaaaaggtcctcaaggcataaaacaccttcgataaaacagtacaagggcaggtgtaacatgaaaatataagttgaagctacgattgaaggagcttcgacatgatggcatgctaaagacgaaggacgataccgacttaaagaggaaaatactgtgtagttcctaatgatctgtactgtaaatgtaattagttgttagggacatggatgtaattttgtccgggctgcgtcccgtacctataaatagatgaacaatacctccgtactgttcaggctggattgtaatcattcttgcgttactcctgctcttccaccttctgtcaaaccaaatgtacaaatgtaatatatatactattgatgtttacacatgtttataaaataagaatataaataatctaatgattcaaaatgattg

SEQ ID NO: 68563 - DNA, 577 bp, Zea Mays
ggaccatcatccagcctcttagcacggagatgaagcagtagaccacggcgagctggaaatgcgacacgatggagctcggccaacagacagcttgcgtgcagggactagcttggctgcgtgcggcatgggcgagcagggagatccgggcgagcaaggagcagcggctggacgccatgagaggacctgcgcacagggatggaactccacggaactccacggtgaccatggctgcagaaagcggtgacggagcggagcagggaacttggcgcggcttggggatggcgaccaagcagaggagagaccaaggacgcgaggatggagatggatgagcggctgccttcggacatgggggcgagcagggcgcggcagaaagctctaaaccggcgtggccatggcagagctggacgcgagctccgagggagccaggacgaggtcgtggccggacgagcgcagcagggaggagcacgcatgggatttgctgggtgcggcggcccgctgagcaggaagacagcagtggtcgcagggctcaagcgatgcgagtgcacggcacggcgagctgcaggagggagcagtccgg

SEQ ID NO: 68564 - DNA, 2958 bp, Zea Mays
tttctcaaaaaggggcgtacccggtgacgtaggcttcccgcactgtgcgggggtctaggaaagggtatctttaagcaccaagccttacccgcataatatgcagaggctagggctcgaacccgggaccttccggttacagacggtaggctctaccgctgcaccaggcccgcccttttgctgataatttatatgtatcgattgccgtctttcttatgcatctatggatctaaccttcaatgtgccttacctttcatgctgtcctaatttccatggtttgttcatagaaataagaagcaccaactaacatagttcagtaagttctattaaactagccaatttcccttttagtttataagaccaggagaggtaaatgttgtggaaagaatgacaattatacttaccatctaggatactgtggtagcgaagaaggttcgtgataatggaaccaggatgaagagaatttgcagttatgttgacattatcttcctgttagacaaaatattgtatcatagatagagagaaatagttatagaacaccttaaaaaactggaaactgaatggtaactgtaaagagaacatataatcagcaaaatctgaaacattataatttttgtgattggatgatgagtgttccttgaatttgttacaccaagattagcaataaatgcactcaaacttccatgtccaagttggaacaactcactgtcactgcccaatgatctttatttaccaaaagctacaatttttaaaattcagatgcaaacatctttaaaaaataatgcaagtgatgttggtcacaaacagttgcaatgcataccaaggaccctgacatgcttgccgaacaatccagagctcctgcaggaactgagtgtgttgcttaagctagatattagcaaggctttcgacccagtctaatggccgtttttgttggaggttctaagatatttgggctttggacctgtttggtacaatttactctgcaagttgttgtgcacctcttccactagagtgcttgttaatggtgaacagagtgaattgatctgccaccagaagggccttcgtcagggtgaccctctgtccgctactccgctatgttgttcatcttagtgatggatgttctgaactacattattgtaaaagcttgggaggagggtctgctgcaacctttgctgaacaggggtaatggtcagaggctctatttatatgctgatgatgtagtgctgttcatatgaacctgtgctgaagaattactgttgatcaaggaaatcattagggtcttcagtgaagcatctaacttggtcacaatatcggaaagagttccgtcactcctatcagatgtggggatcatgatttggaatttgtacataaggttttaccttgcaatgtgcagcacttccaaataccttgggtatgctgctggcagtcaggaaacttaccaagaacgatttttatccgctcattgataaggtagctgatcggctccctggttggaaggcaacacttatcatcctgtcggtagagcgacgttggtcaattcggtcctaacagctattccaatatatcatctcattaccattcaatgtcccaagtgggtaatcaaggcaattgataagatcagacgaaggttcttgtggaaaggaagacatcaagggaggccattgtctggttgggtggcaaaaagtatgccggcctcgcaagttgggagggctgagaattcacaatctggaggtgttaggttggtctctaaatatgagatggttatggctacagaaaactcaaccgaattcacaataatatacaggttcatccctgtgcggcgaccatgtttgttgtgtcagttcggtcggtagttggtgatggagctgaaacgctattatggttggatcgatggctgcatggaaaatcttcagctgaatttgccccaaatctggtttcttcagtgcctaatcgtattcggaacatcagaactgttcaaggtgccttggctgataatcaatggctccacgatgttagaggtgttctgtccttgcaggccttctatgagttctttttgtgctgggacatgctgcaaggttttcatcttggccccggaattcatgaccagcatgtatgattcccttccgcatcaggtgcctactcttccaagtcggcttacaatcttttgtttgtggggctgtggtgtttgagccagctgcacgcatctgggagacgtgggtgcctcctaagtgtaagttcttcctttggttggcctctctaaatcgctgctggacagcggatcgcctggctcgccgaggcttagcgcaccgtaagtatcgcctgctttgtgatcaagaggaggaaactatacagcatcttcttgtggcttgcgtctttgctaggcaaacttggttcttggtgctctcgctaataggtctgcagcagttagctcctgatcctggcgtttcagttttccaataatggtggaaggcagctgtgttgaaggagcctaaacagaagagaggaggctttaactcgatggtcgctcttgtggcttggtggctgtggaaacatcgtaatgcatgtgtttttgataaaatttccccagtgtggccatggttgtcaaagatattaaggaggaagccaggttatggtgcttagcaggggcaccggggctgaagcagatttggccttagtgtattgtgtggttcaggttctctctgctgtcttgtaaccctcttctattttcgtgcatttaccgctccgacggtttgtatcggtctattttagatctttttcttcttaatataatggtgcgcagctctcatgcgcgctcgagaaaaaaagttgcaatgcatacaaatgcattgtaactatacatgcaccataaggtcaagaaaacatgcatgtgttagatggacaagacatacctcaaatcgcctggcaagttcattagcatgcaatatgtttgcaagctttgat

SEQ ID NO: 68565 - DNA, 1416 bp, Zea Mays
cggtaatctattatttgaaaacatatttatttaaatcatgaaatacgttttactaatttatccaaaataggattttgaagtattacaatactctagtattcgacctaatccatatatattgagatggattggagtgtaattaatttaatttacaccctaattcatcttaatacacgtaaattcaggtgaatactaaaatatccaaccaaagcattatccaccccggagctcctcgagggcgattggagtgtaaattaatttaatttacaccctaatccaccttaatacacgtagatagattgaggtgaatgagtttaccacacaggagctcctcgagggcctacagaatttaccatctgtcaagggatttacattacatccatgtctgaaaacaagtcgctaacaacaagaagcatgagctaggtgatgagctcgacgccgaagtcccagagcctcttggccaactccatgtccttggcgttcgcgcttggctcgtacaggttacagtcgcagaagtacttcccggacacgcccttcacatgcgggtggagtgccaaatagcatgtagttgccgcaccctgttcaagttaaaagcaaaccacattcagagcccaaattgaatactagactggcagactccatctaagctagtactagctgcaccgtgtagccaagagcatatgattacatgatacgggcagcacagcacacataaaactttgcctattgctggtgaaatctagatttgctttgcctaccacaaagccagtcaacctggcacagatcagatcacaaactttcgtaagcactagtggagtggggttgtagctctacagcgggctgttaagttgcacagcacaggcacatcgatttgctttgcctaccaaaaagccaatcaacctagcacagatgacaagcattagtaagcagggattgtagttctacagcagactattagggttagtttggaaacttaaatcactttcgtaattggaggggattaagggtgaaattagttcatttccccctcaatccccttcagttccgaaatgggtttaagtttccaaactagcccttaagttgcataggcacggcatggtgtaggtcacatgacattgtgataagaatgatcttcaattgcttttccacaagtgaagatgtttccagatgagtacacatagtaacttgaggcatggtaatggtacttgtcagatcacatactacttttgatgctcctgtacctcttctaatttaacataatggttaacagttgtgccagatacaatgtcgcagatctacactgaagcttattctaatgtctcaaatagtaccactatctcgaaatgcaggaagcgacaaacaatactgtcactaccagcaaacgatcatcaacatcaacatagccttttagtccca

SEQ ID NO: 68566 - DNA, 2264 bp, Zea Mays
gtacaatgctgatagtagtagtttatgtcctgggctgatgcatcaaattgttcaggtagcaacagtgggtctccggttgtggaaccatttggatcattcacgatggatttatttactcctcacagtgacctggacctctctatcaattttagtgctaatactgatgagcaatatactcgcaagcaaatgatctctattatcaagaaattttccaaggttctattttcttatcagaggagtggaattttctgtggggttttacctattgtaagtgctagggtgcctatactgaaggttattgatcgtggcacaggggtcgaatgtgatatttcggttgaaaacaaagatggcatgacaaggttaagttctgggctaaggtacatgatctgaataccccaagacaactaactatgagctccatgtcaattatttcactagttgctttccatttgcaggtaccatgggttaattattattttggtttggttattaaattgcaagtaactgtcccattaccttttgttttaattaattgacctactaaccaatctgcatttgaagacacaaactttggattcatttgtatagaaaataagacgatacttattggggaaattatgaattatcttctttactatcgacaaattctggatatgctttatgccagttcagaaaacatgatagatacccttcttctacacttcctcagtctaaattcctacacttcatgctattgcattctatgtaccagaaaaaatggattttactccattttccttaatggtagtgtttgagtagcaactcattagatgcatggctaagaagataagcatcaatgtgcagtgcagacccggcatcctccaatattgcctgcgttctctgacttgttaaaagatgggttagattgcgaaagcattgagaggaatgctttacggtttagggattttgggagtagaaataaagaatctgtcgctgaactgtttgtatcattgataagtaaactattgtcagcagagagtttatgggagcatgggctgtgcgcaagcaattttgaagcgtcatggatctcaaagacctggaagaaaggagtaggcaatttaagtgttgaagatttcttggaccggtcgcaaaattttgcaaggtcagtgggaaaggtgcagatgcagaagatttgcaaatgccttagagaatgtgctttgaatttgttagatttcatgagagggaaaatggacacaacgaagctgaagacccttttatttgggcggcttagcccagacgaattagtcagcaaacctcgtctgaagcatgtcaagagaaaaaggaattgggaacggaccccgcaagggggaagatgtgtgctccagaagagtgcaaagcatgctggtagtgctactggcagtgattcattacccactcctaacaaggtcttgcatcatgcactccattatcgagttgctggccatcagtctagcattcatcagtttgtgcccattattcgatggccacgaatcattccttctggttttggctatggattatcgcttgggattccatcagttgctcctcaccttggcaagggaatactgggcaagccaccaatcattccttctggttttggctacggattgtcgcttgagattccatcagttgctcctcaccttggtaacggaatactgggcaagccaccaagtaatataacacccttagatcaacggagctcaactcaactagtgcacgtacggaatccacaccagcatacatgtcagcaatcatgtggcggagctatggagccgagcagctccggcgtggcttaatgataaggtccggtgatgagcagctctagtagcggttaggagtttgaggttagatttagggtgtgtttggtttgacttttggctttggcttttgccccctaaaagttaaaagccaaccaaagggctggatacaggaagcagcttttttctaaaagccgactttctcgtagtgtaaatctgaaagcacccctgaacctgcttttagtggcttttcggatggaactatgaaaacatatatcgaagaatttttaacgacttttagtggttttcactaaacggtttttagattttttaacagcttacaacctacaacagctttttacacagctcacagcctacaacaacttttttccatagccacagcccaaccaaacagacccttgatgtggagctccctcttgtgttgaggcacttttcattgctcttgttagttcaagttttagttttttt

SEQ ID NO: 68567 - DNA, 2053 bp, Zea Mays
agttgatctcatttattcattaattcattttctgaaaattctcttcatttttgagtctccgaaatcagtctcagtctccttgtgtggaggaaagtctaggtgattccggggtgcaataccagtacaatgctgatagtagtagtttatgtcctgggctgatgcatcaaattgttcaggtagcaacagtgggtctccggttgtggaaccatttggatcattcacgatggatttatttactcctcacagtgacctggacctctctatcaattttagtgctaatactgatgagcaatatactcgcaagcaaatgatctctattatcaagaaattttccaaggttctattttcttatcagaggagtggaattttctgtggggttttacctattgtaagtgctagggtgcctatactgaaggttattgatcgtggcacaggggtcgaatgtgatatttcggttgaaaacaaagatggcatgacaaggtcaatgatcattaaatttgtttcctcacttgatgaaaggtttcagatactaagttacttggttaagttctgggctaaggtacatgatctgaataccccaagacaactaactatgagctccatgtcaattatttcactagttgctttccatttgcagacccggcatcctccaatattgcctgcgttctctgacttgttaaaagatgggttagattgcgaaagcattgagaggaatgctttacggtttagggattttgggagtagaaataaagaatctgtcgctgaactgtttgtatcattgataagtaaactattgtcagcagagagtttatgggagcatgggctgtgcgcaagcaattttgaagcgtcatggatctcaaagacctggaagaaaggagtaggcaatttaagtgttgaagatttcttggaccggtcgcaaaattttgcaaggtcagtgggaaaggtgcagatgcagaagatttgcaaatgccttagagaatgtgctttgaatttgttagatttcatgagagggaaaatggacacaacgaagctgaagacccttttatttgggcggcttagcccagacgaattagtcagcaaacctcgtctgaagcatgtcaagagaaaaaggaattgggaacggaccccgcaagggggaagatgtgtgctccagaagagtgcaaagcatgctggtagtgctactggcagtgattcattacccactcctaacaaggtcttgcatcatgcactccattatcgagttgctggccatcagtctagcattcatcagtttgtgcccattattcgatggccacgaatcattccttctggttttggctatggattatcgcttgggattccatcagttgctcctcaccttggcaagggaatactgggcaagccaccaatcattccttctggttttggctacggattgtcgcttgagattccatcagttgctcctcaccttggtaacggaatactgggcaagccaccaagtaatataacacccttagatcaacggagctcaactcaactagtgcacgtacggaatccacaccagcatacatgtcagcaatcatgtggcggagctatggagccgagcagctccggcgtggcttaatgataaggtccggtgatgagcagctctagtagcggttaggagtttgaggttagatttagggtgtgtttggtttgacttttggctttggcttttgccccctaaaagttaaaagccaaccaaagggctggatacaggaagcagcttttttctaaaagccgactttctcgtagtgtaaatctgaaagcacccctgaacctgcttttagtggcttttcggatggaactatgaaaacatatatcgaagaatttttaacgacttttagtggttttcactaaacggtttttagattttttaacagcttacaacctacaacagctttttacacagctcacagcctacaacaacttttttccatagccacagcccaaccaaacagacccttgatgtggagctccctcttgtgttgaggcacttttcattgctcttgttagttcaagttttagttttttt

SEQ ID NO: 68568 - DNA, 2161 bp, Zea Mays
ggtgttccttcgccatggctactctggcggccatctcctccgtgtcttatgacacagacaccgattccgactcctcgcggtgcagcgaggcaagcacatgggattctcaagtgttaagcaggcatgctgaatgtctggagctggaggagttgactgcaatatcagtcaatcccagtctgcttccagctttgaatcagttgcttctcgaggcgtatgccattctacgtcccaagccgcttgactatgaccagcgcaacaccttggttgatgtcttcaggaagatggtagcaacagtgggtctccggttgtggaaccatttggatcattcacgatggatttatttactcctcacagtgacctggacctctctatcaattttagtgctaatactgatgagcaatatactcgcaagcaaatgatctctattatcaagaaattttccaaggttctattttcttatcagaggagtggaattttctgtggggttttacctattgtaagtgctagggtgcctatactgaaggttattgatcgtggcacaggggtcgaatgtgatatttcggttgaaaacaaagatggcatgacaaggtcaatgatcattaaatttgtttcctcacttgatgaaaggtttcagatactaagttacttggttaagttctgggctaaggtacatgatctgaataccccaagacaactaactatgagctccatgtcaattatttcactagttgctttccatttgcagacccggcatcctccaatattgcctgcgttctctgacttgttaaaagatgggttagattgcgaaagcattgagaggaatgctttacggtttagggattttgggagtagaaataaagaatctgtcgctgaactgtttgtatcattgataagtaaactattgtcagcagagagtttatgggagcatgggctgtgcgcaagcaattttgaagcgtcatggatctcaaagacctggaagaaaggagtaggcaatttaagtgttgaagatttcttggaccggtcgcaaaattttgcaaggtcagtgggaaaggtgcagatgcagaagatttgcaaatgccttagagaatgtgctttgaatttgttagatttcatgagagggaaaatggacacaacgaagctgaagacccttttatttgggcggcttagcccagacgaattagtcagcaaacctcgtctgaagcatgtcaagagaaaaaggaattgggaacggaccccgcaagggggaagatgtgtgctccagaagagtgcaaagcatgctggtagtgctactggcagtgattcattacccactcctaacaaggtcttgcatcatgcactccattatcgagttgctggccatcagtctagcattcatcagtttgtgcccattattcgatggccacgaatcattccttctggttttggctatggattatcgcttgggattccatcagttgctcctcaccttggcaagggaatactgggcaagccaccaatcattccttctggttttggctacggattgtcgcttgagattccatcagttgctcctcaccttggtaacggaatactgggcaagccaccaagtaatataacacccttagatcaacggagctcaactcaactagtgcacgtacggaatccacaccagcatacatgtcagcaatcatgtggcggagctatggagccgagcagctccggcgtggcttaatgataaggtccggtgatgagcagctctagtagcggttaggagtttgaggttagatttagggtgtgtttggtttgacttttggctttggcttttgccccctaaaagttaaaagccaaccaaagggctggatacaggaagcagcttttttctaaaagccgactttctcgtagtgtaaatctgaaagcacccctgaacctgcttttagtggcttttcggatggaactatgaaaacatatatcgaagaatttttaacgacttttagtggttttcactaaacggtttttagattttttaacagcttacaacctacaacagctttttacacagctcacagcctacaacaacttttttccatagccacagcccaaccaaacagacccttgatgtggagctccctcttgtgttgaggcacttttcattgctcttgttagttcaagttttagttttttt

SEQ ID NO: 68569 - DNA, 2388 bp, Zea Mays
ggtgttccttcgccatggctactctggcggccatctcctccgtgtcttatgacacagacaccgattccgactcctcgcggtgcagcgaggcaagcacatgggattctcaaggcatgctgaatgtctggagctggaggagttgactgcaatatcagtcaatcccagtctgcttccagctttgaatcagttgcttctcgaggcgtatgccattctacgtcccaagccgcttgactatgaccagcgcaacaccttggttgatgtcttcaggaagatggtgaatcaaagatttgcctagatgtaaaccaggattcctacagctcatcgtaaacaggagagtaggcctcatatgcagcagcagcaacagcaaccagaacgctattctgtaacagctggtggacttgcacgtgggacctattctccagtttgtgaggggctgcaaagatcccggtttgcatttggtctgcaaataattttttccattgatttgacctttatctaacacaaatttcaggtagcaacagtgggtctccggttgtggaaccatttggatcattcacgatggatttatttactcctcacagtgacctggacctctctatcaattttagtgctaatactgatgagcaatatactcgcaagcaaatgatctctattatcaagaaattttccaaggttctattttcttatcagaggagtggaattttctgtggggttttacctattgtaagtgctagggtgcctatactgaaggttattgatcgtggcacaggggtcgaatgtgatatttcggttgaaaacaaagatggcatgacaaggtcaatgatcattaaatttgtttcctcacttgatgaaaggtttcagatactaagttacttggttaagttctgggctaaggtacatgatctgaataccccaagacaactaactatgagctccatgtcaattatttcactagttgctttccatttgcagacccggcatcctccaatattgcctgcgttctctgacttgttaaaagatgggttagattgcgaaagcattgagaggaatgctttacggtttagggattttgggagtagaaataaagaatctgtcgctgaactgtttgtatcattgataagtaaactattgtcagcagagagtttatgggagcatgggctgtgcgcaagcaattttgaagcgtcatggatctcaaagacctggaagaaaggagtaggcaatttaagtgttgaagatttcttggaccggtcgcaaaattttgcaaggtcagtgggaaaggtgcagatgcagaagatttgcaaatgccttagagaatgtgctttgaatttgttagatttcatgagagggaaaatggacacaacgaagctgaagacccttttatttgggcggcttagcccagacgaattagtcagcaaacctcgtctgaagcatgtcaagagaaaaaggaattgggaacggaccccgcaagggggaagatgtgtgctccagaagagtgcaaagcatgctggtagtgctactggcagtgattcattacccactcctaacaaggtcttgcatcatgcactccattatcgagttgctggccatcagtctagcattcatcagtttgtgcccattattcgatggccacgaatcattccttctggttttggctatggattatcgcttgggattccatcagttgctcctcaccttggcaagggaatactgggcaagccaccaatcattccttctggttttggctacggattgtcgcttgagattccatcagttgctcctcaccttggtaacggaatactgggcaagccaccaagtaatataacacccttagatcaacggagctcaactcaactagtgcacgtacggaatccacaccagcatacatgtcagcaatcatgtggcggagctatggagccgagcagctccggcgtggcttaatgataaggtccggtgatgagcagctctagtagcggttaggagtttgaggttagatttagggtgtgtttggtttgacttttggctttggcttttgccccctaaaagttaaaagccaaccaaagggctggatacaggaagcagcttttttctaaaagccgactttctcgtagtgtaaatctgaaagcacccctgaacctgcttttagtggcttttcggatggaactatgaaaacatatatcgaagaatttttaacgacttttagtggttttcactaaacggtttttagattttttaacagcttacaacctacaacagctttttacacagctcacagcctacaacaacttttttccatagccacagcccaaccaaacagacccttgatgtggagctccctcttgtgttgaggcacttttcattgctcttgttagttcaagttttagttttttt

SEQ ID NO: 68570 - DNA, 2177 bp, Zea Mays
ggtgttccttcgccatggctactctggcggccatctcctccgtgtcttatgacacagacaccgattccgactcctcgcggtgcagcgaggcaagcacatgggattctcaagtgttaagcaggcatgctgaatgtctggagctggaggagttgactgcaatatcagtcaatcccagtctgcttccagctttgaatcagttgcttctcgaggcgtatgccattctacgtcccaagccgcttgactatgaccagcgcaacaccttggttgatgtcttcaggaagatggtgaatcaaagatttggtagcaacagtgggtctccggttgtggaaccatttggatcattcacgatggatttatttactcctcacagtgacctggacctctctatcaattttagtgctaatactgatgagcaatatactcgcaagcaaatgatctctattatcaagaaattttccaaggttctattttcttatcagaggagtggaattttctgtggggttttacctattgtaagtgctagggtgcctatactgaaggttattgatcgtggcacaggggtcgaatgtgatatttcggttgaaaacaaagatggcatgacaaggtcaatgatcattaaatttgtttcctcacttgatgaaaggtttcagatactaagttacttggttaagttctgggctaaggtacatgatctgaataccccaagacaactaactatgagctccatgtcaattatttcactagttgctttccatttgcagacccggcatcctccaatattgcctgcgttctctgacttgttaaaagatgggttagattgcgaaagcattgagaggaatgctttacggtttagggattttgggagtagaaataaagaatctgtcgctgaactgtttgtatcattgataagtaaactattgtcagcagagagtttatgggagcatgggctgtgcgcaagcaattttgaagcgtcatggatctcaaagacctggaagaaaggagtaggcaatttaagtgttgaagatttcttggaccggtcgcaaaattttgcaaggtcagtgggaaaggtgcagatgcagaagatttgcaaatgccttagagaatgtgctttgaatttgttagatttcatgagagggaaaatggacacaacgaagctgaagacccttttatttgggcggcttagcccagacgaattagtcagcaaacctcgtctgaagcatgtcaagagaaaaaggaattgggaacggaccccgcaagggggaagatgtgtgctccagaagagtgcaaagcatgctggtagtgctactggcagtgattcattacccactcctaacaaggtcttgcatcatgcactccattatcgagttgctggccatcagtctagcattcatcagtttgtgcccattattcgatggccacgaatcattccttctggttttggctatggattatcgcttgggattccatcagttgctcctcaccttggcaagggaatactgggcaagccaccaatcattccttctggttttggctacggattgtcgcttgagattccatcagttgctcctcaccttggtaacggaatactgggcaagccaccaagtaatataacacccttagatcaacggagctcaactcaactagtgcacgtacggaatccacaccagcatacatgtcagcaatcatgtggcggagctatggagccgagcagctccggcgtggcttaatgataaggtccggtgatgagcagctctagtagcggttaggagtttgaggttagatttagggtgtgtttggtttgacttttggctttggcttttgccccctaaaagttaaaagccaaccaaagggctggatacaggaagcagcttttttctaaaagccgactttctcgtagtgtaaatctgaaagcacccctgaacctgcttttagtggcttttcggatggaactatgaaaacatatatcgaagaatttttaacgacttttagtggttttcactaaacggtttttagattttttaacagcttacaacctacaacagctttttacacagctcacagcctacaacaacttttttccatagccacagcccaaccaaacagacccttgatgtggagctccctcttgtgttgaggcacttttcattgctcttgttagttcaagttttagttttttt

SEQ ID NO: 68571 - DNA, 2274 bp, Zea Mays
ggtgttccttcgccatggctactctggcggccatctcctccgtgtcttatgacacagacaccgattccgactcctcgcggtgcagcgaggcaagcacatgggattctcaagtgttaagcaggcatgctgaatgtctggagctggaggagttgactgcaatatcagtcaatcccagtctgcttccagctttgaatcagttgcttctcgaggcgtatgccattctacgtcccaagccgcttgactatgaccagcgcaacaccttggttgatgtcttcaggaagatggtgaatcaaagatttggtagcaacagtgggtctccggttgtggaaccatttggatcattcacgatggatttatttactcctcacagtgacctggacctctctatcaattttagtgctaatactgatgagcaatatactcgcaagcaaatgatctctattatcaagaaattttccaaggttctattttcttatcagaggagtggaattttctgtggggttttacctattgtaagtgctagggtgcctatactgaaggttattgatcgtggcacaggggtcgaatgtgatatttcggttgaaaacaaagatggcatgacaaggtcaatgatcattaaatttgtttcctcacttgatgaaaggtttcagatactaagttacttggttaagttctgggctaaggtacatgatctgaataccccaagacaactaactatgagctccatgtcaattatttcactagttgctttccatttgcagaaaaaatggattttactccattttccttaatggtagtgtttgagtagcaactcattagatgcatggctaagaagataagcatcaatgtgcagtgcagacccggcatcctccaatattgcctgcgttctctgacttgttaaaagatgggttagattgcgaaagcattgagaggaatgctttacggtttagggattttgggagtagaaataaagaatctgtcgctgaactgtttgtatcattgataagtaaactattgtcagcagagagtttatgggagcatgggctgtgcgcaagcaattttgaagcgtcatggatctcaaagacctggaagaaaggagtaggcaatttaagtgttgaagatttcttggaccggtcgcaaaattttgcaaggtcagtgggaaaggtgcagatgcagaagatttgcaaatgccttagagaatgtgctttgaatttgttagatttcatgagagggaaaatggacacaacgaagctgaagacccttttatttgggcggcttagcccagacgaattagtcagcaaacctcgtctgaagcatgtcaagagaaaaaggaattgggaacggaccccgcaagggggaagatgtgtgctccagaagagtgcaaagcatgctggtagtgctactggcagtgattcattacccactcctaacaaggtcttgcatcatgcactccattatcgagttgctggccatcagtctagcattcatcagtttgtgcccattattcgatggccacgaatcattccttctggttttggctatggattatcgcttgggattccatcagttgctcctcaccttggcaagggaatactgggcaagccaccaatcattccttctggttttggctacggattgtcgcttgagattccatcagttgctcctcaccttggtaacggaatactgggcaagccaccaagtaatataacacccttagatcaacggagctcaactcaactagtgcacgtacggaatccacaccagcatacatgtcagcaatcatgtggcggagctatggagccgagcagctccggcgtggcttaatgataaggtccggtgatgagcagctctagtagcggttaggagtttgaggttagatttagggtgtgtttggtttgacttttggctttggcttttgccccctaaaagttaaaagccaaccaaagggctggatacaggaagcagcttttttctaaaagccgactttctcgtagtgtaaatctgaaagcacccctgaacctgcttttagtggcttttcggatggaactatgaaaacatatatcgaagaatttttaacgacttttagtggttttcactaaacggtttttagattttttaacagcttacaacctacaacagctttttacacagctcacagcctacaacaacttttttccatagccacagcccaaccaaacagacccttgatgtggagctccctcttgtgttgaggcacttttcattgctcttgttagttcaagttttagttttttt

SEQ ID NO: 68572 - DNA, 2909 bp, Zea Mays
ggtgttccttcgccatggctactctggcggccatctcctccgtgtcttatgacacagacaccgattccgactcctcgcggtgcagcgaggcaagcacatgggattctcaagtgttaagcaggcatgctgaatgtctggagctggaggagttgactgcaatatcagtcaatcccagtctgcttccagctttgaatcagttgcttctcgaggcgtatgccattctacgtcccaagccgcttgactatgaccagcgcaacaccttggttgatgtcttcaggaagatggtgaatcaaagatttgcctagatgtaaaccaggattcctacagctcatcgtaaacaggagagtaggcctcatatgcagcagcagcaacagcaaccagaacgctattctgtaacagctggtggacttgcacgtgggacctattctccagtttgtgaggggctgcaaagatcccggtttgcatttggtctgcaaataattttttccattgatttgacctttatctaacacaaatttcaggtagcaacagtgggtctccggttgtggaaccatttggatcattcacgatggatttatttactcctcacagtgacctggacctctctatcaattttagtgctaatactgatgagcaatatactcgcaagcaaatgatctctattatcaagaaattttccaaggttctattttcttatcagaggagtggaattttctgtggggttttacctattgtaagtgctagggtgcctatactgaaggttattgatcgtggcacaggggtcgaatgtgatatttcggttgaaaacaaagatggcatgacaaggtcaatgatcattaaatttgtttcctcacttgatgaaaggtttcagatactaagttacttggttaagttctgggctaaggtacatgatctgaataccccaagacaactaactatgagctccatgtcaattatttcactagttgctttccatttgcaggtaccatgggttaattattattttggtttggttattaaattgcaagtaactgtcccattaccttttgttttaattaattgacctactaaccaatctgcatttgaagacacaaactttggattcatttgtatagaaaataagacgatacttattggggaaattatgaattatcttctttactatcgacaaattctggatatgctttatgccagttcagaaaacatgatagatacccttcttctacacttcctcagtctaaattcctacacttcatgctattgcattctatgtaccagaaaaaatggattttactccattttccttaatggtagtgtttgagtagcaactcattagatgcatggctaagaagataagcatcaatgtgcagtgcagacccggcatcctccaatattgcctgcgttctctgacttgttaaaaggttactctatgatgcttgttctttgtttttccttttactggcattattctgctaagttttcaactgaaaccacggataactttctatattgtcattcttgcagatgggttagattgcgaaagcattgagaggaatgctttacggtttagggattttgggagtagaaataaagaatctgtcgctgaactgtttgtatcattgataagtaaagtgagtaactataagctattgtcagcagagagtttatgggagcatgggctgtgcgcaagcaattttgaagcgtcatggatctcaaagacctggaagaaaggagtaggcaatttaagtgttgaagatttcttggaccggtcgcaaaattttgcaaggtcagtgggaaaggtgcagatgcagaagatttgcaaatgccttagagaatgtgctttgaatttgttagatttcatgagagggaaaatggacacaacgaagctgaagacccttttatttgggcggcttagcccagacgaattagtcagcaaacctcgtctgaagcatgtcaagagaaaaaggaattgggaacggaccccgcaagggggaagatgtgtgctccagaagagtgcaaagcatgctggtagtgctactggcagtgattcattacccactcctaacaaggtcttgcatcatgcactccattatcgagttgctggccatcagtctagcattcatcagtttgtgcccattattcgatggccacgaatcattccttctggttttggctatggattatcgcttgggattccatcagttgctcctcaccttggcaagggaatactgggcaagccaccaatcattccttctggttttggctacggattgtcgcttgagattccatcagttgctcctcaccttggtaacggaatactgggcaagccaccaagtaatataacacccttagatcaacggagctcaactcaactagtgcacgtacggaatccacaccagcatacatgtcagcaatcatgtggcggagctatggagccgagcagctccggcgtggcttaatgataaggtccggtgatgagcagctctagtagcggttaggagtttgaggttagatttagggtgtgtttggtttgacttttggctttggcttttgccccctaaaagttaaaagccaaccaaagggctggatacaggaagcagcttttttctaaaagccgactttctcgtagtgtaaatctgaaagcacccctgaacctgcttttagtggcttttcggatggaactatgaaaacatatatcgaagaatttttaacgacttttagtggttttcactaaacggtttttagattttttaacagcttacaacctacaacagctttttacacagctcacagcctacaacaacttttttccatagccacagcccaaccaaacagacccttgatgtggagctccctcttgtgttgaggcacttttcattgctcttgttagttcaagttttagttttttt

SEQ ID NO: 68573 - DNA, 2598 bp, Zea Mays
ggtgttccttcgccatggctactctggcggccatctcctccgtgtcttatgacacagacaccgattccgactcctcgcggtgcagcgaggcaagcacatgggattctcaagtgttaagcaggcatgctgaatgtctggagctggaggagttgactgcaatatcagtcaatcccagtctgcttccagctttgaatcagttgcttctcgaggcgtatgccattctacgtcccaagccgcttgactatgaccagcgcaacaccttggttgatgtcttcaggaagatggtgaatcaaagatttgcctagatgtaaaccaggattcctacagctcatcgtaaacaggagagtaggcctcatatgcagcagcagcaacagcaaccagaacgctattctgtaacagctggtggacttgcacgtgggacctattctccagtttgtgaggggctgcaaagatcccggtttgcatttggtctgcaaataattttttccattgatttgacctttatctaacacaaatttcaggtagcaacagtgggtctccggttgtggaaccatttggatcattcacgatggatttatttactcctcacagtgacctggacctctctatcaattttagtgctaatactgatgagcaatatactcgcaagcaaatgatctctattatcaagaaattttccaaggttctattttcttatcagaggagtggaattttctgtggggttttacctattgtaagtgctagggtgcctatactgaaggttattgatcgtggcacaggggtcgaatgtgatatttcggttgaaaacaaagatggcatgacaaggtcaatgatcattaaatttgtttcctcacttgatgaaaggtttcagatactaagttacttggttaagttctgggctaaggtacatgatctgaataccccaagacaactaactatgagctccatgtcaattatttcactagttgctttccatttgcagaaaaaatggattttactccattttccttaatggtagtgtttgagtagcaactcattagatgcatggctaagaagataagcatcaatgtgcagtgcagacccggcatcctccaatattgcctgcgttctctgacttgttaaaaggttactctatgatgcttgttctttgtttttccttttactggcattattctgctaagttttcaactgaaaccacggataactttctatattgtcattcttgcagatgggttagattgcgaaagcattgagaggaatgctttacggtttagggattttgggagtagaaataaagaatctgtcgctgaactgtttgtatcattgataagtaaactattgtcagcagagagtttatgggagcatgggctgtgcgcaagcaattttgaagcgtcatggatctcaaagacctggaagaaaggagtaggcaatttaagtgttgaagatttcttggaccggtcgcaaaattttgcaaggtcagtgggaaaggtgcagatgcagaagatttgcaaatgccttagagaatgtgctttgaatttgttagatttcatgagagggaaaatggacacaacgaagctgaagacccttttatttgggcggcttagcccagacgaattagtcagcaaacctcgtctgaagcatgtcaagagaaaaaggaattgggaacggaccccgcaagggggaagatgtgtgctccagaagagtgcaaagcatgctggtagtgctactggcagtgattcattacccactcctaacaaggtcttgcatcatgcactccattatcgagttgctggccatcagtctagcattcatcagtttgtgcccattattcgatggccacgaatcattccttctggttttggctatggattatcgcttgggattccatcagttgctcctcaccttggcaagggaatactgggcaagccaccaatcattccttctggttttggctacggattgtcgcttgagattccatcagttgctcctcaccttggtaacggaatactgggcaagccaccaagtaatataacacccttagatcaacggagctcaactcaactagtgcacgtacggaatccacaccagcatacatgtcagcaatcatgtggcggagctatggagccgagcagctccggcgtggcttaatgataaggtccggtgatgagcagctctagtagcggttaggagtttgaggttagatttagggtgtgtttggtttgacttttggctttggcttttgccccctaaaagttaaaagccaaccaaagggctggatacaggaagcagcttttttctaaaagccgactttctcgtagtgtaaatctgaaagcacccctgaacctgcttttagtggcttttcggatggaactatgaaaacatatatcgaagaatttttaacgacttttagtggttttcactaaacggtttttagattttttaacagcttacaacctacaacagctttttacacagctcacagcctacaacaacttttttccatagccacagcccaaccaaacagacccttgatgtggagctccctcttgtgttgaggcacttttcattgctcttgttagttcaagttttagttttttt

SEQ ID NO: 68574 - DNA, 2201 bp, Zea Mays
ggtgttccttcgccatggctactctggcggccatctcctccgtgtcttatgacacagacaccgattccgactcctcgcggttactctctctctctaatttccccgtccaaccccaagttcaatctactccatgggagacgatcgatttggtgcagcgaggcaagcacatgggattctcaagtgttaagcaggcatgctgaatgtctggagctggaggagttgactgcaatatcagtcaatcccagtctgcttccagctttgaatcagttgcttctcgaggcgtatgccattctacgtcccaagccgcttgactatgaccagcgcaacaccttggttgatgtcttcaggaagatggtgaatcaaagatttggtagcaacagtgggtctccggttgtggaaccatttggatcattcacgatggatttatttactcctcacagtgacctggacctctctatcaattttagtgctaatactgatgagcaatatactcgcaagcaaatgatctctattatcaagaaattttccaaggttctattttcttatcagaggagtggaattttctgtggggttttacctattgtaagtgctagggtgcctatactgaaggttattgatcgtggcacaggggtcgaatgtgatatttcggttgaaaacaaagatggcatgacaaggtcaatgatcattaaatttgtttcctcacttgatgaaaggtttcagatactaagttacttggttaagttctgggctaaggtacatgatctgaataccccaagacaactaactatgagctccatgtcaattatttcactagttgctttccatttgcagatgggttagattgcgaaagcattgagaggaatgctttacggtttagggattttgggagtagaaataaagaatctgtcgctgaactgtttgtatcattgataagtaaactattgtcagcagagagtttatgggagcatgggctgtgcgcaagcaattttgaagcgtcatggatctcaaagacctggaagaaaggagtaggcaatttaagtgttgaagatttcttggaccggtcgcaaaattttgcaaggtcagtgggaaaggtgcagatgcagaagatttgcaaatgccttagagaatgtgctttgaatttgttagatttcatgagagggaaaatggacacaacgaagctgaagacccttttatttgggcggcttagcccagacgaattagtcagcaaacctcgtctgaagcatgtcaagagaaaaaggaattgggaacggaccccgcaagggggaagatgtgtgctccagaagagtgcaaagcatgctggtagtgctactggcagtgattcattacccactcctaacaaggtcttgcatcatgcactccattatcgagttgctggccatcagtctagcattcatcagtttgtgcccattattcgatggccacgaatcattccttctggttttggctatggattatcgcttgggattccatcagttgctcctcaccttggcaagggaatactgggcaagccaccaatcattccttctggttttggctacggattgtcgcttgagattccatcagttgctcctcaccttggtaacggaatactgggcaagccaccaagtaatataacacccttagatcaacggagctcaactcaactagtgcacgtacggaatccacaccagcatacatgtcagcaatcatgtggcggagctatggagccgagcagctccggcgtggcttaatgataaggtccggtgatgagcagctctagtagcggttaggagtttgaggttagatttagggtgtgtttggtttgacttttggctttggcttttgccccctaaaagttaaaagccaaccaaagggctggatacaggaagcagcttttttctaaaagccgactttctcgtagtgtaaatctgaaagcacccctgaacctgcttttagtggcttttcggatggaactatgaaaacatatatcgaagaatttttaacgacttttagtggttttcactaaacggtttttagattttttaacagcttacaacctacaacagctttttacacagctcacagcctacaacaacttttttccatagccacagcccaaccaaacagacccttgatgtggagctccctcttgtgttgaggcacttttcattgctcttgttagttcaagttttagttttttt

SEQ ID NO: 68575 - DNA, 2497 bp, Zea Mays
ggtgttccttcgccatggctactctggcggccatctcctccgtgtcttatgacacagacaccgattccgactcctcgcggttactctctctctctaatttccccgtccaaccccaagttcaatctactccatgggagacgatcgatttggttcccttctctctctctttcggggtgcagcgaggcaagcacatgggattctcaagtgttaagcaggcatgctgaatgtctggagctggaggagttgactgcaatatcagtcaatcccagtctgcttccagctttgaatcagttgcttctcgaggcgtatgccattctacgtcccaagccgcttgactatgaccagcgcaacaccttggttgatgtcttcaggaagatggtgaatcaaagatttgcctagatgtaaaccaggattcctacagctcatcgtaaacaggagagtaggcctcatatgcagcagcagcaacagcaaccagaacgctattctgtaacagctggtggacttgcacgtgggacctattctccagtttgtgaggggctgcaaagatcccggtttgcatttggtctgcaaataattttttccattgatttgacctttatctaacacaaatttcaggtagcaacagtgggtctccggttgtggaaccatttggatcattcacgatggatttatttactcctcacagtgacctggacctctctatcaattttagtgctaatactgatgagcaatatactcgcaagcaaatgatctctattatcaagaaattttccaaggttctattttcttatcagaggagtggaattttctgtggggttttacctattgtaagtgctagggtgcctatactgaaggttattgatcgtggcacaggggtcgaatgtgatatttcggttgaaaacaaagatggcatgacaaggtcaatgatcattaaatttgtttcctcacttgatgaaaggtttcagatactaagttacttggttaagttctgggctaaggtacatgatctgaataccccaagacaactaactatgagctccatgtcaattatttcactagttgctttccatttgcagtgcagacccggcatcctccaatattgcctgcgttctctgacttgttaaaagatgggttagattgcgaaagcattgagaggaatgctttacggtttagggattttgggagtagaaataaagaatctgtcgctgaactgtttgtatcattgataagtaaactattgtcagcagagagtttatgggagcatgggctgtgcgcaagcaattttgaagcgtcatggatctcaaagacctggaagaaaggagtaggcaatttaagtgttgaagatttcttggaccggtcgcaaaattttgcaaggtcagtgggaaaggtgcagatgcagaagatttgcaaatgccttagagaatgtgctttgaatttgttagatttcatgagagggaaaatggacacaacgaagctgaagacccttttatttgggcggcttagcccagacgaattagtcagcaaacctcgtctgaagcatgtcaagagaaaaaggaattgggaacggaccccgcaagggggaagatgtgtgctccagaagagtgcaaagcatgctggtagtgctactggcagtgattcattacccactcctaacaaggtcttgcatcatgcactccattatcgagttgctggccatcagtctagcattcatcagtttgtgcccattattcgatggccacgaatcattccttctggttttggctatggattatcgcttgggattccatcagttgctcctcaccttggcaagggaatactgggcaagccaccaatcattccttctggttttggctacggattgtcgcttgagattccatcagttgctcctcaccttggtaacggaatactgggcaagccaccaagtaatataacacccttagatcaacggagctcaactcaactagtgcacgtacggaatccacaccagcatacatgtcagcaatcatgtggcggagctatggagccgagcagctccggcgtggcttaatgataaggtccggtgatgagcagctctagtagcggttaggagtttgaggttagatttagggtgtgtttggtttgacttttggctttggcttttgccccctaaaagttaaaagccaaccaaagggctggatacaggaagcagcttttttctaaaagccgactttctcgtagtgtaaatctgaaagcacccctgaacctgcttttagtggcttttcggatggaactatgaaaacatatatcgaagaatttttaacgacttttagtggttttcactaaacggtttttagattttttaacagcttacaacctacaacagctttttacacagctcacagcctacaacaacttttttccatagccacagcccaaccaaacagacccttgatgtggagctccctcttgtgttgaggcacttttcattgctcttgttagttcaagttttagttttttt

SEQ ID NO: 68576 - DNA, 2167 bp, Zea Mays
ggtgttccttcgccatggctactctggcggccatctcctccgtgtcttatgacacagacaccgattccgactcctcgcggtgcagcgaggcaagcacatgggattctcaagtgttaagcaggcatgctgaatgtctggagctggaggagttgactgcaatatcagtcaatcccagtctgcttccagctttgaatcagttgcttctcgaggcgtatgccattctacgtcccaagccgcttgactatgaccagcgcaacaccttggttgatgtcttcaggaagatggtgaatcaaagatttggtagcaacagtgggtctccggttgtggaaccatttggatcattcacgatggatttatttactcctcacagtgacctggacctctctatcaattttagtgctaatactgatgagcaatatactcgcaagcaaatgatctctattatcaagaaattttccaaggttctattttcttatcagaggagtggaattttctgtggggttttacctattgtaagtgctagggtgcctatactgaaggttattgatcgtggcacaggggtcgaatgtgatatttcggttgaaaacaaagatggcatgacaaggtcaatgatcattaaatttgtttcctcacttgatgaaaggtttcagatactaagttacttggttaagttctgggctaaggtacatgatctgaataccccaagacaactaactatgagctccatgtcaattatttcactagttgctttccatttgcagtgcagacccggcatcctccaatattgcctgcgttctctgacttgttaaaagatgggttagattgcgaaagcattgagaggaatgctttacggtttagggattttgggagtagaaataaagaatctgtcgctgaactgtttgtatcattgataagtaaactattgtcagcagagagtttatgggagcatgggctgtgcgcaagcaattttgaagcgtcatggatctcaaagacctggaagaaaggagttgaagatttcttggaccggtcgcaaaattttgcaaggtcagtgggaaaggtgcagatgcagaagatttgcaaatgccttagagaatgtgctttgaatttgttagatttcatgagagggaaaatggacacaacgaagctgaagacccttttatttgggcggcttagcccagacgaattagtcagcaaacctcgtctgaagcatgtcaagagaaaaaggaattgggaacggaccccgcaagggggaagatgtgtgctccagaagagtgcaaagcatgctggtagtgctactggcagtgattcattacccactcctaacaaggtcttgcatcatgcactccattatcgagttgctggccatcagtctagcattcatcagtttgtgcccattattcgatggccacgaatcattccttctggttttggctatggattatcgcttgggattccatcagttgctcctcaccttggcaagggaatactgggcaagccaccaatcattccttctggttttggctacggattgtcgcttgagattccatcagttgctcctcaccttggtaacggaatactgggcaagccaccaagtaatataacacccttagatcaacggagctcaactcaactagtgcacgtacggaatccacaccagcatacatgtcagcaatcatgtggcggagctatggagccgagcagctccggcgtggcttaatgataaggtccggtgatgagcagctctagtagcggttaggagtttgaggttagatttagggtgtgtttggtttgacttttggctttggcttttgccccctaaaagttaaaagccaaccaaagggctggatacaggaagcagcttttttctaaaagccgactttctcgtagtgtaaatctgaaagcacccctgaacctgcttttagtggcttttcggatggaactatgaaaacatatatcgaagaatttttaacgacttttagtggttttcactaaacggtttttagattttttaacagcttacaacctacaacagctttttacacagctcacagcctacaacaacttttttccatagccacagcccaaccaaacagacccttgatgtggagctccctcttgtgttgaggcacttttcattgctcttgttagttcaagttttagttttttt

SEQ ID NO: 68577 - DNA, 2352 bp, Zea Mays
ggtgttccttcgccatggctactctggcggccatctcctccgtgtcttatgacacagacaccgattccgactcctcgcggtgcagcgaggcaagcacatgggattctcaagtgttaagcaggcatgctgaatgtctggagctggaggagttgactgcaatatcagtcaatcccagtctgcttccagctttgaatcagttgcttctcgaggcgtatgccattctacgtcccaagccgcttgactatgaccagcgcaacaccttggttgatgtcttcaggaagatggtgaatcaaagatttgcctagatgtaaaccaggattcctacagctcatcgtaaacaggagagtaggcctcatatgcagcagcagcaacagcaaccagaacgctattctgtaacagctggtggacttgcacgtgggacctattctccagtttgtgaggggctgcaaagatcccggtttgcatttggtctgcaaataattttttccattgatttgacctttatctaacacaaatttcaggtagcaacagtgggtctccggttgtggaaccatttggatcattcacgatggatttatttactcctcacagtgacctggacctctctatcaattttagtgctaatactgatgagcaatatactcgcaagcaaatgatctctattatcaagaaattttccaaggttctattttcttatcagaggagtggaattttctgtggggttttacctattgtaagtgctagggtgcctatactgaaggttattgatcgtggcacaggggtcgaatgtgatatttcggttgaaaacaaagatggcatgacaaggtcaatgatcattaaatttgtttcctcacttgatgaaaggtttcagatactaagttacttggttaagttctgggctaaggtacatgatctgaataccccaagacaactaactatgagctccatgtcaattatttcactagttgctttccatttgcagatgggttagattgcgaaagcattgagaggaatgctttacggtttagggattttgggagtagaaataaagaatctgtcgctgaactgtttgtatcattgataagtaaactattgtcagcagagagtttatgggagcatgggctgtgcgcaagcaattttgaagcgtcatggatctcaaagacctggaagaaaggagtaggcaatttaagtgttgaagatttcttggaccggtcgcaaaattttgcaaggtcagtgggaaaggtgcagatgcagaagatttgcaaatgccttagagaatgtgctttgaatttgttagatttcatgagagggaaaatggacacaacgaagctgaagacccttttatttgggcggcttagcccagacgaattagtcagcaaacctcgtctgaagcatgtcaagagaaaaaggaattgggaacggaccccgcaagggggaagatgtgtgctccagaagagtgcaaagcatgctggtagtgctactggcagtgattcattacccactcctaacaaggtcttgcatcatgcactccattatcgagttgctggccatcagtctagcattcatcagtttgtgcccattattcgatggccacgaatcattccttctggttttggctatggattatcgcttgggattccatcagttgctcctcaccttggcaagggaatactgggcaagccaccaatcattccttctggttttggctacggattgtcgcttgagattccatcagttgctcctcaccttggtaacggaatactgggcaagccaccaagtaatataacacccttagatcaacggagctcaactcaactagtgcacgtacggaatccacaccagcatacatgtcagcaatcatgtggcggagctatggagccgagcagctccggcgtggcttaatgataaggtccggtgatgagcagctctagtagcggttaggagtttgaggttagatttagggtgtgtttggtttgacttttggctttggcttttgccccctaaaagttaaaagccaaccaaagggctggatacaggaagcagcttttttctaaaagccgactttctcgtagtgtaaatctgaaagcacccctgaacctgcttttagtggcttttcggatggaactatgaaaacatatatcgaagaatttttaacgacttttagtggttttcactaaacggtttttagattttttaacagcttacaacctacaacagctttttacacagctcacagcctacaacaacttttttccatagccacagcccaaccaaacagacccttgatgtggagctccctcttgtgttgaggcacttttcattgctcttgttagttcaagttttagttttttt

SEQ ID NO: 68578 - DNA, 2245 bp, Zea Mays
ggtgttccttcgccatggctactctggcggccatctcctccgtgtcttatgacacagacaccgattccgactcctcgcggtgcagcgaggcaagcacatgggattctcaagtgttaagcaggcatgctgaatgtctggagctggaggagttgactgcaatatcagtcaatcccagtctgcttccagctttgaatcagttgcttctcgaggcgtatgccattctacgtcccaagccgcttgactatgaccagcgcaacaccttggttgatgtcttcaggaagatggtgaatcaaagatttgcctagatgtaaaccaggattcctacagctcatcgtaaacaggagagtaggcctcatatgcagcagcagcaacagcaaccagaacgctattctgtaacagctggtggacttgcacgtgggacctattctccagtttgtgaggggctgcaaagatcccggtttgcatttggtctgcaaataattttttccattgatttgacctttatctaacacaaatttcaggtagcaacagtgggtctccggttgtggaaccatttggatcattcacgatggatttatttactcctcacagtgacctggacctctctatcaattttagtgctaatactgatgagcaatatactcgcaagcaaatgatctctattatcaagaaattttccaaggttctattttcttatcagaggagtggaattttctgtggggttttacctattgtaagtgctagggtgcctatactgaaggttattgatcgtggcacaggggtcgaatgtgatatttcggttgaaaacaaagatggcatgacaaggtcaatgatcattaaatttgtttcctcacttgatgaaaggtttcagatactaagttacttggttaagttctgggctaaggtacatgatctgaataccccaagacaactaactatgagctccatgtcaattatttcactagttgctttccatttgcagctattgtcagcagagagtttatgggagcatgggctgtgcgcaagcaattttgaagcgtcatggatctcaaagacctggaagaaaggagtaggcaatttaagtgttgaagatttcttggaccggtcgcaaaattttgcaaggtcagtgggaaaggtgcagatgcagaagatttgcaaatgccttagagaatgtgctttgaatttgttagatttcatgagagggaaaatggacacaacgaagctgaagacccttttatttgggcggcttagcccagacgaattagtcagcaaacctcgtctgaagcatgtcaagagaaaaaggaattgggaacggaccccgcaagggggaagatgtgtgctccagaagagtgcaaagcatgctggtagtgctactggcagtgattcattacccactcctaacaaggtcttgcatcatgcactccattatcgagttgctggccatcagtctagcattcatcagtttgtgcccattattcgatggccacgaatcattccttctggttttggctatggattatcgcttgggattccatcagttgctcctcaccttggcaagggaatactgggcaagccaccaatcattccttctggttttggctacggattgtcgcttgagattccatcagttgctcctcaccttggtaacggaatactgggcaagccaccaagtaatataacacccttagatcaacggagctcaactcaactagtgcacgtacggaatccacaccagcatacatgtcagcaatcatgtggcggagctatggagccgagcagctccggcgtggcttaatgataaggtccggtgatgagcagctctagtagcggttaggagtttgaggttagatttagggtgtgtttggtttgacttttggctttggcttttgccccctaaaagttaaaagccaaccaaagggctggatacaggaagcagcttttttctaaaagccgactttctcgtagtgtaaatctgaaagcacccctgaacctgcttttagtggcttttcggatggaactatgaaaacatatatcgaagaatttttaacgacttttagtggttttcactaaacggtttttagattttttaacagcttacaacctacaacagctttttacacagctcacagcctacaacaacttttttccatagccacagcccaaccaaacagacccttgatgtggagctccctcttgtgttgaggcacttttcattgctcttgttagttcaagttttagttttttt

SEQ ID NO: 68579 - DNA, 2341 bp, Zea Mays
ggtgttccttcgccatggctactctggcggccatctcctccgtgtcttatgacacagacaccgattccgactcctcgcggtgcagcgaggcaagcacatgggattctcaagtgttaagcaggcatgctgaatgtctggagctggaggagttgactgcaatatcagtcaatcccagtctgcttccagctttgaatcagttgcttctcgaggcgtatgccattctacgtcccaagccgcttgactatgaccagcgcaacaccttggttgatgtcttcaggaagatggtgaatcaaagatttgcctagatgtaaaccaggattcctacagctcatcgtaaacaggagagtaggcctcatatgcagcagcagcaacagcaaccagaacgctattctgtaacagctggtggacttgcacgtagcaacagtgggtctccggttgtggaaccatttggatcattcacgatggatttatttactcctcacagtgacctggacctctctatcaattttagtgctaatactgatgagcaatatactcgcaagcaaatgatctctattatcaagaaattttccaaggttctattttcttatcagaggagtggaattttctgtggggttttacctattgtaagtgctagggtgcctatactgaaggttattgatcgtggcacaggggtcgaatgtgatatttcggttgaaaacaaagatggcatgacaaggtcaatgatcattaaatttgtttcctcacttgatgaaaggtttcagatactaagttacttggttaagttctgggctaaggtacatgatctgaataccccaagacaactaactatgagctccatgtcaattatttcactagttgctttccatttgcagcaactcattagatgcatggctaagaagataagcatcaatgtgcagtgcagacccggcatcctccaatattgcctgcgttctctgacttgttaaaagatgggttagattgcgaaagcattgagaggaatgctttacggtttagggattttgggagtagaaataaagaatctgtcgctgaactgtttgtatcattgataagtaaactattgtcagcagagagtttatgggagcatgggctgtgcgcaagcaattttgaagcgtcatggatctcaaagacctggaagaaaggagtaggcaatttaagtgttgaagatttcttggaccggtcgcaaaattttgcaaggtcagtgggaaaggtgcagatgcagaagatttgcaaatgccttagagaatgtgctttgaatttgttagatttcatgagagggaaaatggacacaacgaagctgaagacccttttatttgggcggcttagcccagacgaattagtcagcaaacctcgtctgaagcatgtcaagagaaaaaggaattgggaacggaccccgcaagggggaagatgtgtgctccagaagagtgcaaagcatgctggtagtgctactggcagtgattcattacccactcctaacaaggtcttgcatcatgcactccattatcgagttgctggccatcagtctagcattcatcagtttgtgcccattattcgatggccacgaatcattccttctggttttggctatggattatcgcttgggattccatcagttgctcctcaccttggcaagggaatactgggcaagccaccaatcattccttctggttttggctacggattgtcgcttgagattccatcagttgctcctcaccttggtaacggaatactgggcaagccaccaagtaatataacacccttagatcaacggagctcaactcaactagtgcacgtacggaatccacaccagcatacatgtcagcaatcatgtggcggagctatggagccgagcagctccggcgtggcttaatgataaggtccggtgatgagcagctctagtagcggttaggagtttgaggttagatttagggtgtgtttggtttgacttttggctttggcttttgccccctaaaagttaaaagccaaccaaagggctggatacaggaagcagcttttttctaaaagccgactttctcgtagtgtaaatctgaaagcacccctgaacctgcttttagtggcttttcggatggaactatgaaaacatatatcgaagaatttttaacgacttttagtggttttcactaaacggtttttagattttttaacagcttacaacctacaacagctttttacacagctcacagcctacaacaacttttttccatagccacagcccaaccaaacagacccttgatgtggagctccctcttgtgttgaggcacttttcattgctcttgttagttcaagttttagttttttt

SEQ ID NO: 68580 - DNA, 2271 bp, Zea Mays
ggtgttccttcgccatggctactctggcggccatctcctccgtgtcttatgacacagacaccgattccgactcctcgcggttactctctctctctaatttccccgtccaaccccaagttcaatctactccatgggagacgatcgatttggttcccttctctctctctttcggggtgcagcgaggcaagcacatgggattctcaagtgttaagcaggcatgctgaatgtctggagctggaggagttgactgcaatatcagtcaatcccagtctgcttccagctttgaatcagttgcttctcgaggcgtatgccattctacgtcccaagccgcttgactatgaccagcgcaacaccttggttgatgtcttcaggaagatggtgaatcaaagatttggtagcaacagtgggtctccggttgtggaaccatttggatcattcacgatggatttatttactcctcacagtgacctggacctctctatcaattttagtgctaatactgatgagcaatatactcgcaagcaaatgatctctattatcaagaaattttccaaggttctattttcttatcagaggagtggaattttctgtggggttttacctattgtaagtgctagggtgcctatactgaaggttattgatcgtggcacaggggtcgaatgtgatatttcggttgaaaacaaagatggcatgacaaggtcaatgatcattaaatttgtttcctcacttgatgaaaggtttcagatactaagttacttggttaagttctgggctaaggtacatgatctgaataccccaagacaactaactatgagctccatgtcaattatttcactagttgctttccatttgcagacccggcatcctccaatattgcctgcgttctctgacttgttaaaagatgggttagattgcgaaagcattgagaggaatgctttacggtttagggattttgggagtagaaataaagaatctgtcgctgaactgtttgtatcattgataagtaaactattgtcagcagagagtttatgggagcatgggctgtgcgcaagcaattttgaagcgtcatggatctcaaagacctggaagaaaggagtaggcaatttaagtgttgaagatttcttggaccggtcgcaaaattttgcaaggtcagtgggaaaggtgcagatgcagaagatttgcaaatgccttagagaatgtgctttgaatttgttagatttcatgagagggaaaatggacacaacgaagctgaagacccttttatttgggcggcttagcccagacgaattagtcagcaaacctcgtctgaagcatgtcaagagaaaaaggaattgggaacggaccccgcaagggggaagatgtgtgctccagaagagtgcaaagcatgctggtagtgctactggcagtgattcattacccactcctaacaaggtcttgcatcatgcactccattatcgagttgctggccatcagtctagcattcatcagtttgtgcccattattcgatggccacgaatcattccttctggttttggctatggattatcgcttgggattccatcagttgctcctcaccttggcaagggaatactgggcaagccaccaatcattccttctggttttggctacggattgtcgcttgagattccatcagttgctcctcaccttggtaacggaatactgggcaagccaccaagtaatataacacccttagatcaacggagctcaactcaactagtgcacgtacggaatccacaccagcatacatgtcagcaatcatgtggcggagctatggagccgagcagctccggcgtggcttaatgataaggtccggtgatgagcagctctagtagcggttaggagtttgaggttagatttagggtgtgtttggtttgacttttggctttggcttttgccccctaaaagttaaaagccaaccaaagggctggatacaggaagcagcttttttctaaaagccgactttctcgtagtgtaaatctgaaagcacccctgaacctgcttttagtggcttttcggatggaactatgaaaacatatatcgaagaatttttaacgacttttagtggttttcactaaacggtttttagattttttaacagcttacaacctacaacagctttttacacagctcacagcctacaacaacttttttccatagccacagcccaaccaaacagacccttgatgtggagctccctcttgtgttgaggcacttttcattgctcttgttagttcaagttttagttttttt

SEQ ID NO: 68581 - DNA, 2334 bp, Zea Mays
ggtgttccttcgccatggctactctggcggccatctcctccgtgtcttatgacacagacaccgattccgactcctcgcggtgcagcgaggcaagcacatgggattctcaagtgttaagcaggcatgctgaatgtctggagctggaggagttgactgcaatatcagtcaatcccagtctgcttccagctttgaatcagttgcttctcgaggcgtatgccattctacgtcccaagccgcttgactatgaccagcgcaacaccttggttgatgtcttcaggaagatggtgaatcaaagatttgcctagatgtaaaccaggattcctacagctcatcgtaaacaggagagtaggcctcatatgcagcagcagcaacagcaaccagaacgctattctgtaacagctggtggacttgcacgtgggacctattctccagtttgtgaggggctgcaaagatcccggtagcaacagtgggtctccggttgtggaaccatttggatcattcacgatggatttatttactcctcacagtgacctggacctctctatcaattttagtgctaatactgatgagcaatatactcgcaagcaaatgatctctattatcaagaaattttccaaggttctattttcttatcagaggagtggaattttctgtggggttttacctattgtaagtgctagggtgcctatactgaaggttattgatcgtggcacaggggtcgaatgtgatatttcggttgaaaacaaagatggcatgacaaggtcaatgatcattaaatttgtttcctcacttgatgaaaggtttcagatactaagttacttggttaagttctgggctaaggtacatgatctgaataccccaagacaactaactatgagctccatgtcaattatttcactagttgctttccatttgcagacccggcatcctccaatattgcctgcgttctctgacttgttaaaagatgggttagattgcgaaagcattgagaggaatgctttacggtttagggattttgggagtagaaataaagaatctgtcgctgaactgtttgtatcattgataagtaaactattgtcagcagagagtttatgggagcatgggctgtgcgcaagcaattttgaagcgtcatggatctcaaagacctggaagaaaggagtaggcaatttaagtgttgaagatttcttggaccggtcgcaaaattttgcaaggtcagtgggaaaggtgcagatgcagaagatttgcaaatgccttagagaatgtgctttgaatttgttagatttcatgagagggaaaatggacacaacgaagctgaagacccttttatttgggcggcttagcccagacgaattagtcagcaaacctcgtctgaagcatgtcaagagaaaaaggaattgggaacggaccccgcaagggggaagatgtgtgctccagaagagtgcaaagcatgctggtagtgctactggcagtgattcattacccactcctaacaaggtcttgcatcatgcactccattatcgagttgctggccatcagtctagcattcatcagtttgtgcccattattcgatggccacgaatcattccttctggttttggctatggattatcgcttgggattccatcagttgctcctcaccttggcaagggaatactgggcaagccaccaatcattccttctggttttggctacggattgtcgcttgagattccatcagttgctcctcaccttggtaacggaatactgggcaagccaccaagtaatataacacccttagatcaacggagctcaactcaactagtgcacgtacggaatccacaccagcatacatgtcagcaatcatgtggcggagctatggagccgagcagctccggcgtggcttaatgataaggtccggtgatgagcagctctagtagcggttaggagtttgaggttagatttagggtgtgtttggtttgacttttggctttggcttttgccccctaaaagttaaaagccaaccaaagggctggatacaggaagcagcttttttctaaaagccgactttctcgtagtgtaaatctgaaagcacccctgaacctgcttttagtggcttttcggatggaactatgaaaacatatatcgaagaatttttaacgacttttagtggttttcactaaacggtttttagattttttaacagcttacaacctacaacagctttttacacagctcacagcctacaacaacttttttccatagccacagcccaaccaaacagacccttgatgtggagctccctcttgtgttgaggcacttttcattgctcttgttagttcaagttttagttttttt

SEQ ID NO: 68582 - DNA, 2606 bp, Zea Mays
ggtgttccttcgccatggctactctggcggccatctcctccgtgtcttatgacacagacaccgattccgactcctcgcggtgcagcgaggcaagcacatgggattctcaagtgttaagcaggcatgctgaatgtctggagctggaggagttgactgcaatatcagtcaatcccagtctgcttccagctttgaatcagttgcttctcgaggcgtatgccattctacgtcccaagccgcttgactatgaccagcgcaacaccttggttgatgtcttcaggaagatggtgaatcaaagatttgcctagatgtaaaccaggattcctacagctcatcgtaaacaggagagtaggcctcatatgcagcagcagcaacagcaaccagaacgctattctgtaacagctggtggacttgcacgtagcaacagtgggtctccggttgtggaaccatttggatcattcacgatggatttatttactcctcacagtgacctggacctctctatcaattttagtgctaatactgatgagcaatatactcgcaagcaaatgatctctattatcaagaaattttccaaggttctattttcttatcagaggagtggaattttctgtggggttttacctattgtaagtgctagggtgcctatactgaaggttattgatcgtggcacaggggtcgaatgtgatatttcggttgaaaacaaagatggcatgacaaggtcaatgatcattaaatttgtttcctcacttgatgaaaggtttcagatactaagttacttggttaagttctgggctaaggtaccatgggttaattattattttggtttggttattaaattgcaagtaactgtcccattaccttttgttttaattaattgacctactaaccaatctgcatttgaagacacaaactttggattcatttgtatagaaaataagacgatacttattggggaaattatgaattatcttctttactatcgacaaattctggatatgctttatgccagttcagaaaacatgatagatacccttcttctacacttcctcagtctaaattcctacacttcatgctattgcattctatgtaccagaaaaaatggattttactccattttccttaatggtagtgtttgagtagcaactcattagatgcatggctaagaagataagcatcaatgtgcagtgcagacccggcatcctccaatattgcctgcgttctctgacttgttaaaagatgggttagattgcgaaagcattgagaggaatgctttacggtttagggattttgggagtagaaataaagaatctgtcgctgaactgtttgtatcattgataagtaaactattgtcagcagagagtttatgggagcatgggctgtgcgcaagcaattttgaagcgtcatggatctcaaagacctggaagaaaggagtaggcaatttaagtgttgaagatttcttggaccggtcgcaaaattttgcaaggtcagtgggaaaggtgcagatgcagaagatttgcaaatgccttagagaatgtgctttgaatttgttagatttcatgagagggaaaatggacacaacgaagctgaagacccttttatttgggcggcttagcccagacgaattagtcagcaaacctcgtctgaagcatgtcaagagaaaaaggaattgggaacggaccccgcaagggggaagatgtgtgctccagaagagtgcaaagcatgctggtagtgctactggcagtgattcattacccactcctaacaaggtcttgcatcatgcactccattatcgagttgctggccatcagtctagcattcatcagtttgtgcccattattcgatggccacgaatcattccttctggttttggctatggattatcgcttgggattccatcagttgctcctcaccttggcaagggaatactgggcaagccaccaatcattccttctggttttggctacggattgtcgcttgagattccatcagttgctcctcaccttggtaacggaatactgggcaagccaccaagtaatataacacccttagatcaacggagctcaactcaactagtgcacgtacggaatccacaccagcatacatgtcagcaatcatgtggcggagctatggagccgagcagctccggcgtggcttaatgataaggtccggtgatgagcagctctagtagcggttaggagtttgaggttagatttagggtgtgtttggtttgacttttggctttggcttttgccccctaaaagttaaaagccaaccaaagggctggatacaggaagcagcttttttctaaaagccgactttctcgtagtgtaaatctgaaagcacccctgaacctgcttttagtggcttttcggatggaactatgaaaacatatatcgaagaatttttaacgacttttagtggttttcactaaacggtttttagattttttaacagcttacaacctacaacagctttttacacagctcacagcctacaacaacttttttccatagccacagcccaaccaaacagacccttgatgtggagctccctcttgtgttgaggcacttttcattgctcttgttagttcaagttttagttttttt

SEQ ID NO: 68583 - DNA, 2294 bp, Zea Mays
ggtgttccttcgccatggctactctggcggccatctcctccgtgtcttatgacacagacaccgattccgactcctcgcggtgcagcgaggcaagcacatgggattctcaagtgttaagcaggcatgctgaatgtctggagctggaggagttgactgcaatatcagtcaatcccagtctgcttccagctttgaatcagttgcttctcgaggcgtatgccattctacgtcccaagccgcttgactatgaccagcgcaacaccttggttgatgtcttcaggaagatggtgaatcaaagatttgcctagatgtaaaccaggattcctacagctcatcgtaaacaggagagtaggcctcatatgcagcagcagcaacagcaaccagaacgctattctgtaacagctggtggacttgcacgtggtagcaacagtgggtctccggttgtggaaccatttggatcattcacgatggatttatttactcctcacagtgacctggacctctctatcaattttagtgctaatactgatgagcaatatactcgcaagcaaatgatctctattatcaagaaattttccaaggttctattttcttatcagaggagtggaattttctgtggggttttacctattgtaagtgctagggtgcctatactgaaggttattgatcgtggcacaggggtcgaatgtgatatttcggttgaaaacaaagatggcatgacaaggtcaatgatcattaaatttgtttcctcacttgatgaaaggtttcagatactaagttacttggttaagttctgggctaaggtacatgatctgaataccccaagacaactaactatgagctccatgtcaattatttcactagttgctttccatttgcagacccggcatcctccaatattgcctgcgttctctgacttgttaaaagatgggttagattgcgaaagcattgagaggaatgctttacggtttagggattttgggagtagaaataaagaatctgtcgctgaactgtttgtatcattgataagtaaactattgtcagcagagagtttatgggagcatgggctgtgcgcaagcaattttgaagcgtcatggatctcaaagacctggaagaaaggagtaggcaatttaagtgttgaagatttcttggaccggtcgcaaaattttgcaaggtcagtgggaaaggtgcagatgcagaagatttgcaaatgccttagagaatgtgctttgaatttgttagatttcatgagagggaaaatggacacaacgaagctgaagacccttttatttgggcggcttagcccagacgaattagtcagcaaacctcgtctgaagcatgtcaagagaaaaaggaattgggaacggaccccgcaagggggaagatgtgtgctccagaagagtgcaaagcatgctggtagtgctactggcagtgattcattacccactcctaacaaggtcttgcatcatgcactccattatcgagttgctggccatcagtctagcattcatcagtttgtgcccattattcgatggccacgaatcattccttctggttttggctatggattatcgcttgggattccatcagttgctcctcaccttggcaagggaatactgggcaagccaccaatcattccttctggttttggctacggattgtcgcttgagattccatcagttgctcctcaccttggtaacggaatactgggcaagccaccaagtaatataacacccttagatcaacggagctcaactcaactagtgcacgtacggaatccacaccagcatacatgtcagcaatcatgtggcggagctatggagccgagcagctccggcgtggcttaatgataaggtccggtgatgagcagctctagtagcggttaggagtttgaggttagatttagggtgtgtttggtttgacttttggctttggcttttgccccctaaaagttaaaagccaaccaaagggctggatacaggaagcagcttttttctaaaagccgactttctcgtagtgtaaatctgaaagcacccctgaacctgcttttagtggcttttcggatggaactatgaaaacatatatcgaagaatttttaacgacttttagtggttttcactaaacggtttttagattttttaacagcttacaacctacaacagctttttacacagctcacagcctacaacaacttttttccatagccacagcccaaccaaacagacccttgatgtggagctccctcttgtgttgaggcacttttcattgctcttgttagttcaagttttagttttttt

SEQ ID NO: 68584 - DNA, 2555 bp, Zea Mays
ggtgttccttcgccatggctactctggcggccatctcctccgtgtcttatgacacagacaccgattccgactcctcgcggtgcagcgaggcaagcacatgggattctcaagtgttaagcaggcatgctgaatgtctggagctggaggagttgactgcaatatcagtcaatcccagtctgcttccagctttgaatcagttgcttctcgaggcgtatgccattctacgtcccaagccgcttgactatgaccagcgcaacaccttggttgatgtcttcaggaagatggtgaatcaaagatttggtagcaacagtgggtctccggttgtggaaccatttggatcattcacgatggatttatttactcctcacagtgacctggacctctctatcaattttagtgctaatactgatgagcaatatactcgcaagcaaatgatctctattatcaagaaattttccaaggttctattttcttatcagaggagtggaattttctgtggggttttacctattgtaagtgctagggtgcctatactgaaggttattgatcgtggcacaggggtcgaatgtgatatttcggttgaaaacaaagatggcatgacaaggtcaatgatcattaaatttgtttcctcacttgatgaaaggtttcagatactaagttacttggttaagttctgggctaaggtacatgatctgaataccccaagacaactaactatgagctccatgtcaattatttcactagttgctttccatttgcaggtaccatgggttaattattattttggtttggttattaaattgcaagtaactgtcccattaccttttgttttaattaattgacctactaaccaatctgcatttgaagacacaaactttggattcatttgtatagaaaataagacgatacttattggggaaattatgaattatcttctttactatcgacaaattctggatatgctttatgccagttcagaaaacatgatagatacccttcttctacacttcctcagtctaaattcctacacttcatgctattgcattctatgtaccagaaaaaatggattttactccattttccttaatggtagtgtttgagtagcaactcattagatgcatggctaagaagataagcatcaatgtgcagtgcagacccggcatcctccaatattgcctgcgttctctgacttgttaaaagatgggttagattgcgaaagcattgagaggaatgctttacggtttagggattttgggagtagaaataaagaatctgtcgctgaactgtttgtatcattgataagtaaactattgtcagcagagagtttatgggagcatgggctgtgcgcaagcaattttgaagcgtcatggatctcaaagacctggaagaaaggagttgaagatttcttggaccggtcgcaaaattttgcaaggtcagtgggaaaggtgcagatgcagaagatttgcaaatgccttagagaatgtgctttgaatttgttagatttcatgagagggaaaatggacacaacgaagctgaagacccttttatttgggcggcttagcccagacgaattagtcagcaaacctcgtctgaagcatgtcaagagaaaaaggaattgggaacggaccccgcaagggggaagatgtgtgctccagaagagtgcaaagcatgctggtagtgctactggcagtgattcattacccactcctaacaaggtcttgcatcatgcactccattatcgagttgctggccatcagtctagcattcatcagtttgtgcccattattcgatggccacgaatcattccttctggttttggctatggattatcgcttgggattccatcagttgctcctcaccttggcaagggaatactgggcaagccaccaatcattccttctggttttggctacggattgtcgcttgagattccatcagttgctcctcaccttggtaacggaatactgggcaagccaccaagtaatataacacccttagatcaacggagctcaactcaactagtgcacgtacggaatccacaccagcatacatgtcagcaatcatgtggcggagctatggagccgagcagctccggcgtggcttaatgataaggtccggtgatgagcagctctagtagcggttaggagtttgaggttagatttagggtgtgtttggtttgacttttggctttggcttttgccccctaaaagttaaaagccaaccaaagggctggatacaggaagcagcttttttctaaaagccgactttctcgtagtgtaaatctgaaagcacccctgaacctgcttttagtggcttttcggatggaactatgaaaacatatatcgaagaatttttaacgacttttagtggttttcactaaacggtttttagattttttaacagcttacaacctacaacagctttttacacagctcacagcctacaacaacttttttccatagccacagcccaaccaaacagacccttgatgtggagctccctcttgtgttgaggcacttttcattgctcttgttagttcaagttttagttttttt

SEQ ID NO: 68585 - DNA, 2182 bp, Zea Mays
ggtgttccttcgccatggctactctggcggccatctcctccgtgtcttatgacacagacaccgattccgactcctcgcggtgcagcgaggcaagcacatgggattctcaagtgttaagcaggcatgctgaatgtctggagctggaggagttgactgcaatatcagtcaatcccagtctgcttccagctttgaatcagttgcttctcgaggcgtatgccattctacgtcccaagccgcttgactatgaccagcgcaacaccttggttgatgtcttcaggaagatggtgaatcaaagatttggtagcaacagtgggtctccggttgtggaaccatttggatcattcacgatggatttatttactcctcacagtgacctggacctctctatcaattttagtgctaatactgatgagcaatatactcgcaagcaaatgatctctattatcaagaaattttccaaggttctattttcttatcagaggagtggaattttctgtggggttttacctattgtaagtgctagggtgcctatactgaaggttattgatcgtggcacaggggtcgaatgtgatatttcggttgaaaacaaagatggcatgacaaggtcaatgatcattaaatttgtttcctcacttgatgaaaggtttcagatactaagttacttggttaagttctgggctaaggtacatgatctgaataccccaagacaactaactatgagctccatgtcaattatttcactagttgctttccatttgcagtgcagacccggcatcctccaatattgcctgcgttctctgacttgttaaaagatgggttagattgcgaaagcattgagaggaatgctttacggtttagggattttgggagtagaaataaagaatctgtcgctgaactgtttgtatcattgataagtaaactattgtcagcagagagtttatgggagcatgggctgtgcgcaagcaattttgaagcgtcatggatctcaaagacctggaagaaaggagtaggcaatttaagtgttgaagatttcttggaccggtcgcaaaattttgcaaggtcagtgggaaaggtgcagatgcagaagatttgcaaatgccttagagaatgtgctttgaatttgttagatttcatgagagggaaaatggacacaacgaagctgaagacccttttatttgggcggcttagcccagacgaattagtcagcaaacctcgtctgaagcatgtcaagagaaaaaggaattgggaacggaccccgcaagggggaagatgtgtgctccagaagagtgcaaagcatgctggtagtgctactggcagtgattcattacccactcctaacaaggtcttgcatcatgcactccattatcgagttgctggccatcagtctagcattcatcagtttgtgcccattattcgatggccacgaatcattccttctggttttggctatggattatcgcttgggattccatcagttgctcctcaccttggcaagggaatactgggcaagccaccaatcattccttctggttttggctacggattgtcgcttgagattccatcagttgctcctcaccttggtaacggaatactgggcaagccaccaagtaatataacacccttagatcaacggagctcaactcaactagtgcacgtacggaatccacaccagcatacatgtcagcaatcatgtggcggagctatggagccgagcagctccggcgtggcttaatgataaggtccggtgatgagcagctctagtagcggttaggagtttgaggttagatttagggtgtgtttggtttgacttttggctttggcttttgccccctaaaagttaaaagccaaccaaagggctggatacaggaagcagcttttttctaaaagccgactttctcgtagtgtaaatctgaaagcacccctgaacctgcttttagtggcttttcggatggaactatgaaaacatatatcgaagaatttttaacgacttttagtggttttcactaaacggtttttagattttttaacagcttacaacctacaacagctttttacacagctcacagcctacaacaacttttttccatagccacagcccaaccaaacagacccttgatgtggagctccctcttgtgttgaggcacttttcattgctcttgttagttcaagttttagttttttt

SEQ ID NO: 68586 - DNA, 2416 bp, Zea Mays
ggtgttccttcgccatggctactctggcggccatctcctccgtgtcttatgacacagacaccgattccgactcctcgcggttactctctctctctaatttccccgtccaaccccaagttcaatctactccatgggagacgatcgatttggttcccttctctctctctttcggggtgctcgccagaatggggatcgcatttctgctagcgcgcgctgttgctgttgtggggaatgattttgctctttccttgttgcaggtgcagcgaggcaagcacatgggattctcaagtgttaagcaggcatgctgaatgtctggagctggaggagttgactgcaatatcagtcaatcccagtctgcttccagctttgaatcagttgcttctcgaggcgtatgccattctacgtcccaagccgcttgactatgaccagcgcaacaccttggttgatgtcttcaggaagatggtgaatcaaagatttggtagcaacagtgggtctccggttgtggaaccatttggatcattcacgatggatttatttactcctcacagtgacctggacctctctatcaattttagtgctaatactgatgagcaatatactcgcaagcaaatgatctctattatcaagaaattttccaaggttctattttcttatcagaggagtggaattttctgtggggttttacctattgtaagtgctagggtgcctatactgaaggttattgatcgtggcacaggggtcgaatgtgatatttcggttgaaaacaaagatggcatgacaaggtcaatgatcattaaatttgtttcctcacttgatgaaaggtttcagatactaagttacttggttaagttctgggctaaggtacatgatctgaataccccaagacaactaactatgagctccatgtcaattatttcactagttgctttccatttgcagtgtttgagtagcaactcattagatgcatggctaagaagataagcatcaatgtgcagtgcagacccggcatcctccaatattgcctgcgttctctgacttgttaaaagatgggttagattgcgaaagcattgagaggaatgctttacggtttagggattttgggagtagaaataaagaatctgtcgctgaactgtttgtatcattgataagtaaactattgtcagcagagagtttatgggagcatgggctgtgcgcaagcaattttgaagcgtcatggatctcaaagacctggaagaaaggagtaggcaatttaagtgttgaagatttcttggaccggtcgcaaaattttgcaaggtcagtgggaaaggtgcagatgcagaagatttgcaaatgccttagagaatgtgctttgaatttgttagatttcatgagagggaaaatggacacaacgaagctgaagacccttttatttgggcggcttagcccagacgaattagtcagcaaacctcgtctgaagcatgtcaagagaaaaaggaattgggaacggaccccgcaagggggaagatgtgtgctccagaagagtgcaaagcatgctggtagtgctactggcagtgattcattacccactcctaacaaggtcttgcatcatgcactccattatcgagttgctggccatcagtctagcattcatcagtttgtgcccattattcgatggccacgaatcattccttctggttttggctatggattatcgcttgggattccatcagttgctcctcaccttggcaagggaatactgggcaagccaccaatcattccttctggttttggctacggattgtcgcttgagattccatcagttgctcctcaccttggtaacggaatactgggcaagccaccaagtaatataacacccttagatcaacggagctcaactcaactagtgcacgtacggaatccacaccagcatacatgtcagcaatcatgtggcggagctatggagccgagcagctccggcgtggcttaatgataaggtccggtgatgagcagctctagtagcggttaggagtttgaggttagatttagggtgtgtttggtttgacttttggctttggcttttgccccctaaaagttaaaagccaaccaaagggctggatacaggaagcagcttttttctaaaagccgactttctcgtagtgtaaatctgaaagcacccctgaacctgcttttagtggcttttcggatggaactatgaaaacatatatcgaagaatttttaacgacttttagtggttttcactaaacggtttttagattttttaacagcttacaacctacaacagctttttacacagctcacagcctacaacaacttttttccatagccacagcccaaccaaacagacccttgatgtggagctccctcttgtgttgaggcacttttcattgctcttgttagttcaagttttagttttttt

SEQ ID NO: 68587 - DNA, 2024 bp, Zea Mays
ggtgttccttcgccatggctactctggcggccatctcctccgtgtcttatgacacagacaccgattccgactcctcgcggtgcagcgaggcaagcacatgggattctcaagtgttaagcaggcatgctgaatgtctggagctggaggagttgactgcaatatcagtcaatcccagtctgcttccagctttgaatcagttgcttctcgaggcgtatgccattctacgtcccaagccgcttgactatgaccagcgcaacaccttggttgatgtcttcaggaagatggtgaatcaaagatttggtagcaacagtgggtctccggttgtggaaccatttggatcattcacgatggatttatttactcctcacagtgacctggacctctctatcaattttagtgctaatactgatgagcaatatactcgcaagcaaatgatctctattatcaagaaattttccaaggttctattttcttatcagaggagtggaattttctgtggggttttacctattgtaagtgctagggtgcctatactgaaggttattgatcgtggcacaggggtcgaatgtgatatttcggttgaaaacaaagatggcatgacaaggtcaatgatcattaaatttgtttcctcacttgatgaaaggtttcagatactaagttacttggttaagttctgggctaaggtacatgatctgaataccccaagacaactaactatgagctccatgtcaattatttcactagttgctttccatttgcagctattgtcagcagagagtttatgggagcatgggctgtgcgcaagcaattttgaagcgtcatggatctcaaagacctggaagaaaggagtaggcaatttaagtgttgaagatttcttggaccggtcgcaaaattttgcaaggtcagtgggaaaggtgcagatgcagaagatttgcaaatgccttagagaatgtgctttgaatttgttagatttcatgagagggaaaatggacacaacgaagctgaagacccttttatttgggcggcttagcccagacgaattagtcagcaaacctcgtctgaagcatgtcaagagaaaaaggaattgggaacggaccccgcaagggggaagatgtgtgctccagaagagtgcaaagcatgctggtagtgctactggcagtgattcattacccactcctaacaaggtcttgcatcatgcactccattatcgagttgctggccatcagtctagcattcatcagtttgtgcccattattcgatggccacgaatcattccttctggttttggctatggattatcgcttgggattccatcagttgctcctcaccttggcaagggaatactgggcaagccaccaatcattccttctggttttggctacggattgtcgcttgagattccatcagttgctcctcaccttggtaacggaatactgggcaagccaccaagtaatataacacccttagatcaacggagctcaactcaactagtgcacgtacggaatccacaccagcatacatgtcagcaatcatgtggcggagctatggagccgagcagctccggcgtggcttaatgataaggtccggtgatgagcagctctagtagcggttaggagtttgaggttagatttagggtgtgtttggtttgacttttggctttggcttttgccccctaaaagttaaaagccaaccaaagggctggatacaggaagcagcttttttctaaaagccgactttctcgtagtgtaaatctgaaagcacccctgaacctgcttttagtggcttttcggatggaactatgaaaacatatatcgaagaatttttaacgacttttagtggttttcactaaacggtttttagattttttaacagcttacaacctacaacagctttttacacagctcacagcctacaacaacttttttccatagccacagcccaaccaaacagacccttgatgtggagctccctcttgtgttgaggcacttttcattgctcttgttagttcaagttttagttttttt

SEQ ID NO: 68588 - DNA, 2395 bp, Zea Mays
ggtgttccttcgccatggctactctggcggccatctcctccgtgtcttatgacacagacaccgattccgactcctcgcggtgcagcgaggcaagcacatgggattctcaagtgttaagcaggcatgctgaatgtctggagctggaggagttgactgcaatatcagtcaatcccagtctgcttccagctttgaatcagttgcttctcgaggcgtatgccattctacgtcccaagccgcttgactatgaccagcgcaacaccttggttgatgtcttcaggaagatggtgaatcaaagatttgcctagatgtaaaccaggattcctacagctcatcgtaaacaggagagtaggcctcatatgcagcagcagcaacagcaaccagaacgctattctgtaacagctggtggacttgcacgtgggacctattctccagtttgtgaggggctgcaaagatcccggtagcaacagtgggtctccggttgtggaaccatttggatcattcacgatggatttatttactcctcacagtgacctggacctctctatcaattttagtgctaatactgatgagcaatatactcgcaagcaaatgatctctattatcaagaaattttccaaggttctattttcttatcagaggagtggaattttctgtggggttttacctattgtaagtgctagggtgcctatactgaaggttattgatcgtggcacaggggtcgaatgtgatatttcggttgaaaacaaagatggcatgacaaggtcaatgatcattaaatttgtttcctcacttgatgaaaggtttcagatactaagttacttggttaagttctgggctaaggtacatgatctgaataccccaagacaactaactatgagctccatgtcaattatttcactagttgctttccatttgcagtgtttgagtagcaactcattagatgcatggctaagaagataagcatcaatgtgcagtgcagacccggcatcctccaatattgcctgcgttctctgacttgttaaaagatgggttagattgcgaaagcattgagaggaatgctttacggtttagggattttgggagtagaaataaagaatctgtcgctgaactgtttgtatcattgataagtaaactattgtcagcagagagtttatgggagcatgggctgtgcgcaagcaattttgaagcgtcatggatctcaaagacctggaagaaaggagtaggcaatttaagtgttgaagatttcttggaccggtcgcaaaattttgcaaggtcagtgggaaaggtgcagatgcagaagatttgcaaatgccttagagaatgtgctttgaatttgttagatttcatgagagggaaaatggacacaacgaagctgaagacccttttatttgggcggcttagcccagacgaattagtcagcaaacctcgtctgaagcatgtcaagagaaaaaggaattgggaacggaccccgcaagggggaagatgtgtgctccagaagagtgcaaagcatgctggtagtgctactggcagtgattcattacccactcctaacaaggtcttgcatcatgcactccattatcgagttgctggccatcagtctagcattcatcagtttgtgcccattattcgatggccacgaatcattccttctggttttggctatggattatcgcttgggattccatcagttgctcctcaccttggcaagggaatactgggcaagccaccaatcattccttctggttttggctacggattgtcgcttgagattccatcagttgctcctcaccttggtaacggaatactgggcaagccaccaagtaatataacacccttagatcaacggagctcaactcaactagtgcacgtacggaatccacaccagcatacatgtcagcaatcatgtggcggagctatggagccgagcagctccggcgtggcttaatgataaggtccggtgatgagcagctctagtagcggttaggagtttgaggttagatttagggtgtgtttggtttgacttttggctttggcttttgccccctaaaagttaaaagccaaccaaagggctggatacaggaagcagcttttttctaaaagccgactttctcgtagtgtaaatctgaaagcacccctgaacctgcttttagtggcttttcggatggaactatgaaaacatatatcgaagaatttttaacgacttttagtggttttcactaaacggtttttagattttttaacagcttacaacctacaacagctttttacacagctcacagcctacaacaacttttttccatagccacagcccaaccaaacagacccttgatgtggagctccctcttgtgttgaggcacttttcattgctcttgttagttcaagttttagttttttt

SEQ ID NO: 68589 - DNA, 2131 bp, Zea Mays
ggtgttccttcgccatggctactctggcggccatctcctccgtgtcttatgacacagacaccgattccgactcctcgcggtgcagcgaggcaagcacatgggattctcaagtgttaagcaggcatgctgaatgtctggagctggaggagttgactgcaatatcagtcaatcccagtctgcttccagctttgaatcagttgcttctcgaggcgtatgccattctacgtcccaagccgcttgactatgaccagcgcaacaccttggttgatgtcttcaggaagatggtgaatcaaagatttggtagcaacagtgggtctccggttgtggaaccatttggatcattcacgatggatttatttactcctcacagtgacctggacctctctatcaattttagtgctaatactgatgagcaatatactcgcaagcaaatgatctctattatcaagaaattttccaaggttctattttcttatcagaggagtggaattttctgtggggttttacctattgtaagtgctagggtgcctatactgaaggttattgatcgtggcacaggggtcgaatgtgatatttcggttgaaaacaaagatggcatgacaaggtcaatgatcattaaatttgtttcctcacttgatgaaaggtttcagatactaagttacttggttaagttctgggctaaggtacatgatctgaataccccaagacaactaactatgagctccatgtcaattatttcactagttgctttccatttgcagatgggttagattgcgaaagcattgagaggaatgctttacggtttagggattttgggagtagaaataaagaatctgtcgctgaactgtttgtatcattgataagtaaactattgtcagcagagagtttatgggagcatgggctgtgcgcaagcaattttgaagcgtcatggatctcaaagacctggaagaaaggagtaggcaatttaagtgttgaagatttcttggaccggtcgcaaaattttgcaaggtcagtgggaaaggtgcagatgcagaagatttgcaaatgccttagagaatgtgctttgaatttgttagatttcatgagagggaaaatggacacaacgaagctgaagacccttttatttgggcggcttagcccagacgaattagtcagcaaacctcgtctgaagcatgtcaagagaaaaaggaattgggaacggaccccgcaagggggaagatgtgtgctccagaagagtgcaaagcatgctggtagtgctactggcagtgattcattacccactcctaacaaggtcttgcatcatgcactccattatcgagttgctggccatcagtctagcattcatcagtttgtgcccattattcgatggccacgaatcattccttctggttttggctatggattatcgcttgggattccatcagttgctcctcaccttggcaagggaatactgggcaagccaccaatcattccttctggttttggctacggattgtcgcttgagattccatcagttgctcctcaccttggtaacggaatactgggcaagccaccaagtaatataacacccttagatcaacggagctcaactcaactagtgcacgtacggaatccacaccagcatacatgtcagcaatcatgtggcggagctatggagccgagcagctccggcgtggcttaatgataaggtccggtgatgagcagctctagtagcggttaggagtttgaggttagatttagggtgtgtttggtttgacttttggctttggcttttgccccctaaaagttaaaagccaaccaaagggctggatacaggaagcagcttttttctaaaagccgactttctcgtagtgtaaatctgaaagcacccctgaacctgcttttagtggcttttcggatggaactatgaaaacatatatcgaagaatttttaacgacttttagtggttttcactaaacggtttttagattttttaacagcttacaacctacaacagctttttacacagctcacagcctacaacaacttttttccatagccacagcccaaccaaacagacccttgatgtggagctccctcttgtgttgaggcacttttcattgctcttgttagttcaagttttagttttttt

SEQ ID NO: 68590 - DNA, 2515 bp, Zea Mays
aagagattaaagagggtgcgtcgggtgttccttcgccatggctactctggcggccatctcctccgtgtcttatgacacagacaccgattccgactcctcgcggtgcagcgaggcaagcacatgggattctcaagtgttaagcaggcatgctgaatgtctggagctggaggagttgactgcaatatcagtcaatcccagtctgcttccagctttgaatcagttgcttctcgaggcgtatgccattctacgtcccaagccgcttgactatgaccagcgcaacaccttggttgatgtcttcaggaagatggtgaatcaaagatttggtagcaacagtgggtctccggttgtggaaccatttggatcattcacgatggatttatttactcctcacagtgacctggacctctctatcaattttagtgctaatactgatgagcaatatactcgcaagcaaatgatctctattatcaagaaattttccaaggttctattttcttatcagaggagtggaattttctgtggggttttacctattgtaagtgctagggtgcctatactgaaggttattgatcgtggcacaggggtcgaatgtgatatttcggttgaaaacaaagatggcatgacaaggtcaatgatcattaaatttgtttcctcacttgatgaaaggtttcagatactaagttacttggttaagttctgggctaaggtaccatgggttaattattattttggtttggttattaaattgcaagtaactgtcccattaccttttgttttaattaattgacctactaaccaatctgcatttgaagacacaaactttggattcatttgtatagaaaataagacgatacttattggggaaattatgaattatcttctttactatcgacaaattctggatatgctttatgccagttcagaaaacatgatagatacccttcttctacacttcctcagtctaaattcctacacttcatgctattgcattctatgtaccagaaaaaatggattttactccattttccttaatggtagtgtttgagtagcaactcattagatgcatggctaagaagataagcatcaatgtgcagtgcagacccggcatcctccaatattgcctgcgttctctgacttgttaaaagatgggttagattgcgaaagcattgagaggaatgctttacggtttagggattttgggagtagaaataaagaatctgtcgctgaactgtttgtatcattgataagtaaactattgtcagcagagagtttatgggagcatgggctgtgcgcaagcaattttgaagcgtcatggatctcaaagacctggaagaaaggagtaggcaatttaagtgttgaagatttcttggaccggtcgcaaaattttgcaaggtcagtgggaaaggtgcagatgcagaagatttgcaaatgccttagagaatgtgctttgaatttgttagatttcatgagagggaaaatggacacaacgaagctgaagacccttttatttgggcggcttagcccagacgaattagtcagcaaacctcgtctgaagcatgtcaagagaaaaaggaattgggaacggaccccgcaagggggaagatgtgtgctccagaagagtgcaaagcatgctggtagtgctactggcagtgattcattacccactcctaacaaggtcttgcatcatgcactccattatcgagttgctggccatcagtctagcattcatcagtttgtgcccattattcgatggccacgaatcattccttctggttttggctatggattatcgcttgggattccatcagttgctcctcaccttggcaagggaatactgggcaagccaccaatcattccttctggttttggctacggattgtcgcttgagattccatcagttgctcctcaccttggtaacggaatactgggcaagccaccaagtaatataacacccttagatcaacggagctcaactcaactagtgcacgtacggaatccacaccagcatacatgtcagcaatcatgtggcggagctatggagccgagcagctccggcgtggcttaatgataaggtccggtgatgagcagctctagtagcggttaggagtttgaggttagatttagggtgtgtttggtttgacttttggctttggcttttgccccctaaaagttaaaagccaaccaaagggctggatacaggaagcagcttttttctaaaagccgactttctcgtagtgtaaatctgaaagcacccctgaacctgcttttagtggcttttcggatggaactatgaaaacatatatcgaagaatttttaacgacttttagtggttttcactaaacggtttttagattttttaacagcttacaacctacaacagctttttacacagctcacagcctacaacaacttttttccatagccacagcccaaccaaacagacccttgatgtggagctccctcttgtgttgaggcacttttcattgctcttgttagttcaagttttagttttttt

SEQ ID NO: 68591 - DNA, 2362 bp, Zea Mays
aagagattaaagagggtgcgtcgggtgttccttcgccatggctactctggcggccatctcctccgtgtcttatgacacagacaccgattccgactcctcgcggtgcagcgaggcaagcacatgggattctcaagtgttaagcaggcatgctgaatgtctggagctggaggagttgactgcaatatcagtcaatcccagtctgcttccagctttgaatcagttgcttctcgaggcgtatgccattctacgtcccaagccgcttgactatgaccagcgcaacaccttggttgatgtcttcaggaagatggtgaatcaaagatttgcctagatgtaaaccaggattcctacagctcatcgtaaacaggagagtaggcctcatatgcagcagcagcaacagcaaccagaacgctattctgtaacagctggtggacttgcacgtgggacctattctccagtttgtgaggggctgcaaagatcccggtagcaacagtgggtctccggttgtggaaccatttggatcattcacgatggatttatttactcctcacagtgacctggacctctctatcaattttagtgctaatactgatgagcaatatactcgcaagcaaatgatctctattatcaagaaattttccaaggttctattttcttatcagaggagtggaattttctgtggggttttacctattgtaagtgctagggtgcctatactgaaggttattgatcgtggcacaggggtcgaatgtgatatttcggttgaaaacaaagatggcatgacaaggtcaatgatcattaaatttgtttcctcacttgatgaaaggtttcagatactaagttacttggttaagttctgggctaaggtacatgatctgaataccccaagacaactaactatgagctccatgtcaattatttcactagttgctttccatttgcagtgcagacccggcatcctccaatattgcctgcgttctctgacttgttaaaagatgggttagattgcgaaagcattgagaggaatgctttacggtttagggattttgggagtagaaataaagaatctgtcgctgaactgtttgtatcattgataagtaaactattgtcagcagagagtttatgggagcatgggctgtgcgcaagcaattttgaagcgtcatggatctcaaagacctggaagaaaggagtaggcaatttaagtgttgaagatttcttggaccggtcgcaaaattttgcaaggtcagtgggaaaggtgcagatgcagaagatttgcaaatgccttagagaatgtgctttgaatttgttagatttcatgagagggaaaatggacacaacgaagctgaagacccttttatttgggcggcttagcccagacgaattagtcagcaaacctcgtctgaagcatgtcaagagaaaaaggaattgggaacggaccccgcaagggggaagatgtgtgctccagaagagtgcaaagcatgctggtagtgctactggcagtgattcattacccactcctaacaaggtcttgcatcatgcactccattatcgagttgctggccatcagtctagcattcatcagtttgtgcccattattcgatggccacgaatcattccttctggttttggctatggattatcgcttgggattccatcagttgctcctcaccttggcaagggaatactgggcaagccaccaatcattccttctggttttggctacggattgtcgcttgagattccatcagttgctcctcaccttggtaacggaatactgggcaagccaccaagtaatataacacccttagatcaacggagctcaactcaactagtgcacgtacggaatccacaccagcatacatgtcagcaatcatgtggcggagctatggagccgagcagctccggcgtggcttaatgataaggtccggtgatgagcagctctagtagcggttaggagtttgaggttagatttagggtgtgtttggtttgacttttggctttggcttttgccccctaaaagttaaaagccaaccaaagggctggatacaggaagcagcttttttctaaaagccgactttctcgtagtgtaaatctgaaagcacccctgaacctgcttttagtggcttttcggatggaactatgaaaacatatatcgaagaatttttaacgacttttagtggttttcactaaacggtttttagattttttaacagcttacaacctacaacagctttttacacagctcacagcctacaacaacttttttccatagccacagcccaaccaaacagacccttgatgtggagctccctcttgtgttgaggcacttttcattgctcttgttagttcaagttttagttttttt

SEQ ID NO: 68592 - DNA, 1866 bp, Zea Mays
ggtgttccttcgccatggctactctggcggccatctcctccgtgtcttatgacacagacaccgattccgactcctcgcggttactctctctctctaatttccccgtccaaccccaagttcaatctactccatgggagacgatcgatttggttcccttctctctctctttcggggtgctcgccagaatggggatcgcatttctgctagcgcgcgctgttgctgttgtggggaatgattttgctctttccttgttgcaggtgcagcgaggcaagcacatgggattctcaagtgttaagcaggcatgctgaatgtctggagctggaggagttgactgcaatatcagtcaatcccagtctgcttccagctttgaatcagttgcttctcgaggcgtatgccattctacgtcccaagccgcttgactatgaccagcgcaacaccttggttgatgtcttcaggaagatggtgaatcaaagatttgcctagatgtaaaccaggattcctacagctcatcgtaaacaggagagtaggcctcatatgcagcagcagcaacagcaaccagaacgctattctgtaacagctggtggacttgcacgtgggacctattctccagtttgtgaggggctgcaaagatcccggtttgcatttggtctgcaaataattttttccattgatttgacctttatctaacacaaatttcaggtagcaacagtgggtctccggttgtggaaccatttggatcattcacgatggatttatttactcctcacagtgacctggacctctctatcaattttagtgctaatactgatgagcaatatactcgcaagcaaatgatctctattatcaagaaattttccaaggttctattttcttatcagaggagtggaattttctgtggggttttacctattgtaagtgctagggtgcctatactgaaggttattgatcgtggcacaggggtcgaatgtgatatttcggttgaaaacaaagatggcatgacaaggtcaatgatcattaaatttgtttcctcacttgatgaaaggtttcagatactaagttacttggttaagttctgggctaaggtacatgatctgaataccccaagacaactaactatgagctccatgtcaattatttcactagttgctttccatttgcaggtaccatgggttaattattattttggtttggttattaaattgcaagtaactgtcccattaccttttgttttaattaattgacctactaaccaatctgcatttgaagacacaaactttggattcatttgtatagaaaataagacgatacttattggggaaattatgaattatcttctttactatcgacaaattctggatatgctttatgccagttcagaaaacatgatagatacccttcttctacacttcctcagtctaaattcctacacttcatgctattgcattctatgtaccagaaaaaatggattttactccattttccttaatggtagtgtttgagtagcaactcattagatgcatggctaagaagataagcatcaatgtgcagtgcagacccggcatcctccaatattgcctgcgttctctgacttgttaaaaggttactctatgatgcttgttctttgtttttccttttactggcattattctgctaagttttcaactgaaaccacggataactttctatattgtcattcttgcagatgggttagattgcgaaagcattgagaggaatgctttacggtttagggattttgggagtagaaataaagaatctgtcgctgaactgtttgtatcattgataagtaaagttactacacagttctgatactctcaccatggttcaggcgttgtttgaattacttgc

SEQ ID NO: 68593 - DNA, 4527 bp, Zea Mays
ctccagttcctatctaagttattctctagaaactttaatcagcgctccgtctcctccgtgctctctctccctcacgctggtggagcggtatcaccctggctccagctccccacatcgatgctccttgccctgtcgttcccatcggctgggcgctttgcgtctaggaaaaaccaccgcaccagctcgcgcgctccctacccggccgtgcgtccctgctccctcgccacctggtgcatgcgcgcggctttctacacgccggagcaacacttgtgcttggcccctgcgctgaaccctgctcagcttctctagtgccggccgccgctccaagtcctctactcgccgacgccatggacagctcgcggtcgttgcgttgcagggtcccagtcaccatttcaaagctgcccagctcctagactgtcgtccctgtttctcaccgattaaattattggtacgttaagtaatcatgtgaagcgagagacgacccaagtcgaccccaagcgtgggctactccgcatgatgatgttgatggacgaacctgcccgatcaagtactaggacaaaggatggtcgtcaagtggacttcatctaacaaacactagcatagtgtttattccaggcaagccccggtgcatttacccctttccttgtgtttttaaattatttttacacactttaagtctagtgaatgtgcattaggtttataggagttgcttggaaacccttggatgcattgccttccttgatatccatcctttatagatacttctgatgaagtatcaaaatatgatttacaaaaatgcttagccctgctcagatcttgtggatagaggttgtcttttgcactaaggcctagctcaggggttatccagaggaaagatggcttctacctgcaagaataatttcattgagagcgtggtgggatcttactacaaagttccctttgatgctctttttatcctaggaacataaacaatcctaaggatggaagtacttaaatcgggacttgggctaggaacaggtgatgttctacccaggttagttaaggattggatgcgtatgtaggcttgttgatcaaggactatcttaactagccacatgccctggaaatgggacagggtaagcttgaacccggctattccatacatgaaaagacaatcgcgcactgggagtggagagatggcgagagtggcacgtaccctcctggcaaaggaccgcctaaaaagggtggtgtgctctcgggtggtgcggacctgttcatgtagtggaggatccgtgggaatggtagacatgcaaggtttacgagaaacatatgtcgtgtggttagagatcctcagctgagtaaatcgattcggatcgccgttatatccccggagagtggagacttgatctccgacctacaacctaagtcaggatgtgaacctcatgaataaaaatgatgttgtattgatgagatggtgaaattagactagatacaaatagagtctattaatatttaatctggcgttaaaatattgaaagtaaggactcactttagtaagctatttctgcaaaaatatctaagttgattcttgctaaagcatctccttgaatcccaaatccagcatacccttgagagtcttttctttagtcgggtaagtcttgctgagtaattccatactcacggttttattccctgttgtttttcaggttctaaccttgtgttgccgtgatggtgttaagtgccggtgggctcggccttcttataagtctaagtaactctcttatacttcttattgaggatgatcacttgagctagcatatatttcaaacttatacttttgtaatcactccgataaaataatgtaaaatttttgtaacctgtaaaatttggtaataagatttccgctgcaaaaatgttgtgtgtgtgatttgtattacttaatcccgcggttctggttgtaagaggtttatccgatgtccttggggcaatcggacggatcctgttaagttatctagtgcacatgcataacagtctgaggtctttgagacaaggacaggtgcatgtgggcccaataacttgggaggttctgccacactagtgatagtgacacttatgatgtggaaagtggaggtgaggactccgaagatcgaccgtggtgaccaagtgacacagtcttcggaaaatcaaccattaagcagagtcaccttgacaatatgagggggagatattttcgagatatatctactgtgagggcagatgacggggagaagactgttcctactcccgaagacaatgaagtcgtgatcttccgaagcttcttcaaggctgggcttcggttccctctaagcagtttcgtggttgaggttttgaagatattccagatttttcttcaccagattactcccgaagccattataaggatgggagccttcgtatgggctatgaggagtcagaacttggagccgaatgctaaaagtttctgtagcatgcacgagcttctatatgaggcgaagccctagggtaaagagcagtatcacaacaactttggctgctatagcttcgttgcctgctccgggtcaagctgccctgtgcccaccttctggaagcgatggcccggggattggatgaaggaatggttctatgtgaaaaatgatttaaaggcacgagaggatattaaggatattatcgtgcgccctatctggcaacgcttcggcctccggaagccgaaggtggaaattgatgaagcagccgaagaatgccgaaaggccttcggcatagtctgctcgttcatcgggacaagggacttaattcaagagcatgtggcctacaggatatggccattggtagccaactgggagatgccaaaggaaactatcaacaacccccacgaaggtggtttggttcgactaaaatacaccttcaatttggagaccagtttaatgagccagacgatgattggctgaagagtgttgaagctacaagtgatgaactgcttgggtcgtactccaaaacagaagataatgcactatcagcggccttcggaaaccggaaaaagaagagactcaaccgagttttccatgctattgggttcatgtaccctgactaccgctacccgttacgggggcaaaaaataaaaggtgcaacttccgagaaagatgatgcttcagctgctccaagcgagcctgcgccgaagaggaaaaaggtgaaggtccttactaaccgaccgcgctttattgaaccggccacagtgcccgagtttgtcagtgagacctcttcggctactgaagccaaagaacctgcgcttgcgcagaaaactgaagagctgactgtaacgccgaaggttgaaaaaattgaagaaccgagagctgaagggataataacatcagaaattttaagtccttcggcaggagttgaagtgccaaaaacccagaaaggactagcggtgacccccaaaagaaaaaggatggttaatgttctagatgtactggagacaataaaatcttcaagctctactccgaggaaaattgccgaagctccaaaaacgcaaactgagacaacagcctctgaagccgaagctacacagcgccaggatgagaccgaagctgggccttcagagcccgccaaggagaaatccttggaaaccagagaaaaagaaacagaagcggcagaacaaattttggctgaaaaaactgccactgccacccccgaagcattttccgaagctctcaattatattttatgacatgcttcagtgaaaaagttgactgaaaaagaaaaatgagaagctcagttctatgcccaaaaattgaaatatctgaagggggcattgattttcaacggcggcggagaagaagacttcttgtattgtctcccagacagcaaggagatttctgtctgccgggagatgagcaaaagcttcagattcccgacactagaggacgggctctcggtgctatcaaaagatgaattagccgatagcttagcatacaacagcttaaaggtgagaaaatgaattttactgaaaagcaaaatttttccatttgcttatacttaatattgtattcctttttcagggccttattcttagcaatgccctcagggcacaaaaaagcgctgaagacgagggatgtaccatggccttaaacaaccttcgttccgaagtaatcaaactaaggaacgaaggtcttgagaaagataaaatattaaactcattgctaaataaaataaaagaagacgaagctacttccaaagcccaggctgaagcccagaagtgtgagattgaagatcttcaaaaacagttggctgaagcgaagttaaagtgtgcaattgccgaagctgaccgagatgccagtaactattggaaaaattattgggagaagacagttgtagaacttcaatctccaaaagagaaatgttacgaaaaatccatagagtgtgtgcaaaaaataaaatctagcttcgccaatgttggcgcattctctagcgaggacaacttcgtaaggggcgatcctgaaggcccaattgattggatcagcaacgaagttcaag

SEQ ID NO: 68594 - DNA, 6057 bp, Zea Mays
ctccgtgctctctctccctcacgctggtggagcggtatcaccctggctccagctccccacatcgatgctccttgccctgtcgttcccatcggctgggcgctttgcgtctaggaaaaaccaccgcaccagctcgcgcgctccctacccggccgtgcgtccctgctccctcgccacctggtgcatgcgcgcggctttctacacgccggagcaacacttgtgcttggcccctgcgctgaaccctgctcagcttctctagtgccggccgccgctccaagtcctctactcgccgacgccatggacagctcgcggtcgttgcgttgcagggtcccagtcaccatttcaaagctgcccagctcctagactgtcgtccctgtttctcaccgattaaattattggttctaaccttgtgttgtcgtgatggtgttaagtgccggtggctcggccttcttataagtctaagtaactctcttatacttcttattgaggatgatcacttgagctagcatatatttcaaacttatacttttgtaatcactccgataaaataatgtaaaatttttgtaacctgtaaaatttggtaataagatttccgctgcaaaaatgttgtgtgtgtgatttgtgttacttaatcccgcggttctggttgtaagtggtttatccgatgtctttggggcaatcggacggatcctgttaagttatctggtgcacatggataacagtctgaggtctttgagacaaggacaggtgcatgtgggcccaataacttgggaggttctgccacagctggtatcggagcaggattaagtatatacggtcacatacgtattttcaaaacaaaagttttggttttagaaaacctattttaaactaaacacaatgtttggctttgaaaaatagttttacaaaactataatgctagcgacatcctctattaagccctaaattaaggactatcaggtggcttagttgaaaacaataatccacaaccgggtgggtattgcatacatgtgtattgttatttttgaagccattcagttttgaatggatcgacgctcaaggtaaggtgagatgtgagagcatgaccgaacaaccgtcggtctagggaagtgcttaattgtggcgcttgattatatacatgttccacatatgtatatatgacggctgcgatgtggagtattaattttctgggattcagtaccccatggatgtgtatgggtatacagacgtgggaatactgagaactgtaatttacttgtaacgatgcacctacgctcaggtaagaaggtgagttaccataatgagttgccctatggttaaagtgtggcaacggggcctatgcgtggctcgacgcttaatgatgagctggcctccatatagcaatatatggagtataaactgtgataaactgtcatgtgtaaactgcatcattggaacttgggctgtgatggaattttctgcaggtacactaacctcgaaaacgtatgtgtagctgacgactagcaaaataccgtgagagtcgtacatatgccaccgatatagaacgctattgccacagtatgttggcaaaactcgtgaggacgcataggacgagcatgcatcctgattgttgcatcatgtttgtcacctatacacccaatatgcttctctcatctttattccagtaaccagtgattgtagataatgtggtgtaatgttgtattatgaacttcgatgaaatagttgtcctccgttctttaggtaacctatttaggtgttatatatgtgtttgctccgtttacttgatgtactgatagaaggttggtagtttgtttgcttaaaccgaaaattaggccatattcttatttagtgaaccatgacccaaatttgaattttctgttatccctccatgaccaaacacataaaaataaatgcctagataatttctttgttggacctaaagtgtacccggacttgaaacaagaatctcgaatcatgtctccatcctaaaccatatccttattcagttggtgcaagctgatgtaccttatccagtttgcatgttcttaaggatcgccatgttgctttatcaacctaacccataaaagacctgtccgagtattttcttgaatttgatgcctttggtttcctcatgtctatcaaaggcatacccacctaatcttatgattgttttcccttcgtatctaatcagatactaatccttgaccttgtaatctctatgatgggcatagaaatatgcttgggctgaaataacagtctcccatcgtacttctttcatcaagtttaggttatggccatgccttgttcatttcctcgggccataatctatttggctctctacttgtaactatttttacaggtggagtaactctttgtatattgtcatccttgaccagtctatttgtgttgtgtgagatttcttattggttatgtctggtaatggcattatgactaaaattgatgatgccgcgacgaaaccgagggccttttgtgtgtgcgcacacatggttgtgctgctcggcacgcgctggtatcatggttagtagttgtagtccattatgagactatgtcaatgtgttatcttggcacaatctatttttgctacgtgagattcattattggtgccagttcggtaatggtgtcacgattaaggacttatggtgccgcagcggaaccgagagcctcctgtgaatgcgcacacaggattgtgctactcgtcggatgctggtatcaaggtctctagtcatgatccattgtggaactacactgatgtgtgatcttccgtagactccttccttgaaacaatttctatgttgtttgtgaagtgatcaagcaacatctatcatctccgttgaatataatgggcataccactttccatgcgtagtctctttttccttgactttgatagtgactacacgtatacaagttccctttacgtcctttgtgtaaaggtgaagtcttggagctttttagtgttgagagacaactggttagctctcaaaatggagatctgcttcccttgctgctgagatgcaggagtttgttcattcgatcccttatttaatccaagtattccctaaccaaatggataattcatctcgcatgaagaaacggatgaacaacctgaccaaatgaatttctacccaaatgcataatctcctgttagcaaatgtgagctctcgaccgttggcttaccgagggtactaagaggacttgctcaatgtaaaaagtagttcaacaagttagtttttactaacttgtaactgcattgtgaacaaaggttgagtttagagattttttatcgagttgtctaaactcacctttgtacaacccttcttaaggaagtatttacaagaatcgagattaagtcgaccagaaaccacatagtcatcgctctagtcatgcctcgatcgtctcacgcgtgcttttccagcgtgtgtgatcatgtcgagccgtgactagtgctggacacaatggactggttgtaaagtctgtatctacatatccctccactggtgattctctcgaatctataccatctttcgtggacttgaattctcaggttagccccatgttaaccgcgacaatatttgacatccacacccgtcccctatgctatgaatttcctgtaaccacttgttagtaaacctctttctgtgtgttttatccaagaggttgcatctggttctgtttgggtaagatcgcgtatttgtcgctcgcccaatagactcagatagtacagtgtcatcaaaaaaagcaaactgcacacatgaaactttatgtgttcctctggcagatattgtctctattggtggacatttctaaattagcctaaggcgatacatgttatgtccactagagaaacacatccggagacactcacctttaataggaaatgtctcacgattatcgctgatatgaacatgggttacctgcttctctactcttagaagtgtgccgttctgaatctcgggacgagattcttttaagggggaaggctgtaacaccccaagtgttaatattccgctcgacaacaagtatggatttaagtacgtaatatcagtggataaaacggatgccaaaattttaatcatcttcgcctaccgcgatttttatattgcatctgtttcgtctgacgcgagtgcgacgtcgtttatattttcatctgatcgggctcttccaaaattttcgtgatgttcggcacatcgtcgttccgaaaatcggtgcgtccgatgattaattaaaattcatcgccgcgcgaattcgaattcagaagctcgacctccttttacgcccatttatcccggactgattaatttgaactcgacggccaaaatactcggtgcaaaataatccgaatcgtgcgtcgtttgagtgaaatcgtgcgcgagattatgacccaatttatccttcaacacgctgttttggcgacgaaaacgagtgtacattagcggatcgggtttcggctaatttcggtcgaatcgcgcagaacgaattatcagtgccaaaatcagtttatttcggtctgtcgcttctcgcccggatccaaatcttcagatataaataataggtaaggattcatctgactctagagtattcatcgcatcaaatcttgtctaaatattgttgtcgatctagtttttagttcgacccttttatatatcttttcgacccggcatgttaaccgagaaattgtgtctatggctttacaatatcatcctgctttctagcaaattatccctggtcgaggaatcaagtgttcaaagtacagataaaatttatctgatattgatcaaagcaaatacatattaaaatatcgtagctgatatcatttcaatctagcttaattacgtctcgcttgaaacctacccagaatttagatatatatatatattgataataaaaaaaagaaattcctattttgttccaccgccctacctaagtccttatctctaagccatcatttatctgatgaacgatttcctcatccatattctagccaccattttcttcttatcaagatacgtgcaagtcactggaatcctctagctccatgcccatcgtgtctccttcaggcttcagccacgctcagcatctactcaggttttctttccacgtgttgcctctctccagttcctatctaagctattctctggaaactttaatcatcgctccgtctcctccgtgctctctctccctcacgctggtggagcggcatcaccctggctccagctccccacgtcgatgctccttgccctgtcgttcccatcggctgggcgctttgcgtccaggaaaaaccaccgcaccagctcccgcgctccctacctggccatgcgtccctgctccctcgccacctggtgcatgcgcgcgcggctttctacacgccggagcagcacttgtgcttggcccctgcgctgaaccctgctcggcttctctagtgccgaccgccgctccaagtcctctactcgccgacgccatggacagctcgtggtcgttgcgttgcagggtcccagtcaccatttcaaagccgcccagctcctagactgtcgtccctgtttctcaccgattaaattattagtgagctgtcgtcgctctcacttttcgttttaatattttccatcaatttagtatgattgcgctgtccaggtaggctggtgacgtatacgtaaatcgcattagtgtgatttcgtataatgctcgataagtgttcgacgatttaggggaaacagtgaacgtcgtcgtttttattaattccaagtcgcactgtgatacgagaagctgatgtattattactcgtagccgaatcgttagatagattggctacctaggtacgtcgcgacgattatcccgcttgtagatcaggcatgtatttatttgacgtttgtagaaatacggggctataagtagcatggtaattatgtccacgattgcgaagtcgtcgtgctgcgtagctaagtttaggattaacgacataggttatatgagaagattaaatcggtgattcgtatccggtgaatggtcgaattaataatggaaaagttaggtttagatatttatt

SEQ ID NO: 68595 - DNA, 923 bp, Zea Mays
cctctctccagttcctatctaagttattctctagaaactttaatcagcgctccgtctcctccgtgctctctctccctcacgctggtggagcggtatcaccctggctccagctccccacatcgatgctccttgccctgtcgttcccatcggctgggcgctttgcgtctaggaaaaaccaccgcaccagctcgcgcgctccctacccggccgtgcgtccctgctccctcgccacctggtgcatgcgcgcggctttctacacgccggagcaacacttgtgcttggcccctgcgctgaaccctgctcagcttctctagtgccggccgccgctccaagtcctctactcgccgacgccatggacagctcgcggtcgttgcgttgcagggtcccagtcaccatttcaaagctgcccagctcctagactgtcgtccctgtttctcaccgattaaattattggtacgttaagtaatcatgtgaagcgagagacgagccaagtcgaccccaagcgtgggctactccgcatgatgatgctgatggacgaacctgcccgatcaagtactaggacaaaggatggtcgtcaagtggacgtcatctaacaaacactagcatagtgtttattccaggcaagccccggtgcatttacccctttccttgtgtttttaaattatttttacacactttaagtctagtgaatgtgcattaggtttataggagttggttggaaaccctttgatgcattgccttccttgatatccatacctttatagatacttctgatgaagtatcaaaatatgatttacaaaaatgcttagccctgctcagatcttgtggatagaggttgtcttttgcactaaggcctagctcaggtgttatcctgaggaaagatggcttctacctgcaagaataatttcattgagagcgtggtg

SEQ ID NO: 68596 - DNA, 655 bp, Zea Mays
atgtcttccgctccgctgcggcgctgactctggtgcggtgcgcgatgagcctttcccttgctgctgttgcttccgatggacggtgctgcagctgcaggaggaagtagggaaccggcggccaacggttccaaacctgaggagcagcagtttgatcccagccgaatgatcgggatagttaaaaggaaggcctcaattaaagacttggccacggcataccatgctgaatgtatagcatcctgtaaagaactcctgcagcttcagagaaagtgggaggagtattgatcacaggagcagcaagttgaagccaaaatgcctgaagaaccaagatcgttggtgttcaagacctcgaagcataggaagaagtagatttaggagactagtttttacttcctttcaaaagaacactttttggctctgtcaactgctgtgattgttagcttgaaagtaaactaaacgccgggaaacattgccttaaggtgggtttatactgtaaaacttcatttgccttttaccatttgctcttttaattaatattttcatatttttttttacaaaaaaacatttttttcatctttaaaggcttataaaataaatgctaacatgttggatccttttacagttttatccaacaatgaaaacaattacatatctcact

SEQ ID NO: 68597 - DNA, 549 bp, Zea Mays
gaacagtgagttgggaaataaagaagcaccgacatggattctgttgcgatgcggaaagtcagagacggcgcggtgctgcgagaggcggtggagctcggcttggcggtcggcggccatgcgcatgacgagctcgaggcgcgcttggcggccgcggatcctgggggcgtccctgcgagcgtgttcatggacgggggacggtgggggtccggtgtcgtcgtcacggtcgcgggcagccatgtggacccactccctgacgaggcgcacacggtcgcgctcgatctcgcggagccaggaggacgaggaagaggaggcgcgcgagatctggacggcgggcgcgcggcggaggaggtccggggagccctcgcgactggatccagcgtcccagtcgctgtcgctgcggggctcggagggctcacggcggcggcgtggggtcatatcgatgccggaaacagggggagctggagaagggactgggacgtcgcccatcgccaccggccgcgacgaggcatggggcggcgggaagctgctgctgactggattgggctatag

SEQ ID NO: 68598 - DNA, 1096 bp, Zea Mays
ctaccttggcgacaagacatatctgccactgctccatggcatgctcgatactgtggcatgaccagggcatgccacactacgggtctgtttggttcgtggctaactgtgccacactttgcctaaggttagtcgttcaaattgaaaaactaaccttaggcagaaaagtgaggcaaagtgtggtaattgaggtaacgaaccaaacatgccctacatacgaccccacaactataacaagaaaatagttggagcccctactaggtgggggccgctatcctacaggtttgtaactctctcctctcttgatctgtaaaagggagtatattagcgtagaggcagattgaatccaacctattttgaaagggtagacatagagatgaactagacatcggtagtctagaactctcaccacaatcaaacgaaaaaaggggatctaggagatcatggtgctcagttgagatctgagcttctaatcttcttcacctttgtgttcatcaatccatcatacacaagaacatagggtattacatatagcgtgacccgaacctctacaaactgcatgtgttctagtaaccaggctacacttagcatcaacatacatctaacctacgcccctacctctacccacaaactttttcctcttcttttggtatgtgcggtacgccggtgtcatatcgtgacaacaataagcaacaataacttgaagctgagcactaactgcttggcagcaataatccgaagctgagcactaactgcttggtgagttaaagtttacattactagcaacacaaactttttatctttatcatcatcatatataagtacagcacttgttaagttaccatctttcgtgtgctactaacatctttctgcttcatgatgcagaacatttgcaaacatgaactccttaaaagatgtaacccttccagctacagtatcagaatgttgcaacagtgaaccatttatctagcatacagatgcatttatcccaacagaaaagaaatggaacctatatatccattaagcagcagatgcagcctcaacattcttgtctcaacacacaagcgtacctcaaaccagagacaggatgcctttgccg

SEQ ID NO: 68599 - DNA, 2813 bp, Zea Mays
agatagctagcaccacttgcttccgcctgatctgcagtcttccagattgcttggatcagccagtatagagggaacaggcgaatagcagagaagccaccatgtcatcagaggaagtggcaaagatggaggcggaaatggcacaaatgaggcgctgcagtagcccaggccaaggtggtgtgcctgtgacggtggtgtactacctgtgccgcagcggacggcacctggagcacccacacatgttggagatgcacctcgcctctccaaatcaagccctctacctcagagatgtgatctgtcgcctagacgaactgcgagggaagggcatggccaccatgtattcctggtcctgcaaaaggaggtacaagaccagattcgtgtggcatgatgtgatggaggatgatatgctgctccccgcccaggaaagcgagtatgttctcaagggatccctcttgcccctccgccactcaacaccacctatagttggagctgcaccaccaacaaaagatcatgaccagctgaatattgatacaaccattattccaaaggccccatgtgtcaaggcaaatccacatgaagagtcaccaactcattcgcaaaaaggctggactactaattcatcatcatctcctccaatggttgaggatgaagaaccaccacctgtagctctgcaccaagggtcacagccagcactatcatcaatatcaccatcatcttgttgcaccactggggatggagatgatgagacagcatcaccacatccaagctgttcaggcagaccctcctcccctaataagtcaacaacaaaaggatcctcaggtggcacactctatcccactccatctagccttgcgcttcacagcaagcagatgatgccagggtgctgctatgtcatcgcagcagcacaagacttggcgacacagacccaaggaatatcaacagggaaagagattcacaaggacactagttgcagtactgatagcacaccggccaaggcaaccatacctaccaacaacaagcagcgggacaatgcaggatatttctatagcagaagtggtaggagtgggactttggagtccttgataagggctgaggctcatggcagaagggtcgccactgctaagaggacccaagaagaggacgacgacaaagaagcagtgcagtcatttgccacaaagctgaaccctgccaacctgctgatgagacttgtggcttgtgggtcgaccatgtcagcaaggcagcatctccctgcctgcagtctcatgcgaacagcacacaagccccggtatttgacccaacatgttgagttcctgccttcatctccagtcttgtctccccttggcacgctcatcatgcgtcctagaagtgctgatgaagccagaggagcttcagactcaggggactgcaaccattgcagagggaaactgcttcaaactacagagaataggtgtgagtcaggaaaagtgatgtccaccattgttaggccctcctcacattgtgaccataacagtgtttctgagaaagaagtccccatagcaaatttggataatttggaggacggaagtaaacttatctcacaaaaaatcagaatggcaccatgtcagcaacacacaagtgggacatttgtaaccacagatgtaggtggcgaacaaaaatccaatacattgtcaagaagtacgagcaaaaagatgatcaatccatcatcacgaccttcaagagtatcattccacgacgaaagggagaaagtgatcaagattgaagaaaggcttgcgtctagagctcgtgtcataatccagtgtgcaccattaatcacagaaacttatatcagtgccaaatcagtgtaacagaggcagtatcctcatgtctttcccctctatttttttccttatttatagttcagcagttgttagaacttagaggtgtgcaattgtattggatttctggtcaagatagtgttatgactgtcaagctgctgtcatggggtggcagcccagagcatggaggccatagagataggcgcaagttcaccgtcctgatcaatagccatgttgatagcaagaacacgtctagttgggtggcgctatctccactggaactcgcgacaactcaggctgtagaactggttgcggtctgtcattccctggcacatcgacttacatcgctagcagggttggctcatcctccacttcagttcactgtcctgatccatagccatgttgacagcaagaacatgtatggttgggtggtgatgtctccactggaactcgcgacagctcaggatgtggaactgcttgctgtcctcaggctgtggcacgcggcttcctggcgcaacatcaaccacggcaagcggtggcgcggttgtaggcagcgacttgatgtcttcaggttgcagcacgtggcttcctggcgcggcatcaagcatggcaagtggcagcagtggcgcggctgcaggctgcggtccgttgttccctggcacatcgacttgcatcgcctagcagggttggctgatcctccactccagttcaccgtcctaatccatagccatgttgacagcaaaaacatgtctggttgggtggcgctgcctccactggaactcacgacagctcaggctgtagaactgatcaagttaggcagtaagggtgttgcctatgatgcgtggatacttctcaaaattcacgtaccggtgtcagataccgtatcagatacagatactcctcggatacttctggatacgtatctgaggcgtatcgaaaattcctgtgaatttaaataaataaaaaaagacggatacttctaggacacctcttggacacctg

SEQ ID NO: 68600 - DNA, 2022 bp, Zea Mays
atgtcatcagaggaagtggcaaagatggaggcggaaatggcacaaatgaggcgctgcagtagcccaggccaaggtggtgtgcctgtgacggtggtgtactacctgtgccgcagcggacggcacctggagcacccacacatgttggagatgcacctcgcctctccaaatcaagccctctacctcagagatgtgatctgtcgcctagacgaactgcgagggaagggcatggccaccatgtattcctggtcctgcaaaaggaggtacaagaccagattcgtgtggcatgatgtgatggaggatgatatgctgctccccgcccaggaaagcgagtatgttctcaagggatccctcttgcccctccgccactcaacaccacctatagttggagctgcaccaccaacaaaagatcatgaccagctgaatattgatacaaccattattccaaaggccccatgtgtcaaggcaaatccacatgaagagtcaccaactcattcgcaaaaaggctggactactaattcatcatcatctcctccaatggttgaggatgaagaaccaccacctgtagctctgcaccaagggtcacagccagcactatcatcaatatcaccatcatcttgttgcaccactggggatggagatgatgagacagcatcaccacatccaagctgttcaggcagaccctcctcccctaataagtcaacaacaaaaggatcctcaggtggcacactctatcccactccatctagccttgcgcttcacagcaagcagatgatgccagggtgctgctatgtcatcgcagcagcacaagacttggcgacacagacccaaggaatatcaacagggaaagagattcacaaggacactagttgcagtactgatagcacaccggccaaggcaaccatacctaccaacaacaagcagcgggacaatgcaggatatttctatagcagaagtggtaggagtgggactttggagtccttgataagggctgaggctcatggcagaagggtcgccactgctaagaggacccaagaagaggacgacgacaaagaagcagtgcagtcatttgccacaaagctgaaccctgccaacctgctgatgagacttgtggcttgtgggtcgaccatgtcagcaaggcagcatctccctgcctgcagtctcatgcgaacagcacacaagccccggtatttgacccaacatgttgagttcctgccttcatctccagtcttgtctccccttggcacgctcatcatgcgtcctagaagtgctgatgaagccagaggagcttcagactcaggggactgcaaccattgcagagggaaactgcttcaaactacagagaataggtgtgagtcaggaaaagtgatgtccaccattgttaggccctcctcacattgtgaccataacagtgtttctgagaaagaagtccccatagcaaatttggataatttggaggacggaagtaaacttatctcacaaaaaatcagaatggcaccatgtcagcaacacacaagtgggacatttgtaaccacagatgtaggtggcgaacaaaaatccaatacattgtcaagaagtacgagcaaaaagatgatcaatccatcatcacgaccttcaagagtatcattccacgacgaaagggagaaagtgatcaagattgaagaaagaaacaggattgagtatcttgccaacaccaataaagctgtgtggggcagaaaatttcctcccaaggttgtactgtacagaagcataaatttgcacacaatttggttgcactgctgttacatttgagtcatggctactattgtacaggctacagtccattgatattacaaattactagtagcagtttgcatgtactgcgattcctccatcatcctctggtacttgtacatgcaagtgcttccaatctccagttgtgcttacttgtttatacatgctccattgttcctatttgtatccaggtctactatgtacggcttgctgaccagtagtaaatatctttccatcttgtttttaattcct

SEQ ID NO: 68601 - DNA, 1792 bp, Zea Mays
gttcaaaacatgagttcaaacgacaggtgatcgggaaggagctgtttgggcttctccgagagacgcacggcaagaggttccactccttcatcgaggagaaggtggtcccgttggccggcgacatcatccacgagaacctgggcgtggaggggccccagctgaggcggatgactcgggagctcaacgtcatcgtcaatggagctgccacaacaaacttctacgagaggtacgacgtggccctggacgtgaacgtgatgggagtgaagcatatctgccagttggccaagcagtgccccaatctggaggtcgtcctccatgtgtccacggcctatgtggtgggggagaagcaggggatgatcctggagcgggcgttcaagcagggcgagaccctgcggatggagacggagctggacatggacgccgagctgcgggtggccagggactaccagcagcaggtcgccggggacgacgccgagcagaagaacgagaggaaggccatgaaggagctgggcctcgccagggcccgggagttgggctggcccaacacgtacgtcttcaccaaggcgctaggggagatgatgctggcgcgggagctgggcggcgtcgtccccgccgtgatcgtgcggcccagcatcatcacaagcatccataaggagccgctgccggggtggatggaagggaccaggaccatcgacgccatcctcattggctacgccaagcagagcctctcctgcttcctagccgacctccagctcaccatggacgtgatccccggggacatggtggtgaacgcgatgatggccgcgacggtggcgcacgcgtccgcccccggcggccacaaggaggagtcgccgacggtgtaccacgcgacgtcttccctccgcaaccctgcgccgtacgcggtgctgtaccggacgggaatccgctacttctgcgaccacccgcgcgtgggcaaggacggccgccccgtgcgtacccgcaaggtgcacttcttcggcaccgtcgcagccttcaccgcctacatgctgctccgctacaggctgccgctggagcttctgcgcctgctcagcctcctctccggcggcctcctcttctcgcgcctctacgccgacctggaccgcaagtacaggttcgtcatgcatctcgtcgacctctacgggcccttcgcgctcttcaagggcatcttcgacgacgccaacatggagagactcaggatggccatgcctgtcgccgaccggctggagttcaacttcgacccaaacaccatcgactgggacgactacttctacaagatccacattccaggggtcatgaagtacgtcctcaagtagcagctacatgcactgatcgccgtcgttcgtactacctacatgtacatcatgatccatccagattagtactattaattaattaaatccaccaattggcgcgcgtttgtatacacattgctatatattgttgctacgctcgacgtggatcccacccatcctctctattcctcatcaaaatgtatccagttattagcagctctgctttagctaccactacgtacttctgctctggcttgtttatttagtgttaatttagcaggacctgatgatgatatactcatcctgtgtgttgtcatgtcagtcactgttggttaattgattatacttaagcaggtcgttgcataatcattgtggagaccttcattccaaagatagttctcctatatatatacaacatgcatttttgtggttctttcttggcgaccaggtcagatcggcctcgtcttgagaaaccttatgtg

SEQ ID NO: 68602 - DNA, 2109 bp, Zea Mays
ctcaaccctccattcaaggacggattttggtgggtggcttgtgcgccataaataccccacatcaggagcctcttttggtgcgcgcgctgtcactctagcgtgtctttctccccttcctgctttccctctccagctctcatacacaaacacacggagctagcagcacggatcgagagaacaatggaggaaacaagcaggatccctgggtacttcaagaacaagggcatcctgatcacgggcgcaacaggcttccttggaaagatcctcgtggagaagatactgagggtccagccggacgtaaagaggatctacctccccgtgcgtgcgccggatgctgcatcagccaagaaacgggtggagactgaggtgatcgggaaggagctgtttgggcttctccgagagacgcacggcaagaggttccactccttcatcgaggagaaggtggtcccgttggccggcgacatcatccacgagaacctgggcgtggaggggccccagctgaggcggatgactcgggagctcaacgtcatcgtcaatggagctgccacaacaaacttctacgagaggtacgacgtggccctggacgtgaacgtgatgggagtgaagcatatctgccagttggccaagcagtgccccaatctggaggtcgtcctccatgtgtccacgggggatgatcctggagcgggcgttcaagcagggcgagaccctgcggatggagacggagctggacatggacgccgagctgcgggtggccagggactaccagcagcaggtcgccggggacgacgccgagcagaagaacgagaggaaggccatgaaggagctgggcctcgccagggcccgggagttgggctggcccaacacgtacgtcttcaccaaggcgctaggggagatgatgctggcgcgggagctgggcggcgtcgtccccgccgtgatcgtgcggcccagcatcatcacaagcatccataaggagccgctgccggggtggatggaagggaccaggaccatcgacgccatcctcattggctacgccaagcagagcctctcctgcttcctagccgacctccagctcaccatggacgtgatccccggggacatggtggtgaacgcgatgatggccgcgacggtggcgcacgcgtccgcccccggcggccacaaggaggagtcgccgacggtgtaccacgcgacgtcttccctccgcaaccctgcgccgtacgcggtgctgtaccggacgggaatccgctacttctgcgaccacccgcgcgtgggcaaggacggccgccccgtgcgtacccgcaaggtgcacttcttcggcaccgtcgcagccttcaccgcctacatgctgctccgctacaggctgccgctggagcttctgcgcctgctcagcctcctctccggcggcctcctcttctcgcgcctctacgccgacctggaccgcaagtacaggttcgtcatgcatctcgtcgacctctacgggcccttcgcgctcttcaagggcatcttcgacgacgccaacatggagagactcaggatggccatgcctgtcgccgaccggctggagttcaacttcgacccaaacaccatcgactgggacgactacttctacaagatccacattccaggggtcatgaagtacgtcctcaagtagcagctacatgcactgatcgccgtcgttcgtactacctacatgtacatcatgatccatccagattagtactattaattaattaaatccaccaattggcgcgcgtttgtatacacattgctatatattgttgctacgctcgacgtggatcccacccatcctctctattcctcatcaaaatgtatccagttattagcagctctgctttagctaccactacgtacttctgctctggcttgtttatttagtgttaatttagcaggacctgatgatgatatactcatcctgtgtgttgtcatgtcagtcactgttggttaattgattatacttaagcaggtcgttgcataatcattgtggagaccttcattccaaagatagttctcctatatatatacaacatgcatttttgtggttctttcttggcgaccaggtcagatcggcctcgtcttgagaaaccttatgtg

SEQ ID NO: 68603 - DNA, 2189 bp, Zea Mays
agcattttcagctgtcaaagcatctgggggtttcttttattccttattaaacgtgtactcaaccctccattcaaggacggattttggtgggtggcttgtgcgccataaataccccacatcaggagcctcttttggtgcgcgcgctgtcactctagcgtgtctttctccccttcctgctttccctctccagctctcatacacaaacacacggagctagcagcacggatcgagagaacaatggaggaaacaagcaggatccctgggtacttcaagaacaagggcatcctgatcacgggcgcaacaggcttccttggaaagatcctcgtggagaagatactgagggtccagccggacgtaaagaggatctacctccccgtgcgtgcgccggatgctgcatcagccaagaaacgggtggagactgaggtgatcgggaaggagctgtttgggcttctccgagagacgcacggcaagaggttccactccttcatcgaggagaaggtggtcccgttggccggcgacatcatccacgagaacctgggcgtggaggggccccagctgaggcggatgactcgggagctcaacgtcatcgtcaatggagctgccacaacaaacttctacgagaggtacgacgtggccctggacgtgaacgtgatgggagtgaagcatatctgccagttggccaagcagtgccccaatctggaggtcgtcctccatgtgtccacggcctatgtggtgggggagaagcaggggatgatcctggagcgggcgttcaagcagggcgagaccctgcggatggagacggagctggacatggacgccgagctgcgggtggccagggactaccagcagcaggtcgccggggacgacgccgagcagaagaacgagaggaaggccatgaaggagctgggcctcgccagggcccgggagttgggctggcccaacacgtacgtcttcaccaaggcgctaggggagatgatgctggcgcgggagctgggcggcgtcgtccccgccgtgatcgtgcggcccagcatcatcacaagcatccataaggagccgctgccggggtggatggaagggaccaggaccatcgacgccatcctcattggctacgccaagcagagcctctcctgcttcctagccgacctccagctcaccatggacgtgatccccggggacatggtggtgaacgcgatgatggccgcgacggtggcgcacgcgtccgcccccggcggccacaaggaggagtcgccgacggtgtaccacgcgacgtcttccctccgcaaccctgcgccgtacgcggtgctgtaccggacgggaatccgctacttctgcgaccacccgcgcgtgggcaaggacggccgccccgtgcgtacccgcaaggtgcacttcttcggcaccgtcgcagccttcaccgcctacatgctgctccgctacaggctgccgctggagcttctgcgcctgctcagcctcctctccggcggcctcctcttctcgcgcctctacgccgacctggaccgcaagtacaggttcgtcatgcatctcgtcgacctctacgggcccttcgcgctcttcaagggcatcttcgacgacgccaacatggagagactcaggatggccatgcctgtcgccgaccggctggagttcaacttcgacccaaacaccatcgactgggacgactacttctacaagatccacattccaggggtcatgaagtacgtcctcaagtagcagctacatgcactgatcgccgtcgttcgtactacctacatgtacatcatgatccatccagattagtactattaattaattaaatccaccaattggcgcgcgtttgtatacacattgctatatattgttgctacgctcgacgtggatcccacccatcctctctattcctcatcaaaatgtatccagttattagcagctctgctttagctaccactacgtacttctgctctggcttgtttatttagtgttaatttagcaggacctgatgatgatatactcatcctgtgtgttgtcatgtcagtcactgttggttaattgattatacttaagcaggtcgttgcataatcattgtggagaccttcattccaaagatagttctcctatatatatacaacatgcatttttgtggttctttcttggcgaccaggtcagatcggcctcgtcttgagaaaccttatgtg

SEQ ID NO: 68604 - DNA, 297 bp, Zea Mays
gtaaaactacagcaaaatcaaccaaaccaacagaagtgccactaacagaatatgagaaattgagagctgagaatttgatgaggaataaccaaaagttgcaaagacttggtgtcactacactagcgtcaatacttaaccatacttctgcaaagagcaaggttgacactcatgaaaaatctggatctttgtatgaggtccaggaaggtgaaggttctgaagatgaggaagtcaatcagtgtgcaacaaaacggagaaacagattaaagagggtcttggcacctgcgcaacaagatgaac

SEQ ID NO: 68605 - DNA, 1417 bp, Zea Mays
ccggaggttgagcaatatttgaagatatacaaggaagagttagcggatcaaggaactccttatgttcaaaaaacccatgataagcaattttctttctggtttaagaagcatattgcaaaactacgttacgtggatggagaagacattagtgatgacctatttgcattgtcatgtgaaccggaccttcgggttcgaatattttcagcatgtcttgtcgatggggttcgatatcacactattgaccaaataattgagttgcgttataactcagatatgtccaaatgtcgcacagtggttctatttcgttgtgactggtttgacacttatagcaagaaggttagaatgaaagatgatggatattttagaagcatcaaccatggtagttgttggtacaaggatgatccttttattctatcaacacaagcaacaaaagtattttacttggatgacactaaacactgtgaaagctggagaattgttcaaaagtttacacataggcacttatggaatgtcactgaaaatgaaaatgaggaaacacccatgggcttgggactatcataccaagatgaaatatgtgcaggttttcatgtacaagtgaatgaaggaaatttgaatgatgaagtaccggatagtgaagattgtcaccacgtcaatacaagtttagttgatgagtttcgtaaaccaaggcaagacaatgtgcaaggagacgggacaagcgatgatgaagatgaaactatatggcaatatgttagtgatgatgaaagtccaacaattcttgtcgaggatgatgatgatgatagcgatgccgagtaaagactagaaagttgatggtggaagcgttgctgacctatatggatcttggtcatgaaaatggtgacccacatggatattgggtcactatgataggatggtggcaattagtgtgtgctaggatattaaattttattctagattttgggatgtcctaggtcttttagctcggacaaagtctatgcttgtgtcaaatatttttatctttctctatatgtctacagacgaagaaattataatatgtcagaactataatatgaatgagcaccaattcattgattttattcagaaatcatagtatccctttttcctgggcatatgtttcacttaatattgttttagtgtaggctgagtgaggaattgaggatgcatgcagtatgaatatgtgtaggcaatctgaaattctgaatatgtgcacgcaatctaaaattctgaatatgtggagataatctaaatatgtgtaggcaatctgaattgattttagtcttctggtgatattcacttgtgccattgaatattcactagtagtgtctgaatcagttttcacttgttggcactgaatctttggccaaacagtggtggcatgctttgacagaaattatctttg

SEQ ID NO: 68606 - DNA, 1821 bp, Zea Mays
cgaggaattatgcatagggatatatacgaagcaattgccgaattaggtaaattatttcaacaattatgtgctaagactctaaagttagatgttttgcatacaatgaaagctaaaatcccagtcattttgtgcaaacttgagaaaatatttcctcctgctttctttgatgtaatgctacacctagctgttcatttgcctgatgaggcaatccttagaggcccagtacaatatggatggatgtacccagtagaaagacgattgttgacattgaaacggtttgtgaggaacatggcaagacctgaaggatccattgcaaaagcatatgtcgctaatgagtgtttgacagcatgctcaaggtactttgatgatattgacacacgacacaatcgtgaaggaaggaacaaagagcgtgttgatttgagaaaaggatatacaaggaagagttagcggatcaaggaactccttatgttcaaaaaacccatgataagcaattttctttctggtttaagaagcatattgcaaaactacgttacgtggatggagaagacattagtgatgacctatttgcattgtcatgtgaaccggaccttcgggttcgaatattttcagcatgtcttgtcgatggggttcgatatcacactattgaccaaataattgagttgcgttataactcagatatgtccaaatgtcgcacagtggttctatttcgttgtgactggtttgacacttatagcaagaaggttagaatgaaagatgatggatattttagaagcatcaaccatggtagttgttggtacaaggatgatccttttattctatcaacacaagcaacaaaagtattttacttggatgacactaaacactgtgaaagctggagaattgttcaaaagtttacacataggcacttatggaatgtcactgaaaatgaaaatgaggaaacacccatgggcttgggactatcataccaagatgaaatatgtgcaggttttcatgtacaagtgaatgaaggaaatttgaatgatgaagtaccggatagtgaagattgtcaccacgtcaatacaagtttagttgatgagtttcgtaaaccaaggcaagacaatgtgcaaggagacgggacaagcgatgatgaagatgaaactatatggcaatatgttagtgatgatgaaagtccaacaattcttgtcgaggatgatgatgatgatagcgatgccgagtaaagactagaaagttgatggtggaagcgttgctgacctatatggatcttggtcatgaaaatggtgacccacatggatattgggtcactatgataggatggtggcaattagtgtgtgctaggatattaaattttattctagattttgggatgtcctaggtcttttagctcggacaaagtctatgcttgtgtcaaatatttttatctttctctatatgtctacagacgaagaaattataatatgtcagaactataatatgaatgagcaccaattcattgattttattcagaaatcatagtatccctttttcctgggcatatgtttcacttaatattgttttagtgtaggctgagtgaggaattgaggatgcatgcagtatgaatatgtgtaggcaatctgaaattctgaatatgtgcacgcaatctaaaattctgaatatgtggagataatctaaatatgtgtaggcaatctgaattgattttagtcttctggtgatattcacttgtgccattgaatattcactagtagtgtctgaatcagttttcacttgttggcactgaatctttggccaaacagtggtggcatgctttgacagaaattatctttg

SEQ ID NO: 68607 - DNA, 5244 bp, Zea Mays
ccctctatcagatttttatctgccgcgccttctgattttttttccaccgtcggaggcatacgtcccctgccctcttcccatatcggtgctcatctcctgggttgaagccgccgcacagccttcatctccccgcccagcccctctctctggcgagcttgacccggcgtcgagctctggcggtcctcctccgctgccactcgttggaccttgcccctgctgcgccgtcgatagctcaccacaccctctcctccctggctcccgagcttcaaccatggagcttgtcccctctctgctcgtcggtgacctacgtcttctccagccaagccgcagccaagctcatctccatagccgacgcccctgccctcctgctcgccatggctggccatcggacgacgcacagcaacctcgccgtttctgagcccgaccccgccatggagctcacggcgcctactgctgctcagccttgggtgccgtcgctgagctcgccctgctccctggtgcttcctgctcgccgtctctggcgagctggctgtcctgcccgtcatggtggcgcgcgctccatctcccatggcgcccggccgcccctctttgctcatcttcgccgtcgggctgggatattccttggtgctacaactgggaggtgctcgccgagccctgtatcactggttaagcgtgcctgcccacaccgtcgtctttgatctctcgctccggtctccttgttcttcatcgcttgccaggtgttcggtaaaatgggtgaaccggtgaacgtcgttaattttatgttttcgagtcaaattactatctggtgcttatgggtgtttttgtgtgtgagattggagaaaggagatcctcggattttgtggatgatgaagtaagatccatgtgacgttcgccaagtattcggtggattgctcgaactaggattcgttgtcgttttcgtgaattcgtgttgttttgatcatgctccacgtatccatccagcgccctgtacctcaacaacaaattctttcacgccgccgcaattgaatcaagaggcagcagcctccctctctcgtgacatcgccggtggtaccaatttgggcgccattgagggtgactacgccacctcgcctgtgccctcgcactcgcaggtaattgcggtggtgccaatttgggcggcagtgcagctggtgacgcctccctcgtagctccacccacaggttactgtcttgctcagatctgccctcattatagaagcaacatcgacttgcgtgcccacgacacaagctcgtgtcagtgctactgccaccatccctccacagcacagccacgctgcctgcctcatgtgtcactactgcgtcctatcctgccacaccggatagaacttctacaagatggatagatcttggatcaaagacagactatttagcgatgcacatttggatggggtcaaagagttcatgaatttggtttcacaaagatttgataagaatgaggaggtactatgtccatgtcgaaggtgtctgaatcgagttcatcaacataagggggaggtgtatgatcatttacttattcatgggatgactagcacatacactagatgggtacatcatggagaaccatttgaggctgaaattaatgaaaattatgatcatgtagatgaatatattggtatcaatgaggatgacggtatgaacgagaatgaagaagatgagcctgataatagaattcctgatatgattcgggagttgtacccaactaatgaccaaggtagagggaaatctatgtttgcagctttattagaagaaatgaagcatgaactttaccctggagcaccttacacacgtttttcttttttggtgaagttacttcatatcaagtcattttatcgaatcagcaacgttgcattcactgcaatactaaaactattatcatcagcattcccagattgctctcttcctgcatcttaccatgaagcaaagaatgttattaatgcgttaggacttggatatgactcaatccatgtctgcccaaacaattgtgttctatttcgaaaggaatatgcaaaacatgatgaatgtctggtttgtggtgcatcaagatggaaagatagtacagatggaaaaaaacatattcctgagaaagtactacgacattttccaattattccaaggttgaaaaggttctttgcttccaaaaaaatatcagaggagacacaatggcatttattgaagaggaaggcattggagaatgaactaagccatccagctgatggtgagacatggaaagattttgatagaaaatatgagtggtttgcaaaagatggaaggaacattagacttggtcttgctactgatggtttcaatccatttggcaaaatgaactcttcatacagcatgtggcctatatttattattccttacaactttcctccatgggagtgtgtggagcaatccaacttcatgatgggactactcattcctggtccatcatgtccaggaaaggatttagatgtttttttggagccactcattgaagagttgcaagagctttggaaaggtgtctctacttttgatgcgttgacaggaaaagattttgatctacatgctgttgttatatggtgcattcatgattacccagctttgagtacattgtcaggtcgagtcactaaaggttattatgcttgtgtgcattgtgacaaaaatccatgctctagaagaataaaaaataagatatgctatattggccatcgacgtttccttccatgggaccatatatggaggacaaagaaatggtttgatggtaaggaggaccatcttgaaaaaccagaggaatttagtacagacgagttgatgcagcagttggagagggtcaaggatgttaggccgggacaacatcctcaaagtaaaaagagaaagcgagaagtagatggtcaatgttggaaacgaagatcatcattgtgggatttgccttattggtcaaatttgaagctacgccataaccttgatgtgatgcacattgaaaagaatatatgtgagtccattattggtacatttcttggcattattgggaagacaaaggacactattaatgctaggcttgacttggaagaaatgagcataaggaaacatttgcatttgaagcgtgatggaaattcctacactgttcctcatgccccctatgtaatgaataggagccaaaagttagttttttgtgacttcttgagaagagtaaaatttcctgatgggtatgcttctaacttagcaaaatctattactagtgatggatgtaaccttcaaggattgaaaactcatgactgtcatatcctactccaaagaattttacctgttgctatccgaggaattatgcatagggatatatacgaagcaattgccgaattaggtaaattatttcaacaattatgtgctaagactctaaagttagatgttttgcatacaatgaaagctaaaatcccagtcattttgtgcaaacttgagaaaatatttcctcctgctttctttgatgtaatgctacacctagctgttcatttgcctgatgaggcaatccttagaggcccagtacaatatggatggatgtacccagtagaaagacgattgttgacattgaaacggtttgtgaggaacatggcaagacctgaaggatccattgcaaaagcatatgtcgctaatgagtgtttgacagcatgctcaaggtactttgatgatattgacacacgacacaatcgtgaaggaaggaacaaagagcgtgttgatttgagaaaaggtgatttttctgtgttccagcatggagttgatctacttggagcaccaaggcttacatatcttgaagataattatgacagaatggtttggatatacaaggaagagttagcggatcaaggaactccttatgttcaaaaaacccatgataagcaattttctttctggtttaagaagcatattgcaaaactacgttacgtggatggagaagacattagtgatgacctatttgcattgtcatgtgaaccggaccttcgggttcgaatattttcagcatgtcttgtcgatggggttcgatatcacactattgaccaaataattgagttgcgttataactcagatatgtccaaatgtcgcacagtggttctatttcgttgtgactggtttgacacttatagcaagaaggttagaatgaaagatgatggatattttagaagcatcaaccatggtagttgttggtacaaggatgatccttttattctatcaacacaagcaacaaaagtattttacttggatgacactaaacactgtgaaagctggagaattgttcaaaagtttacacataggcacttatggaatgtcactgaaaatgaaaatgaggaaacacccatgggcttgggactatcataccaagatgaaatatgtgcaggttttcatgtacaagtgaatgaaggaaatttgaatgatgaagtaccggatagtgaagattgtcaccacgtcaatacaagtttagttgatgagtttcgtaaaccaaggcaagacaatgtgcaaggagacgggacaagcgatgatgaagatgaaactatatggcaatatgttagtgatgatgaaagtccaacaattcttgtcgaggatgatgatgatgatagcgatgccgagtaaagactagaaagttgatggtggaagcgttgctgacctatatggatcttggtcatgaaaatggtgacccacatggatattgggtcactatgataggatggtggcaattagtgtgtgctaggatattaaattttattctagattttgggatgtcctaggtcttttagctcggacaaagtctatgcttgtgtcaaatatttttatctttctctatatgtctacagacgaagaaattataatatgtcagaactataatatgaatgagcaccaattcattgattttattcagaaatcatagtatccctttttcctgggcatatgtttcacttaatattgttttagtgtaggctgagtgaggaattgaggatgcatgcagtatgaatatgtgtaggcaatctgaaattctgaatatgtgcacgcaatctaaaattctgaatatgtggagataatctaaatatgtgtaggcaatctgaattgattttagtcttctggtgatattcacttgtgccattgaatattcactagtagtgtctgaatcagttttcacttgttggcactgaatctttggccaaacagtggtggcatgctttgacagaaattatctttg

SEQ ID NO: 68608 - DNA, 980 bp, Zea Mays
ccctctatcagatttttatctgccgcgccttctgattttttttccaccgtcggaggcatacgtcccctgccctcttcccatatcggtgctcatctcctgggttgaagccgccgcacagccttcatctccccgcccagcccctctctctggcgagcttgacccggcgtcgagctctggcggtcctcctccgctgccactcgttggaccttgcccctgctgcgccgtcgatagctcaccacaccctctcctccctggctcccgagcttcaaccatggagcttgtcccctctctgctcgtcggtgacctacgtcttctccagccaagccgcagccaagctcatctccatagccgacgcccctgccctcctgctcgccatggctggccatcggacgacgcacagcaacctcgccgtttctgagcccgaccccgccatggagctcacggcgcctactgctgctcagccttgggtgccgtcgctgagctcgccctgctccctggtgcttcctgctcgccgtctctggcgagctggctgtcctgcccgtcatggtggcgcgcgctccatctcccatggcgcccggccgcccctctttgctcatcttcgccgtcgggctgggatattccttggtgctacaactgggaggtgctcgccgagccctgtatcactggttaagcgtgcctgcccacaccgtcgtctttgatctctcgctccggtctccttgttcttcatcgcttgccaggtgttcggtaaaatgggtgaaccggtgaacgtcgttaattttatgttttcgagtcaaattactatctggtgcttatgggtgtttttgtgtgtgagattggagaaaggagatcctcggattttgtggatgatgaagtaagatccatgtgacgttcgccaagtattcggtggattgctcgaactaggattcgttgtcgttttcgtgaattcgtgttgttttgatcatgtgtataagttatacagg

SEQ ID NO: 68609 - DNA, 1555 bp, Zea Mays
ccctctatcagatttttatctgccgcgccttctgattttttttccaccgtcggaggcatacgtcccctgccctcttcccatatcggtgctcatctcctgggttgaagccgccgcacagccttcatctccccgcccagcccctctctctggcgagcttgacccggcgtcgagctctggcggtcctcctccgctgccactcgttggaccttgcccctgctgcgccgtcgatagctcaccacaccctctcctccctggctcccgagcttcaaccatggagcttgtcccctctctgctcgtcggtgacctacgtcttctccagccaagccgcagccaagctcatctccatagccgacgcccctgccctcctgctcgccatggctggccatcggacgacgcacagcaacctcgccgtttctgagcccgaccccgccatggagctcacggcgcctactgctgctcagccttgggtgccgtcgctgagctcgccctgctccctggtgcttcctgctcgccgtctctggcgagctggctgtcctgcccgtcatggtggcgcgcgctccatctcccatggcgcccggccgcccctctttgctcatcttcgccgtcgggctgggatattccttggtgctacaactgggaggtgctcgccgagccctgtatcactggttaagcgtgcctgcccacaccgtcgtctttgatctctcgctccggtctccttgttcttcatcgcttgccaggtgttcggtaaaatgggtgaaccggtgaacgtcgttaattttatgttttcgagtcaaattactatctggtgcttatgggtgtttttgtgtgtgagattggagaaaggagatcctcggattttgtggatgatgaagtaagatccatgtgacgttcgccaagtattcggtggattgctcgaactaggattcgttgtcgttttcgtgaattcgtgttgttttgatcatgtgtataagttatacaggtgccagaggttcacacttagcaaataaaaagacaaagtattgggttcaacaaaagagcaaagggacaaccgaaggcacctctggtctggcgcaccggactgtccggtgcatcaccggacagtgtccggtgcaccagaggactccaattcaaactcgtcaccttcgggaaaatccagaggcgctccgctataattcaccggactgtccggtgtacaccggacagtgtccggtgctccaaggaagagcggctctggaactcgccagcttcgggaattcgcaacggctagtccactataattcaccggacatgtccggtgtacaccggactatccggtgtgacatcgaagcaacggatacttcggcgccaacggctacctgcagtgcattgaatgcgcgctagcgcgcgcagaatgcaggcacgcccatactagcgcaccggacactctacggtacatgtctggtgcgccaccggacatccaggcgggcccagaagacagaggtctaacggtcggaacccgacggctttggtgacgtgactggcgcaccggacatgtccggtgtacaccggactgtcc

SEQ ID NO: 68610 - DNA, 1762 bp, Zea Mays
gtacatgcatttgtattctattaatttttagagtgatttattatttatcaaatcatgtcattaatgtacagaaatcacttctactgagtatgagaaacaaagggcagcaaatgtgatgaggaacaatcagatgttccaacggcttgggattaatcagttacgcacaatgatgactgctacaagagtaaagagcaaatatgatggtccagaggaatcagggtctttgtttgatggcgaggatagtgaaggctctgagccagaggaggattcccatgttgcacaaggtgtacgtagccacaacccaactcatgttgctgacaaacctacacaacaaacacgagattccaaaagggttgtggcccctgatgttcatggacaacagattagattcactaggcaaaggagtgctgccataaatcaacaatcctccctaagcctaactactactacacaagctggttcaagagccaccacaaaccaagaatccacccaaaacttggctgctgcaacacaatttacttcaagtgttgccactgagcaagattacaccgcaggcctgactactactgcacaacctacttctcccacacaagctgaggtcaatgacaacaatagagatgaagaattggtaccaaggcaaagaagtaggggcaaacaacttgaatccttgagcagagggttaggcactaagattccaatccaaatctctaatgggaagcgaaggccagagccacctattcagactgcaaagtttgcatcggagggtgggatcatattgaggcaacacattccaatatttccgcactggaaggagtacaagaagcaagagaacgagggtaaaattacagactacattgggaagcttgctgtaagtcatttttccctcacttgttcagttacagttcattgccctttttaattgagtatcatagagtcaccacttctttgctagggtcaattcaccatggatgttgagagtaatgcagtaaaagatgcatgtgttgatatgctaaagggtggacagcgccaaatgaggtataggctgaaaaaaaagtacttcactggagttcctgcaaatcaagtgaggactacatcacctgtttcatgtatcactgatgatcaatggagagagttggtacaaatgtggtctagcccaaaccacaagaacaattgtgtgaagaacaaacttaatcgtgagaaggtgcaatttccacagtgcacaggatctcaatcatatgttgcaaaagcttatgtagtgagacaagaaaaatataaagatgtcgaacctagtgcaattgatcttttcaaggagatgcattgcagcaagaaaaaaggatttagtgaagttgttcagaaagccatagtaaatatggataccttaaaagccaagtcacaagcatctgaggcaaccattgctaatcaatcaactgagattgcagatttaaagaagtccttagcagaaaatagcatcctacttcgacagatattaagtattagtcgtgatcagctgaatccttaagcatgcttgctaagatgctggtgtcaaccatcctgaatacacatctcacaaaactgtggacctctttttatccttatgtttgctatatggaactgcaacttacagtctattatatgtgttctcttgctatagagttttagtacttgtctggttaaagaattatgaaccatgttcttttgtgtgttggacatattatgcttgaaatatatggatgttggaaaaagttgtgactttggatgattg

SEQ ID NO: 68611 - DNA, 1834 bp, Zea Mays
gtacatgcatttgtattctattaatttttagagtgatttattatttatcaaatcatgtcattaatgtacagaaatcacttctactgagtatgagaaacaaagggcagcaaatgtgatgaggaacaatcagatgttccaacggcttgggattaatcagttacgcacaatgatgactgctacaagagtaaagagcaaatatgatggtccagaggaatcagggtctttgtttgatggcgaggatagtgaaggctctgagccagaggaggattcccatgttgcacaaggtgtacgtagccacaacccaactcatgttgctgacaaacctacacaacaaacacgagattccaaaagggttgtggcccctgatgttcatggacaacagattagattcactaggcaaaggagtgctgccataaatcaacaatcctccctaagcctaactactactacacaagctggttcaagagccaccacaaaccaagaatccacccaaaacttggctgctgcaacacaatttacttcaagtgttgccactgagcaagattacaccgcaggcctgactactactgcacaacctacttctcccacacaagctgaggtcaatgacaacaatagagatgaagaattggtaccaaggcaaagaagtaggggcaaacaacttgaatccttgagcagagggttaggcactaagattccaatccaaatctctaatgggaagcgaaggccagagccacctattcagactgcaaagtttgcatcggagggtgggatcatattgaggcaacacattccaatatttccgcactggaaggagtacaagaagcaagagaacgagggtaaaattacagactacattgggaagcttgctggtcaattcaccatggatgttgagagtaatgcagtaaaagatgcatgtgttgatatgctaaagggtggacagcgccaaatgaggtataggctgaaaaaaaagtacttcactggagttcctgcaaatcaagtgaggactacatcacctaacaattgtgtgaagaacaaacttaatcgtgagaaggtgcaatttccacagtgcacaggatctcaatcatatgttgcaaaagcttatgtagtgagacaagaaaaatataaagatgtcgaacctagtgcaattgatcttttcaaggagatgcattgcagcaagaaaaaaggatttagtgaagttgttcagaaagccataggtgatatggaagcaatggtggcaacaccagctgaagatggacagcttacaaagtctgcaacagaagttgtttccaatgtactgcctggttcaagtaaatttcttcacaatgctggccttttgccctcctccaagagaagcaacacagggactgtttcagcaagaatgcaagagcttcagtctcaattggacaatgagaggcgagaaaaagatggacttcgagaagatatggataccttaaaagccaagtcacaagcatctgaggcaaccattgctaatcaatcaactgagattgcagatttaaagaagtccttagcagaaaatagcatcctacttcgacagatattaagtattagtcgtgatcagctgaatccttaagcatgcttgctaagatgctggtgtcaaccatcctgaatacacatctcacaaaactgtggacctctttttatccttatgtttgctatatggaactgcaacttacagtctattatatgtgttctcttgctatagagttttagtacttgtctggttaaagaattatgaaccatgttcttttgtgtgttggacatattatgcttgaaatatatggatgttggaaaaagttgtgactttggatgattg

SEQ ID NO: 68612 - DNA, 1900 bp, Zea Mays
gtacatgcatttgtattctattaatttttagagtgatttattatttatcaaatcatgtcattaatgtacagaaatcacttctactgagtatgagaaacaaagggcagcaaatgtgatgaggaacaatcagatgttccaacggcttgggattaatcagttacgcacaatgatgactgctacaagagtaaagagcaaatatgatggtccagaggaatcagggtctttgtttgatggcgaggatagtgaaggctctgagccagaggaggattcccatgttgcacaaggtgtacgtagccacaacccaactcatgttgctgacaaacctacacaacaaacacgagattccaaaagggttgtggcccctgatgttcatggacaacagattagattcactaggcaaaggagtgctgccataaatcaacaatcctccctaagcctaactactactacacaagctggttcaagagccaccacaaaccaagaatccacccaaaacttggctgctgcaacacaatttacttcaagtgttgccactgagcaagattacaccgcaggcctgactactactgcacaacctacttctcccacacaagctgaggtcaatgacaacaatagagatgaagaattggtaccaaggcaaagaagtaggggcaaacaacttgaatccttgagcagagggttaggcactaagattccaatccaaatctctaatgggaagcgaaggccagagccacctattcagactgcaaagtttgcatcggagggtgggatcatattgaggcaacacattccaatatttccgcactggaaggagtacaagaagcaagagaacgagggtaaaattacagactacattgggaagcttgctggtcaattcaccatggatgttgagagtaatgcagtaaaagatgcatgtgttgatatgctaaagggtggacagcgccaaatgaggtataggctgaaaaaaaagtacttcactggagttcctgcaaatcaagtgaggactacatcacctgtttcatgtatcactgatgatcaatggagagagttggtacaaatgtggtctagcccaaaccacaagaacaattgtgtgaagaacaaacttaatcgtgagaaggtgcaatttccacagtgcacaggatctcaatcatatgttgcaaaagcttatgtagtgagacaagaaaaatataaagatgtcgaacctagtgcaattgatcttttcaaggagatgcattgcagcaagaaaaaaggatttagtgaagttgttcagaaagccataggtgatatggaagcaatggtggcaacaccagctgaagatggacagcttacaaagtctgcaacagaagttgtttccaatgtactgcctggttcaagtaaatttcttcacaatgctggccttttgccctcctccaagagaagcaacacagggactgtttcagcaagaatgcaagagcttcagtctcaattggacaatgagaggcgagaaaaagatggacttcgagaagatatggataccttaaaagccaagtcacaagcatctgaggcaaccattgctaatcaatcaactgagattgcagatttaaagaagtccttagcagaaaatagcatcctacttcgacagatattaagtattagtcgtgatcagctgaatccttaagcatgcttgctaagatgctggtgtcaaccatcctgaatacacatctcacaaaactgtggacctctttttatccttatgtttgctatatggaactgcaacttacagtctattatatgtgttctcttgctatagagttttagtacttgtctggttaaagaattatgaaccatgttcttttgtgtgttggacatattatgcttgaaatatatggatgttggaaaaagttgtgactttggatgattg

SEQ ID NO: 68613 - DNA, 675 bp, Zea Mays
gtacatgcatttgtattctattaatttttagagtgatttattatttatcaaatcatgtcattaatgtacagaaatcacttctactgagtatgagaaacaaagggcagcaaatgtgatgaggaacaatcagatgttccaacggcttgggattaatcagttacgcacaatgatgactgctacaagagtaaagagcaaatatgatggtccagaggaatcagggtctttgtttgatggcgaggatagtgaaggctctgagccagaggaggattcccatgttgcacaaggtgtacgtagccacaacccaactcatgttgctgacaaacctacacaacaaacacgagattccaaaagggttgtggcccctgatgttcatggacaacagattagattcactaggcaaaggagtgctgccataaatcaacaatcctccctaagcctaactactactacacaagctggttcaagagccaccacaaaccaagaatccacccaaaacttggctgctgcaacacaatttacttcaagtgttgccactgagcaagattacaccgcaggcctgactactactgcacaacctacttctcccacacaagctgaggtcaatgacaacaatagagatgaagtagctatatataatattgataaaaagcctgagcacaaagatcttcgtgtaac

SEQ ID NO: 68614 - DNA, 299 bp, Zea Mays
gtccactatgtgggcgtggggatcctggtgtttgctggtgttaaccttccccacagctacctagtttgcttcagccagtgcatcatgtgaccatggtgaccatgcaacccgagtgctcttctcaccatggccaggtgatgaggagtactctaagtgttactaaggctggagggcatttccagttctagaggaggattagttaggcttgtgtataagctttggagggttcctaccttcctgctattgtaataagttatgcactttgagtatatcagacttgtaataaatgtaactcttac

SEQ ID NO: 68615 - DNA, 2878 bp, Zea Mays
cgcacgctcacccaaccatctcccatggcagccacgtctccctctctcctccctcagctcgctggtgcttgccgcacagtctcgagctccccatggtgcgcggtcctggtccagcccctgttcttctctcttctcctccaccgcatccttctccctagacaccccttcggccgagcatcctctctgccggagctgcctcaacgcccgcactccttcaggttcttccatggcgatcgtcgttgaactccgtgcgcgcgcctgctcctatgccgcgacccccagttccctcccatggtgctcttcctcggccactgcttccccagccacgagttccccctgctcggcatctcctcgagattgccttagctcgatgcccagtttctttctccatcgcgccctgctcgatttcacccctgtgtcgcgtgccctggcatctgcgtgctccgcgcgcgccccttcctcctgcttggatccgaccatcattctggcagctggccacgcccctgcccctgcttctccctcgccagcgcgcgtcctctgctaaatcgtctctagctcgccctggatggcattcctctccctgcgcacagctgcgagctccgctctgtcgctcggtccttgctgtagctcgcgcccagcttccctatgcgcgcttagcttggagctcccgcagcctagctcgggtcttttccatggccacgcgcacctcaagctcgactctctggtgtcgcacgcgtgcctcttgttcgcccctgcttggactgtgttcaccctctgcatgtgtcgagctcctctgttgtgtgcgcgaatctgttgtgtgcgcaaagttctctgcttgcaatggcgtgtcgagcttccgtgtcgagctcctctcttccgtgccggtcgtcgtctccgagccgattcttggctgtcgcagtatttttagttatccggctgcgtctgtggtcgtcaagtgtgtctgttgccgtgaactcgcctgtggtgcccactctgtctctggtccgcgcttccttcagctcggccaggcggggcatcgttccgtgctgtgctcgcccaagtcgttgccgtcaaatcatcggagtcgctcaactcgccaatcgcatcttggccgattgtcaattttctatttgccatggtacaacacaactattagatctgatctccaaaccgccatggcgtccgtcgtcctctgctcccagcccgacctatctgtgcgctctctcttcgtccatcgggcttcgcgcgtgctcgcatttatcgtcgggttgttgaacccgtccttccttgcttgtgacttcgtcatcgccagagccctcactggattcgtgtcctcgccagctcactccaaattcggtctcgtcgtcgttccgtgcgtcatcaagaaatcccaagaatctggtgaagatgaagctagcagggtgatattcaccaagtactcgacaaaagctcgcacaagtcgtcgatcgacatcctcgtctacgccaagcccctaagctgtgaagacactctggtgctggccacacgtcaccagctcaacaaaaggaatacatggatatttggtcaagaatagaaactgtgtgcctcgctcgccagacgggtgtgatcaatgacgtcgaccagaaaccgtcatcgtgcttccaactatcgcgtcgaagtagtcagggtaagcaaatttgttattcttgttagtggatggatggatggtttggctaggtatgatatttattagattgcctgagtcactttggtaatttggtcgatgtcgtaggatgaaagaggtctcaataggtctcagtgtttgcgggactgtaggtgttaaaaatgggaagttttactaatatatatatgatacacaggttaaccggtaagttagtttagaaagttaataaatgtttttctatcaaattttataagtattaggtgtccaaggcttgtgaagttaaagttataagtcgtttagtgtgctctctaaactaggtataatattctatgtgtgttagtcactttcataattggaatggatgttgattgctacctcgactgcttaggtaggttataaaagcatgattgccgtaagtagcaatatatcgataattagtgtctataatgtctcgtcattaagtaggttatttctcttttgtgtagcatcgtaatatctggtgttattgttccttatatgcattcatgtgcattatgcatatcattcaggtatgttaattaatcacgtgatgtggaagacgacccaagtcgaccccaagcgcgggctactccgcatagtaaagcgaatggacgaacctgaagatgggatgatctgatcaagtgctaggacaaggatgatcgtcaagtgaacatcatctaacaacactaacctagtgttacccaggcaagccccggtgcatttgccacctccttgtgttttaaaatctttatcaccttgtttgatgcattaggtgataggagttgtgtgctaaaccgttgatgcatttccttccttggaaaattgaatacccttccttgacacccttttataaaaatgatttttgatgcttagccttgctttagcaaacaaaaatgttttcttttaaaacaaaggtgacgcttcagtgggtgggaatgtttttaaaaataaaacttgatggtgaatccatcatggtcgtgatgggttcaacaacagaaaagatgtacctctgccagataccaaactttgcgttgaaaataataaagctgagaccgggcggttgacttgcacgagaaaggagtctcggtgtagtgtctccgtctgagtcgattaaggaccttgtcgatgtaggcttgctgatcgaggaccctgttgggggtcttcgtcctccgaaggtcctcaaaaacatgatttgac

SEQ ID NO: 68616 - DNA, 2339 bp, Zea Mays
ctctcacgcacgctcacccaaccatctcccatggcagccacgtctccctctctcctccctcagctcgctggtgcttgccgcacagtctcgagctccccatggtgcgcggtcctggtccagcccctgttcttctctcttctcctccaccgcatccttctccctagacaccccttcggccgagcatcctctctgccggagctgcctcaacgcccgcactccttcaggttcttccatggcgatcgtcgttgaactccgtgcgcgcgcctgctcctatgccgcgacccccagttccctcccatggtgctcttcctcggccactgcttccccagccacgagttccccctgctcggcatctcctcgagattgccttagctcgatgcccagtttctttctccatcgcgccctgctcgatttcacccctgtgtcgcgtgccctggcatctgcgtgctccgcgcgcgccccttcctcctgcttggatccgaccatcattctggcagctggccacgcccctgcccctgcttctccctcgccagcgcgcgtcctctgctaaatcgtctctagctcgccctggatggcattcctctccctgcgcacagctgcgagctccgctctgtcgctcggtccttgctgtagctcgcgcccagcttccctatgcgcgcttagcttggagctcccgcagcctagctcgggtcttttccatggccacgcgcacctcaagctcgactctctggtgtcgcacgcgtgcctcttgttcgcccctgcttggactgtgttcaccctctgcatgtgtcgagctcctctgttgtgtgcgcgaatctgttgtgtgcgcaaagttctctgcttgcaatggcgtgtcgagcttccgtgtcgagctcctctcttccgtgccggtcgtcgtctccgagccgattcttggctgtcgcagtatttttagttatccggctgcgtctgtggtcgtcaagtgtgtctgttgccgtgaactcgcctgtggtgcccactctgtctctggtccgcgcttccttcagctcggccaggcggggcatcgttccgtgctgtgctcgcccaagtcgttgccgtcaaatcatcggagtcgctcaactcgccaatcgcatcttggccgattgtcaattttctatttgccatggtacaacacaactattagatctgatctccaaaccgccatggcgtccgtcgtcctctgctcccagcccgacctatctgtgcgctctctcttcgtccatcgggcttcgcgcgtgctcgcatttatcgtcgggttgttgaacccgtccttccttgcttgtgacttcgtcatcgccagagccctcactggattcgtgtcctcgccagctcactccaaattcggtctcgtcgtcgttccgtgcgtcatcaagaaatcccaagaatctggtgaagatgaagctagcagggtgatattcaccaagtactcgacaaaagctcgcacaagtcgtcgatcgacatcctcgtctacgccaagcccctaagctgtgaagacactctggtgctggccacacgtcaccagctcaacaaaaggaatacatggatatttggtcaagaatagaaactgtgtgcctcgctcgccagacgggtgtgatcaatgacgtcgaccagaaaccgtcatcgtgcttccaactatcgcgtcgaagtagtcagggtatgttaattaatcacgtgatgtggaagacgacccaagtcgaccccaagcgcgggctactccgcatagtaaagcgaatggacgaacctgaagatgggatgatctgatcaagtgctaggacaaggatgatcgtcaagtgaacatcatctaacaacactaacctagtgttacccaggcaagccccggtgcatttgccacctccttgtgttttaaaatctttatcaccttgtttgatgcattaggtgataggagttgtgtgctaaaccgttgatgcatttccttccttggaaaattgaatacccttccttgacacccttttataaaaatgatttttgatgcttagccttgctttagcaaacaaaaatgttttcttttaaaacaaaggtgacgcttcagtgggtgggaatgtttttaaaaataaaacttgatggtgaatccatcatggtcgtgatgggttcaacaacagaaaagatgtacctctgccagataccaaactttgcgttgaaaataataaagctgagaccgggcggttgacttgcacgagaaaggagtctcggtgtagtgtctccgtctgagtcgattaaggaccttgtcgatgtaggcttgctgatcgaggaccctgttgggggtcttcgtcctccgaaggtcctcaaaaacatgatttgac

SEQ ID NO: 68617 - DNA, 418 bp, Zea Mays
tgcaaaatcaatgatgacagccttatcggataatcgtttggatcaattcttcacgatattaattctccttacacaataattattttaatctttggtttcgcacgacatgaccacttcatcggatacgaaccaccgatttaatcctgcttgcataacctacgtcattacacctaaacttagctacgcagcacgacgacttcgcaatcggggacacaattaccatgctgcaggtagccccgtattcctacaagcgtcaaataaatacgtgcctgagctacacgcggaataatcatcgcgacatatatacctatcaattcatttatcaaactagtcaataaaaatagcaaagcagcttaccgttctaatatctgactcgaatccgcgagaacggtaatgattttctcatccaggcaattta

SEQ ID NO: 68618 - DNA, 879 bp, Zea Mays
aaaatatttacattcgtccatggcttgatgtgtgcacaatacataatgctaactcaatcacgaacatgaatctgcccatccacacagaaatcaatgcaaaatcagggaacactagcctagagagagaaaaaagaaagcatgcaccattaggtactccaggttgtttaatcatcaagattgaacgagctaatgatttttttctttttttaccgaaaaataccagtacattacaagaagttgtcaaggcgattattatattcatctatttattaatccaaagacaacatcgccatcaacatttcgagatccacggacttcaccctctccgacctctgcgcgagcttcctctgatccaaacaaacagagtaccactgatagctatatgacccaaaaacattcaccgcagagacaaaacggggagtagaaagccaaacagatccgaggaagatgcttgagattaccttgctattctaccggagcggctaccaaagaacgctggacgcctatccaccacatgccaacctcaaaacaagtgaggcaaagcgatgtcaagcatctgcaaggatgagacaaattaccgaacaaattcgaaaggagcatttgcttcttcattatacatatcaaatggacgtgaccaagattaatttttggaaatctatgtctttgttcatacatgtctatatgagtaaataggaatttaccagtaaatgggaatttaccgaacaaatctttgttcatacatggatggtataaaattattggaaatctgtatgtctttgttcaaaggagaactctctggaataatgaagtaaataggaatttaccagcctgtaggcgttcacgctcggggaatctatatgagtgcttaagaaacaatac

SEQ ID NO: 68619 - DNA, 3050 bp, Zea Mays
ggtatttaggtgaaacaaaacttttgttcgtacaaaatcaacaaaatatttacattcgtccatggcttgatgtgtgcacaatacataatgctaactcaatcacgaacatgaatctgcccatccacacagaaatcaatgcaaaatcagggaacactagcctagagagagaaaaaagaaagcatgcaccattaggtactccaggttgtttaatcatcaagattgaacgagctaatgatttttttctttttttaccgaaaaataccagtacattacaagaagttgtcaaggcgattattatattcatctatttattaatccaaagacaacatcgccatcaacatttcgaggtgtgagggagaggtgggagacgacaacttactttggacctaaactccagtgacaagccgctgcacctacacctgcaactgcatcacaagaaatttttaaaagcaatccacccccatcccatcaggacaccagtagtgggcaaatcgaaccaacgagaataggctgattttacctggaaggaggcctccggtgcagagcaagaagagcggtagccggcggagttgagatggaggggacgccgcacctgcaacatgagaaattttttaaaagcgatccaccctcatctcaagatgttcgggttcctccattgaaccaaaatgagacttcaatcaacaacgtaaaaaaggcatcactattagaaaaaaatattattggtgtagaaatggattaaaatcaaaatgatctgatattgctcaaattgcatcggattccagaagaagtgaaaaggtaagtgatatgcagtccacatgctgtgagacaagtattgattagacaagttgcctacaaacaaagatattctacacaaaaacatgtaaatgttacccgtgtcccttggattctcttcaaaatgagacttcagattacaaggtaaaaaggcatcactgttagggaaaaaatattattggtgcagaaatggattaaaatcaaaatggtctggtattgcccaaattgcatcggattccagaaaaagcaaaaaggcaagtgatatgttcagtacttcaaagagataactctactctctatttttaatgaacaagaaataaacaacagagaataaaaacatttagatctcaaattaaagtaggtagagtgaattatttgtatcaaaacctctattttcatcaatgatagaaaaatgtaaaaaatataaagagaatcttagaatcacgaatgaagccattagccatggttgatctccgaacactttctaaaaatgatccgatattgcccaaattgcatctgatctagcagtatcctgccaacaagcagtcaataattacaattttcccttttctaagccaggctacgagaaatgaaaaggcaaaatatcagctccgacaatgatggtttcaaattagtgaacttaccatcacacaattcgagtaccaagaatctaagatttattcaaaaaattagttagcctattagaaatgtgccctgcattatatgacccctggaataccgcactctgcacaagcagcctaccagctattatgcggcactctgcacaagcagcttaccagctattatgaagttgagcaggccatttttgctagagtcgcacaatgcagaaccttccaagtcatcgaactctacaaaattaaatgagcacaaaccatcaatgtggtacaaaacataagcatatcatgaaacaagcaaacatgaatccaaaaaaacggataaaagagaaaaccaaaggatctgggcctttacggatggtcgactcagtccaaaacttgctcttctccttgaggttatcgctagcaaaatatgaaaattggttttcgggcacaagattgtttaattctgggacacgaatatttcctaaaccagcaataacaaatagcaaccaaattagaaagtgcacaatataatcaatattttatggtattaatattacatcaattacagattggtagattaggcaccacatttgatcccttccaggggaacaggaaatccctaaagctcgctcgactgctctgatccggcgcgccatccaccaatcagagccggtcagccacgtccttgtcctcatgtggcatcagagaggcaagaacacgaatcaattgacgagagtgaccatgcgaggaactaaaaaaacatgggaacatgatgagagagacggatgcatgcacccatagcactatttacagataaggcttttcaaattaaattatagcagtaatcatgaggcagtctgaaaagtggcagtaaataatatcatattctaccaagggattatcccatagcactaagacaataaattcagactttcaattatatggatttacttgaggtttaaaatatagttcatgttcttgctcaaccactttctttcccgtccaattcctatagcatttcagtacataaaaccaaccactcaccatggctatgtcgtatgcagatccacggacttcaccctctccgacctctgcgcgagcttcctctgatccaaacaaacagagtaccactgatagctatatgacccaaaaacattcaccgcagagacaaaacggggagtagaaagccaaacagatccgaggaagatgcttgagattaccttgctattctaccggagcggctaccaaagaacgctggacgcctatccaccacatgccaacctcaaaacaagtgaggcaaagcgatgtcaagcatctgcaaggatgagacaaattaccgaacaaattcgaaaggagcatttgcttcttcattatacatatcaaatggacgtgaccaagattaatttttggaaatctatgtctttgttcatacatgtctatatgagtaaataggaatttaccagtaaatgggaatttaccgaacaaatctttgttcatacatggatggtataaaattattggaaatctgtatgtctttgttcaaaggagaactctctggaataatgaagtaaataggaatttaccagcctgtaggcgttcacgctcggggaatctatatgagtgcttaagaaacaatac

SEQ ID NO: 68620 - DNA, 3334 bp, Zea Mays
ggttttctctgctctctataatctatctttgctcaaccctttcgtcccttccattcttccatacccatacagatgtcagaccttggaatgtcaactacaagtgatgtcactaaatgcaaagaatgcagtgtgtttacaagtcaaaacaacactataaatgaaacagctgatgaacagaccttcaagacacaaaaggatgaacaaccaaactaacagacaagtgaacttggaacgtgctgttgttgtgagtactatggaattccttgtcgccagatcaatacaaacgaaagtgaaactacaaaacagaagaaccggattttgttttctggcataaaaagtcaatttctcgaatacctaatgcactgtcaaacgatgaattgccaggttttccaaaaaggaaatatcacaaggatgcccaaccccaagaagaaacacatgagtgtttcattgatggatggactattacttgcacacagttatagccccatcgtcgcatcaggtccaagaaacaaaaatggaagcatggaaaaagtcaagaaataacttcaagaaaagcttgttatctatgtggacatgaagatcattaccttcataattgtcctaagaagatttcactaccaaacacccccaagataaagctatcctagtctccagacatggaatatgaacaaaaatgcacagaaacttctatcaacatcgtgaagaacaacaaaaggaataggaaaatctttggatatatgagtagtccacctcaaccacaagcaaaagccacgaaacacatggatacccaagcagaaggatcaagtcaggctcagctatatgagaacccaatcaaccctcacccccggttggtcaaacaaagttgactcgcaaagaattcaaagcaagaggtgcttgtttctactgcaagaatgaagaacatattattcacgaatgccctaggcagcatccggaccgactagagaagaaagctgccaagcaagacccaaacaataatccagaagaccaaccagttataagtacgatgatgaagatcgcttgattagtagtcattgcagagcgaagaaatgaagaagttccttaagtttagaagagttcaatgtgaaccaagaatctacgagtaaccatatatcaccattgttttcttgctagccttccctaatctcgaggacgagattctttttaagggggtagatttgtaacaccctaaatccatcacctaaaagtaactaatatataatattaatttttagtagaaatgaaaatatttatgttttcaaataatggaagtgatggtataactaaattgaacaatttctcaaatagataaaatttatcaaatgtttgatgcattcatgtcgaagcatacattttgtttgatttgaacttcaaatcaaatttttggatttaactatatgagaaagatctcgtttaataaaataataatgagttgttgaaataataaagaattgttaaactaataattttgggaaaatatgcattttgataggttaataatttcttttcggtatttgcagaaattgttttttttatcgatttccttttcgtggagcccaatctatttaaataatagacttttgactaagttgatttattctttaaaattaggtatttttttataaaatattatcttctaaatttactataattgttataatatttaaatatattttatctatataattataaacgtctattctaaaaaaagaaaatatattttttaaaaaaactcacgctcggcactaggcccaagcgcaccccttccttattcgccgtagcagtggaggtccctatcatctgctctccctcttctttctctcactacgttgtgggccccacttgtctgtttggtcttctccgatccaggttttcagcagcgatcgtggatattctgtactgcggaacgccaccaagctgcagccgaccggctccctggctccccacgacgcccaccggtggagcagccgctgtctcttcccctccccactacacaattgcctcacctgctctctctcccactggtaccgaccgtttcatccaccgagttctatctcattaatggttgtcccttgcttttcctcccttgcgccctgcgcaccagcgcccctgcccgcgccatgagaccgctcgctaccccgccccgagcccaggacccgatgtcgaccgagaccccgctgccgagccgccaacgcggccaggtcaccgagccccgcacccgaccccgaagacgagcagccgcgacgctccaacacccaagcgatcccgcgcgaccgtttctcggcgttaatggagtttactgcgtccatttctccctccattcaagctccttgaatgccatgaatggaattcatgcccgcagcttatctctctcctctcggcgtctctctctccctcctgctctctataaaagcctggtcacgccgtgaagctctccctccctagccgagcctcctcccccaagttctccctcgcccctcacattcgcgccctgctctttggaccacgccggaccgcctcgccagaacctcgctagtgtcaacaccaccgtactagagcccgcgcagcagcaccactactcgtcgtcatgcctcgccggagttcgtccacaccgttcgccatccgtggagctccacgccggaatttcgccgtccatctctcgtgccgcgacctcgccgttgtcgagagtttcgactgaagcctacaaccagtctgctctgcttgagctgaacctataaaaagatccacggacttcaccctctccgacctctgcgcgagcttcctctgatccaaacaaacagagtaccactgatagctatatgacccaaaaacattcaccgcagagacaaaacggggagtagaaagccaaacagatccgaggaagatgcttgagattaccttgctattctaccggagcggctaccaaagaacgctggacgcctatccaccacatgccaacctcaaaacaagtgaggcaaagcgatgtcaagcatctgcaaggatgagacaaattaccgaacaaattcgaaaggagcatttgcttcttcattatacatatcaaatggacgtgaccaagattaatttttggaaatctatgtctttgttcatacatgtctatatgagtaaataggaatttaccagtaaatgggaatttaccgaacaaatctttgttcatacatggatggtataaaattattggaaatctgtatgtctttgttcaaaggagaactctctggaataatgaagtaaataggaatttaccagcctgtaggcgttcacgctcggggaatctatatgagtgcttaagaaacaatac

SEQ ID NO: 68621 - DNA, 3035 bp, Zea Mays
aagtcgtttgacatgacttgacatggttttgtcttgggctggacaactcagacaaagccaacttcacaccacaatatctctcaaccccgaccatatcttcgcttagaactcacatggaaaacataggatatggtgcagagaagagaccttacacgggatttttgctgagatctacatgctaaggcgataaacaggcctttgaacaccggtagaaccaaaccaccacgtgttcgacgtgggtaggcactcgggaacacgcctagagcacgcctgcacgcgcgcccccgcgcgccctcggccgcccccgtgctcacacccgtgtcgtgcccgcgagtggctatagagcccgccctcatgcacagccaccttccctgtcaccccctccacaccgtgcctagctttcccgagccagcccgcagctccggcgacctccccgcgacccgtcagagccacccaagggcgcccaccatggccaaaccactcccgcccacctccactcgatccgagccctcagatagcttccccgagagccgtgaagcattcccaagcttgagccaaggactagccccaccggaacagtgtgatcacgctcgccggagttcataaccccaccggagcacgtggatcgggtaacccactgaaccatttctcgattccttgcgcgcatagccttttacatcacccagaggagctcctcgtgcaccttgattgaaccctaccgccgtggtttgcccggagcagttgccgccgacgacctccaccccctgcgctcgtggccagagcagctccagccacctccgacgccgacctgcaaaccgacgtgaccgtcgtgacctccccgacatcattgaccaccccaccagagctctactgccgccggttagcctcgccgacgtgatctttgccccggttactgttccagccagccaaggatcgtgggttagatataggataagttcagggggttatgcgtaaggtcagtgactcatgcgaatagtagaccgagggctgatttgtgagagaaaagggagaagaaaacccagggacttcagcgcaaatctgtttttcttttcccatttcaaatttacttttcttttaaatactgtagagaacttgataaatacaaaacttgaagaatactcatccaaatttagtcaaaccaattttgctagatttgtgaaatataaactatcaagcaaaaatagtaaaccccatggttcctgtaatgttttctagagttttgatttaaataagaaaactgccaaaaacttaataataaagggaaagatagaaatgttgttagaccagggttgagaaaaatagtggagacactaacctagtagttacactgtttaaaattaataatcaccccagtatacaaggttaaggaagatttattcactaaaacttatttatgctcaaacttaggaaaatgaaaaaagggattgaaaatagaaaccagagggaaaccatacttttcctagcatgcctaagtgatgtagttcacaagaaaaatctgttgaaccatagtccagtgaaaagaaattgcactcacgtttattcatggaaaacagagaaaactttgaaaagtcataagaaaataatcctaaggagaaaacacccctaccttaggaatgactgctcttgtgctatgaagaacctaggaaaattacaagttctgttgtttgatacttttcaaatagcaagttagttataagtgtctttttggcatttaactttagaaaatcataactaaataaccactgagtaaccctctgtgatttttggcatagaagcatgttattacccatagataccagcaaaaataactcttagtaaagaacccacacctagataagagttgtagtgcaaagtgacccctctgccccaacttttgttatttttgtccagggcatattctaattatttttgacctcatatttataggacagactacagtgaccaatattaacccactgtaatttttatataagttttggaaaatttgaaatcactgttgtagttcaaacccaccttaagagcataaatagaaaaggaaaaggggaattagtagtggagattaatgttaccctaaccaaccgagcaaaaccccttgagtacctactaaaacctttaaggggcaatccaagtcttaatccactatgtttgcctctaagcaaaacctcaaacctaggttgctaagcataaaccactaagagcttcttataaccaggaaaccctaagttatcaactaacttagtttttcttcactatgcataatggttactaaattctgcatatcatagcatacaaatatcttattcattgcattcgatagattgcaacctcgctgacggagagtatgtgttcatccctgagcaaggagttgatcgggaaggagtccaggagccagcaccagagcctaccaccgaggatctccccacagccccagctttggaagatccacggacttcaccctctccgacctctgcgcgagcttcctctgatccaaacaaacagagtaccactgatagctatatgacccaaaaacattcaccgcagagacaaaacggggagtagaaagccaaacagatccgaggaagatgcttgagattaccttgctattctaccggagcggctaccaaagaacgctggacgcctatccaccacatgccaacctcaaaacaagtgaggcaaagcgatgtcaagcatctgcaaggatgagacaaattaccgaacaaattcgaaaggagcatttgcttcttcattatacatatcaaatggacgtgaccaagattaatttttggaaatctatgtctttgttcatacatgtctatatgagtaaataggaatttaccagtaaatgggaatttaccgaacaaatctttgttcatacatggatggtataaaattattggaaatctgtatgtctttgttcaaaggagaactctctggaataatgaagtaaataggaatttaccagcctgtaggcgttcacgctcggggaatctatatgagtgcttaagaaacaatac

SEQ ID NO: 68622 - DNA, 1491 bp, Zea Mays
attgcactcacatttattcatggaaaacagagaaaactttgaaaagtcataagaaaataatcctaaggagaaaacacccctaccttaggaatgactgctcttgtgctaagaagaacctaggaaaaatacaagttttgttgtttgatacttttcaaatagcaagttagttataagtgtctttttggcattaaactttagaaaatcataactaaataaccactaagtaaccctctgtgatttttggcacaaaagcatgttattacccatagataccagcaaaaataattcttagtatagagcccacacctagataagagttgtagtgcaaagtgacccctctgccccagcttttgttatttttgtccagggcatattctatttattttttaccacaaatttataggacagactatagtgaccaatattaacccactgtaatttttacagaatttttggaaaatttgaaatcactgttgtagttcaaacccaccttaagggcataaatagaaaatgaaaaggggaattagtagtggagattaatgttaccctaaccaacccagcaaaacccctttagtacctacgaaaacctttaaggggcaatccaagtcttaatccactacgtttgcctctaagcaaaacctcaaacctaggttgctgagcataaaccactaaaagcttcttataaccaggaaaccctaagttatcaactaacttagtttttcttcactatgcataatggttactaaattctgcatatcatagcatacaaatatcttattcattgcattcgatagattgcaacctcgctgacggagagtacgtgctcatacctgagcaaggagttgatcgggaaggagtccaggagccaacaccagagcctgccaccgaggatctccccacagccccagctttggaagatccacggacttcaccctctccgacctctgcgcgagcttcctctgatccaaacaaacagagtaccactgatagctatatgacccaaaaacattcaccgcagagacaaaacggggagtagaaagccaaacagatccgaggaagatgcttgagattaccttgctattctaccggagcggctaccaaagaacgctggacgcctatccaccacatgccaacctcaaaacaagtgaggcaaagcgatgtcaagcatctgcaaggatgagacaaattaccgaacaaattcgaaaggagcatttgcttcttcattatacatatcaaatggacgtgaccaagattaatttttggaaatctatgtctttgttcatacatgtctatatgagtaaataggaatttaccagtaaatgggaatttaccgaacaaatctttgttcatacatggatggtataaaattattggaaatctgtatgtctttgttcaaaggagaactctctggaataatgaagtaaataggaatttaccagcctgtaggcgttcacgctcggggaatctatatgagtgcttaagaaacaatac

SEQ ID NO: 68623 - DNA, 3837 bp, Zea Mays
aagtcgtttgacatgacttgacatggttttgtcttgggctggacaactcagacaaagccaacttcacaccacaatatctctcaaccccgaccatatcttcgcttagaactcacatggaaaacataggatatggtgcagagaagagaccttacacgggatttttgctgagatctacatgctaaggcgataaacaggcctttgaacaccggtagaaccaaaccaccacgtgttcgacgtgggtaggcactcgggaacacgcctagagcacgcctgcacgcgcgcccccgcgcgccctcggccgcccccgtgctcacacccgtgtcgtgcccgcgagtggctatagagcccgccctcatgcacagccaccttccctgtcaccccctccacaccgtgcctagctttcccgagccagcccgcagctccggcgacctccccgcgacccgtcagagccacccaagggcgcccaccatggccaaaccactcccgcccacctccactcgatccgagccctcagatagcttccccgagagccgtgaagcattcccaagcttgagccaaggactagccccaccggaacagtgtgatcacgctcgccggagttcataaccccaccggagcacgtggatcgggtaacccactgaaccatttctcgattccttgcgcgcatagccttttacatcacccagaggagctcctcgtgcaccttgattgaaccctaccgccgtggtttgcccggagcagttgccgccgacgacctccaccccctgcgctcgtggccagagcagctccagccacctccgacgccgacctgcaaaccgacgtgaccgtcgtgacctccccgacatcattgaccaccccaccagagctctactgccgccggttagcctcgccgacgtgatctttgccccggttactgttccagccagccaaggatcgtgggttagatataggataagttcagggggttatgcgtaaggtcagtgactcatgcgaatagtagaccgagggctgatttgtgagagaaaagggagaagaaaacccagggacttcagcgcaaatctgtttttcttttcccatttcaaatttacttttcttttaaatactgtagagaacttgataaatacaaaacttgaagaatactcatccaaatttagtcaaaccaattttgctagatttgtgaaatataaactatcaagcaaaaatagtaaaccccatggttcctgtaatgttttctagagttttgatttaaataagaaaactgccaaaaacttaataataaagggaaagatagaaatgttgttagaccagggttgagaaaaatagtggagacactaacctagtagttacactgtttaaaattaataatcaccccagtatacaaggttaaggaagatttattcactaaaacttatttatgctcaaacttaggaaaatgaaaaaagggattgaaaatagaaaccagagggaaaccatacttttcctagcatgcctaagtgatgtagttcacaagaaaaatctgttgaaccatagtccagtgaaaagaaattgcactcacgtttattcatggaaaacagagaaaactttgaaaagtcataagaaaataatcctaaggagaaaacacccctaccttaggaatgactgctcttgtgctatgaagaacctaggaaaattacaagttctgttgtttgatacttttcaaatagcaagttagttataagtgtctttttggcatttaactttagaaaatcataactaaataaccactgagtaaccctctgtgatttttggcatagaagcatgttattacccatagataccagcaaaaataactcttagtaaagaacccacacctagataagagttgtagtgcaaagtgacccctctgccccaacttttgttatttttgtccagggcatattctaattatttttgacctcatatttataggacagactacagtgaccaatattaacccactgtaatttttatataagttttggaaaatttgaaatcactgttgtagttcaaacccaccttaagagcataaatagaaaaggaaaaggggaattagtagtggagattaatgttaccctaaccaaccgagcaaaaccccttgagtacctactaaaacctttaaggggcaatccaagtcttaatccactatgtttgcctctaagcaaaacctcaaacctaggttgctaagcataaaccactaagagcttcttataaccaggaaaccctaagttatcaactaacttagtttttcttcactatgcataatggttactaaattctgcatatcatagcatacaaatatcttattcattgcattcgatagattgcaacctcgctgacggagagtatgtgttcatccctgagcaaggagttgatcgggaaggagtccaggagccagcaccagagcctaccaccgaggatctccccacagccccagctttggaaggcaagccccggttttatgcataaccatttattatgctattttactacacttaatgtttgtaggtttgtaatgtgcactaagtgtaggagttgattgaaaccctagttgcatgaactcaggaatccttttgaggtgaatactagtatgctaggttgagtagctgctttactaattagggatctcggtagaagtcgagtgattttctagcactctcgcgaggtcaggaattggttgtacccactttcatatcataatgatgctggtctgtggacaacaatccatggggattggttgtctacgagatggaaaattggaataaggattaacgtgcggatacctgtgtcaagcgtttgaacgtactaaacacatgccgagaaatatggtaaatcggtaagcctagtacctgagtgaacctgcccgcagactttacccctcacacgacctgagacgtggtctcccattcctgttatggtgggtacaagtgcggtcactgcacgacggcaatcgggttcagtgaggcattatacgccaaggcggtgagccctgatctgttgccagggaatcgatggggacggttgatgtgtgtggggacggagtgcctcgccacgtcgtgtgtttgggtttaccttgcaaggataaaaactcgattcgaatcgtctgcttctcgcagctaatgagactgcttgatccattgtactacattgagtaacaagtggaaatgtgatgacttggagaaagttgttgattgctaaatgtttgataccatgtatgattagatagttacaaatttagtcttaagagaatcacactaaaacttgaaaaagctaaaatttgatttttagactcagctagtgcttttggcaagcaaacccctcagccaaacagctgcatgtctagaggtagaggagtagactcctcacaccgggtaagtctagctgagtattagtatactcagccttgcttgtggcataattttacaggttctctggaggacttggttgctagagtgacttggtcatccatcttgccaccgggttggacagtcgagtgggaccctacctcggctgaggaggagcatgaggagtgatgagacatgcttccccatccctccatttatttatcgttagttttattccgctgcattccgaacaatgatcactacttttgctaaaactccgatgatgttgtaataaatttaatactccttaatgtatggttttatgctttattgtatttgctctgtgcctcaccatcaagtgacgtggtacttgatcctgttagtggcctcgtcgaactagatccgagggactgacgtgttattcctatttaagtatggtctagcctctaagttgggacttaggcacttaagttggaat

SEQ ID NO: 68624 - DNA, 1442 bp, Zea Mays
attgcactcacatttattcatggaaaacagagaaaactttgaaaagtcataagaaaataatcctaaggagaaaacacccctaccttaggaatgactgctcttgtgctaagaagaacctaggaaaaatacaagttttgttgtttgatacttttcaaatagcaagttagttataagtgtctttttggcattaaactttagaaaatcataactaaataaccactaagtaaccctctgtgatttttggcacaaaagcatgttattacccatagataccagcaaaaataattcttagtatagagcccacacctagataagagttgtagtgcaaagtgacccctctgccccagcttttgttatttttgtccagggcatattctatttattttttaccacaaatttataggacagactatagtgaccaatattaacccactgtaatttttacagaatttttggaaaatttgaaatcactgttgtagttcaaacccaccttaagggcataaatagaaaatgaaaaggggaattagtagtggagattaatgttaccctaaccaacccagcaaaacccctttagtacctacgaaaacctttaaggggcaatccaagtcttaatccactacgtttgcctctaagcaaaacctcaaacctaggttgctgagcataaaccactaaaagcttcttataaccaggaaaccctaagttatcaactaacttagtttttcttcactatgcataatggttactaaattctgcatatcatagcatacaaatatcttattcattgcattcgatagattgcaacctcgctgacggagagtacgtgctcatacctgagcaaggagttgatcgggaaggagtccaggagccaacaccagagcctgccaccgaggatctccccacagccccagctttggaaggcaagccccggttttatgcataaccgtttattatgctattttactacacttaatgtttgtaggtttgtaatgtgcactaagtgtaggagttgattgaaaccctagttgcatgaactcaggaatccttttgaggtgaatactagtatgctaggtcgagtagctgctttactaattagggatctcgatagaattcgagtgattttctagcacttgcgcgaggtcaggaattggttgtacccactttcatatcataatgatgctggtttgtggacaacaatccatggggattggttgtctacgaaatggaaaattggaataaggattaacgtgcggatacttgtgtcaagcgtttgaacgtactaaacacatgccgagaaatatggtaaatcggtaagcctagtacctgagtgaacctgcccacagactttacccctcacgcgacctgagacgtggtctcccattccggttatggtgggtacaagtgcggtcactacaaagacgacagtcggggtcagtgaggcattg

SEQ ID NO: 68625 - DNA, 5388 bp, Zea Mays
aaattacccaaataggagtcatacccttttgaggtcttgggtaacccgacaataaaatccatattgatgtcttcccactgccaagctgaaatatgcaatggtgtagtggcctagtagatttttaagtgcatagctttcaccctttgatatatcgcacatggcgacatagcgagcaatttcaatctttattttggtccaccaaaatcgttgtttcagatcctgatacatcttgttacttctcagatgaatggagtatcaagacaagtgagcttcatcaagaatttgttgatgcaattcaggaacatttgggactaccaactggttttggaaccaaagaacaccatttccatcaattataaaacacgtaacctttcccgctacaactcgctctttgatatgagctatacccttgttcaccttttgagcatcaacaatttgactctggatagttaattcaagagtcagactagctatcgctccttgttgaactacttccaaattcaacctttccatttcttggcacaaggttacagttgaaggttttgccgaaagacaattacactgagacttacggctaagagcatctgccacaacattagccttgccaggatgataatgaacttcaagatcataatctttgatcaactctagccaccttctctgtctcatgatcaattcatactgggtaaaaatgtacttaagattcttatggtcagtgtaaatgtgacatgtattacctagcaaataatggcgccaaatcttgagtgcatgaacaacgatagccaactcaagatcatgggttggataattctcttcatgacgcttgagttgtcgagaagcataggcaaccacgtgtccttcttgcatcagtagacatctaatgccaatgccaaaagcatcacaatacacatcaaatggctttgcgatatctagttgagctagcactggtgttgtagtcaatagcttcttcagcttctcaaaagctttgtcacactcaggtgaccaaacaaacttgacatgatttttgagcagttcggtgataggcttggctattctagtgaaatctggaataaagcgaccataatagcccaccattccaagaaaacttctgacctgatgtaaagtagtgggaggtttccaatcgaggatatccttgaccttgctcgggtcgacagcaacaccctcagtagacaagacatggcctagaaactgaactttatccaaccaaaactcacatttgctaaatttagcatataattggtgttctctaagccgcatcagaacaatacgtaggtggtcagcatgttcttccttggtcttgaagtatatcaagatattatctatgaagacaaccataaacttgtcaagctccggaatgaacacaaagttcatcaaatacatgaagtgagttggagcattggtcagaccaaaggacataaccaaatattcgtaaagaccatatcgagtagtgaaagcggtcttgggaacatcttcaggacggattcttatctggtgataacctgacctaaggtcaatcttggagaacacttttgctcctgtgagctggtcaaacagcagatcaatgtgagggagaggatatttgtttttgatagtcacctcattgagcggtcggtaatcaacacataatctgagtgtttgatctttcttcttcacaaatatggcagggcaacccctgtggtagaaacgcctgaattattccagcttaagtgcctaagtcacacctcaggggccgcaacacacttaaatcggaataacccgtcagtccctcagatctagtctgatagagccacctaatcaggatcaaataccacaaactcactcgaaggtgagtcacagaagaaatacaataaaacaggaagacctcgaattaaagtactggagttattacataaatcagagtttttcaagtagctgatttaagttcacaaaataaattgcagcggatcatcgatatcgtcgaaagcgaggaatagagcaaggcctagcccactactcctcatgctcctctcctgccggagcagcatccgactcgaccatccaacccggtggcagggtggtaggccaagttacaccatcaaccatatcctggagcgtacctgcaaaaattatgcacaagcaaggctgagtatactaatactcagctagacttacccggtgtgaggaatctactcctctacctctagaccatgcagcgccgaggggtttggtttgccaaaagcactagctgagtctaaaatccatttttagcttttcaaattctaatatcattattttagctaagtttgctctttctaagcatacatggtaacaatcatttaatacagtcaacaagttatctcatgtaaagcctcatttcacttcttactcaatgtagtacaaggggtcaagcagtctcattagctgcgagaagcagacgattcgaatcgagttttaaaaccttgcaaggtaaacctaaacacacgatatgtaggggtactctgtccccacacacatcaaccgtccccatcgattccccgttcacggctaggcctcaccgccttggcatacaatgctccactgaccccggctgccgccgtgcaatgaccgcacttgtacccaccatagctagcatgggagacccagtcttaggtcgagtgaggggtaacgtctgcgcccagcttcactcaggtactaggtttaccggttaccatatttctcgacatgtgcttagtacattcaaacgcttgactcaggtatccacacattaatccttaattccttatcccgtctcatggacaaggcatcctccttggatccaagtccatagaccatcatagatctcgttatcaagatgaatacaatcaattcctgacctcgcgcgagtgctagaaaaaatcactcgacttctaccgagatcctgatttagcaaagtagctactcgacctagtatactagtatccatctcaaaaaggaatctttgggttcatgcaactaggggttttcaagcaacctccaacacttaagtgcacattacaaacctacaaacattaagtgtagtaaagtagcatatataaatggctatgcataaaactggggcttgccttcaattgctggggctacggggagatcctcgatggcagtcgcgggagcttgctcctggtcttcctcgtggacagctccttgctcagggatgagcacgtactctctgtcagtgagattgcaatctaatgaatgcaatgagtaatatatatatgcatcgcatgatatgtaatttagcaattaagatttgatggggaataatcaatttaataaggtagagcttattcttactactggagatctttgtggtacacttagcaacttagggtcaagttgattactgaatggttaacccatttttagtgttctactgattttcttctttatatcttatggatatttttaacaatattcttagctgctatgttgggtaatacttattaatctttctagttcctctcttcttctctacttttcttgtacttttaaggtgggtttgaactacaagatagcttaataaatttctaaacattctgcaaaaattacagtggcttcttactggtccagaattctctgtctcaaaatttgggtcttaaaagtgaggggttctctctgtacaaaattatcaaaaattagggcagagggggtgttttgaactacaactttcttttaatagtggtttattctctaaaacatatttttgttggcatttagatgttaaaacatgactttgtataaactttcagccattaatacttagtagttattttacaatggttttctaaagtttctagccaaaggcatgctttctactaccactatacttgaaaaatatcaaacaacagatttctaatttttcctatcttcttctttgcgcaagagcaatcattctaaattttggtaactttttgcttaaaggaaagggtggtagagatttattagattaaatgaccttttcatgaagtaggggcaatgggtattactttgtagttttgaataggttttgcatttttctgtggtggtctattccattactaatctagtaaaaatttatttgcccactgttgcacactttttggcttgcttatgatttaattgaaatatggctcaataccaagttttatttgttcaacccgctaaaaatgatgggctggggtatttatcatttttgcagtggtgtcttagtggttagaagtctactgaatttttcttacaaattttgaaattgttcttatatttttaataatggtccttctagttttattagtacctaataaaacatttcaccctgaatttgttctagactagggttccttttctttttcctaggttctttattacttaagtggactaggaaaaatatttgcattcactgttcattattttctagtacctttctcatttttctaagttttgggcaactatggcctttaatagataaccctgtttaaatttctaatattggggtgcttactatttttaaacagtgtctaagtggggtttgaacttctacaaattttcttaagtccagcacagaagcattactaattttctttattttaataaggtttgttcagtttccttaattaattccaaactctaaaatttaaaacagaaagcacaaggttcagtatttttatgtgatagttcataacattttgaatccagtaaaattcgtttgactaaatttgattgattatttctcaagatataaatttcctaagttctctgctgaatttaaaaagaataaacagaaatggataaaggaaaaagggttttgcactggggtccctggcgaaaggttttaaatgtattacggacaggtccttggttcactattcaactgagtctatgactctgcagaaaaccccctagggttttgcgaaatcgatctcgcgatccttcccctaatggaacagtgaccgcggcgaatgaaaagggtggaggggcttaccggcggcgaggttgctaaaggtgaggggtcgggcgaggtctggaggtctcgggcgctcacgtcgaggtacggatcgtcggcggtggtggtcggagtaggttcgtccacatgcgcaggcgggggagctcgtcagcggtgagggatccggcctactcatttcgccatagttcgattgaatgggtcagggagcttcgctagaggtcgaggaagatatgtgcacgaggaatttgagaatggctcaccggattgctcggtctacgcacggctgcgggcgaccgaagtccagcgagggtgatcctgggactccggtgaggctctgtcgggtccgaggacttggaaagcttcacaggctactggcaaagctaaccgagtgactggcgcgacttggaagtggc

SEQ ID NO: 68626 - DNA, 868 bp, Zea Mays
cctttaaattccccacaccacctccccaaccagccatttcctctccctccctctcccaacgccactctccctactccctccctctctctatctccctctctctagctcctcatgcatcagcagcccccctcccatggagctggcgaccgagtcctcccatgctcctccctcaccttggcagctctcccatggcatcaccccctcctctacgacaacaaggtgtaggaccgagagatgctgattgtgcaagtgatgaggtgccaaccacaagatgcagttggtggacgacctgaagaatggtggaattaaccagtggatgctcgccaagcgagtaccccccagcaaacactatctaagtgttaaattaaaggcaagccccggttttatgcataaccaattatattatgctattttactgcacttaatgtttgtaggattgtactgcacttaatgcgttggataagttgaaccttttcctcagcttcatttactaagtctggtccaaagaaacatctctctcccggtttagaccaatttaaaggagttctgcatcttctgtcgtacaaagcttcaaagggtgccatcttgatactttcctgataactattattataggagaattctgctaaaggtaaacattcatcccacttagttgaataagtgagaacacaagaccttagcatgtcctccaaaatttggttcactctttcagtctgccctccggttctaggatgataagttgaactacgaataagcttagtacctaatgacttatgcaaatgttcccaaaatttggaaatcgaactaagaacctctgtcagacacgatagtcttggttaccccatggagactcaagatactagcaata

SEQ ID NO: 68627 - DNA, 836 bp, Zea Mays
atttcctctccctccctctccccacgccactctccctactccctccctctctctctatctccctctctctagctccccatgcagcagcagccccccctcccttggagctagcgaccgagccctcccatgctcctccctcaccttggcagctcttccatggcgtcaccccctcctctacggtagcaaggtgtaggaccgagagatgctgattgtgcaagtgatgaggtgccaaccacaagatgcagttggtggacgacctgaagaatggtggaattaaccagtggatgctcgccaagcgagtaccccccagcaaacactatctaagtgttaaattaaaggcaagccccggttttatgcataaccaattatattatgctattttactgcacttaatgtttgtaggattgtactgcacttaatgcgttggataagttgaaccttttcctcagcttcatttactaagtctggtccaaagaaacatctctctcccggtttagaccaatttaaaggagttctgcatcttctgtcgtacaaagcttcaaagggtgccatcttgatactttcctgataactattattataggagaattctgctaaaggtaaacattcatcccacttagttgaataagtgagaacacaagaccttagcatgtcctccaaaatttggttcactctttcagtctgccctccggttctaggatgataagttgaactacgaataagcttagtacctaatgacttatgcaaatgttcccaaaatttggaaatcgaactaagaacctctgtcagacacgatagtcttggttaccccatggagactcaagatactagcaata

SEQ ID NO: 68628 - DNA, 2813 bp, Zea Mays
atttcctctccctccctctccccacgccactctccctactccctccctctctctctatctccctctctctagctccccatgcagcagcagccccccctcccttggagctagcgaccgagccctcccatgctcctccctcaccttggcagctcttccatggcgtcaccccctcctctacggtagcaaggtgtaggtgagctccgggtcaagaacttgtgtgctgaaatttcagattcttgcactttcttctaaaatctttaactcgagtttggaagctcctaaaatagtaagacttatttttttagcttccatatgaaatgtcctacctattagatctataatgtgacctgttttagtagacgtttttgtctgtgcaaattaaatcttaaaaagaggtttagagaataaacgaacttgcttctctccatagttttaattataagaatccaaaaatgatcaaacttgttttgttagttagatgttgtcatactccatctaagaaaaatataaaacttatatgttgttcactgttttcttggtatgttaattaatcttgttaactatgaaaaagatgattgttttgcttgttgtttttggatctgtagctccagtgctccaaatggattgaaatttttacagtagcccctctgtgtgatgcttagtgactgataacaatttcataatttatggtcaatgtatcactgagttagtgatttaacttgtttgatgcatattaagtagttttaaatggtttataaataatatatggatgtaaaaatggaaaatggtgttccactgtccttgcaaaatattatagtagcctaagaaaacttaatatggtcatgcatccatagaaaataattaattttacaattaacttgctctcacaagttttattgcattaacaatttcttatttttgtattaaataaaataaaaacctgcgcatgtgaaatttatatatttgtcatgatttgttattacctatgtctcataaaaatcccagccccaaattagatagtttcatatggtgctaaaatgacacacgttttataataataagaattagagacaaattagaagtaagcaaaccatgcatgttggaattgtttatgtcatgcaataagatttgaaatgtgaagaatggatagtgaatttaagaaatgttagccaataggtttggtcaagcatggtagaggttgaatcggttatgttgtagaattgatgctcgaaatgatagaccccctaaaatatgctatttttggtgacttgtgtgctaaccaatttaagttgagcaatggttaagaaaagatgattaatctgctgcaactcatgtttttgagttgcaatgtctaaaatggtttgctaagtttatactgtgttagccaactcatgttaagtaggagtcgattgcgttaagtgattgttatatacatattgtgtctcggattgtgatgataatgggttagtcaacttgttagatggctttggttaaactcgtaatgacgataaattgcttgttgttgtctaaatacgtatgcttatggtcgcggatgaaaagtagtagtactcatatgatgtccaagttaaaatgcaaattactgtgtcaagagctcatcgatatacacatataccgggtttgattattgtggtgaatacgtttgttaatggtgtgtggtaattctagtgcacgaaatgacttggataaaaattggtaagttgacttgttgattctcatttgattattttaactccaacaaatggtaaagtgttagaataattcaagtctctagaacacgacaaattcttgaattgtataggagctgaaatttattagttgttgttttggactgcacgcagtgatttccccgtgctgtatgtttgatgaactaaattgtgttttccgtagatatgtgctatataaaagtggtagataactttattatcttgctggtgttaaaaattggcagccataaacctgatcgtttaggagttgtgcttttcacaagcccagcacctgaatctgtcgaatttctgaacagctttcataaattgcaatggttgcttaagtttattttgaaataagttattgttggtcacaagaaagttgtagataactctgtcatcttatttgtgttaaaatttgacaggcataagtctgatcgtttaggagttatgctttttacaaattcagtaactgaatctgtccaaattctgtatagatttcataaactgcattgtttgcttaatttaattttacaatcagttcatggtagtcataagaaagttgtagaggtttttcttatcttgcttgtgttaaaaatttcataaccatagacctgacagtttaggagttatgaattttacaaactggtttctgtattctgtccactcacaaaacagatttcaaaaactgaattgtttgattcagttcaacatagaatcaattcttggtgattataaaagttatgtagtgcttttttcaagatttccaaaaagtcttggatcactctttttggtggtctgaagatttagttataggtgtttgaaatgtgaagaccgaatatgtccaattctggacagcaaagtcttctagtgtattttacccttgatacatattaaaccagccagggatgtttataaataatttgtagaactattaattagctttccagaaagtctaagatcactttgtttggatgtctgaatctttagttgtgaatttttgaagttgcaagtctgaatctgtccaaatctggacagagctgttgtattagcacgtttcaacattgctaagtgttgaatcgtgttgag

SEQ ID NO: 68629 - DNA, 2083 bp, Zea Mays
tctccctccctctccccacgccactctccctactccctccctctctctctatctccctctctctagctccccatgcagcagcagccccccctcccttggagctagcgaccgagccctcccatgctcctccctcaccttggcagctcttccatggcgtcaccccctcctctacggtagcaaggtgtaggtgagctccgggtcaagaacttgtgtgctgaaatttcagattcttgcactttcttctaaaatctttaactcgagtttggaagctcctaaaatagtaagacttatttttttagcttccatatgaaatgtcctacctattagatctataatgtgacctgttttagtagacgtttttgtctgtgcaaattaaatcttaaaaagaggtttagagaataaacgaacttgcttctctccatagttttaattataagaatccaaaaatgatcaaacttgttttgttagttagatgttgtcatactccatctaagaaaaatataaaacttatatgttgttcactgttttcttggtatgttaattaatcttgttaactatgaaaaagatgattgttttgcttgttgtttttggatctgtagctccagtgctccaaatggattgaaatttttacagtagcccctctgtgtgatgcttagtgactgataacaatttcataatttatggtcaatgtatcactgagttagtgatttaacttgtttgatgcatattaagtagttttaaatggtttataaataatatatggatgtaaaaatggaaaatggtgttccactgtccttgcaaaatattatagtagcctaagaaaacttaatatggtcatgcatccatagaaaataattaattttacaattaacttgctctcacaagttttattgcattaacaatttcttatttttgtattaaataaaataaaaacctgcgcatgtgaaatttatatatttgtcatgatttgttattacctatgtctcataaaaatcccagccccaaattagatagtttcatatggtgctaaaatgacacacgttttataataataagaattagagacaaattagaagtaagcaaaccatgcatgttggaattgtttatgtcatgcaataagatttgaaatgtgaagaatggatagtgaatttaagaaatgttagccaataggtttggtcaagcatggtagaggttgaatcggttatgttgtagaattgatgctcgaaatgatagaccccctaaaatatgctatttttggtgacttgtgtgctaaccaatttaagttgagcaatggttaagaaaagatgattaatctgctgcaactcatgtttttgagttgcaatgtctaaaatggtttgctaagtttatactgtgttagccaactcatgttaagtaggagtcgattgcgttaagtgattgttatatacatattgtgtctcggattgtgatgataatgggttagtcaacttgttagatggctttggttaaactcgtaatgacgataaattgcttgttgttgtctaaatacgtatgcttatggtcgcggatgaaaagtagtagtactcatatgatgtccaagttaaaatgcaaattactgtgtcaagagctcatcgatatacacatataccgggtttgattattgtggtgaatacgtttgttaatggtgtgtggtaattctagtgcacgaaatgacttggataaaaattggtaagttgacttgttgattctcatttgattattttaactccaacaaatggtaaagtgttagaataattcaagtctctagaacacgacaaattcttgaattgtataggagctgaaatttattagttgttgttttggactgcacgcagtgatttccccgtgctgtatgtttgatgaactaaattgtgttttccgtagatatgtgctatataaaagtggtagataactttattatcttgctggtgttaaaaattggcagccataaacctgatcgtttaggagttgtgcttttcacaagcccagcacctgaatctgtcgaatttctgaacagctttcataaattgcaatggttgcttaagtttattttgaaataagttat

SEQ ID NO: 68630 - DNA, 716 bp, Zea Mays
tctccctccctctccccacgccactctccctactccctccctctctctctatctccctctctctagctccccatgcagcagcagccccccctcccttggagctagcgaccgagccctcccatgctcctccctcaccttggcagctcttccatggcgtcaccccctcctctacggtagcaaggtgtagtagtagtactcatatgatgtccaagttaaaatgcaaattactgtgtcaagagctcatcgatatacacatataccgggtttgattattgtggtgaatacgtttgttaatggtgtgtggtaattctagtgcacgaaatgacttggataaaaattggtaagttgacttgttgattctcatttgattattttaactccaacaaatggtaaagtgttagaataattcaagtctctagaacacgacaaattcttgaattgtataggagctgaaatttattagttgttgttttggactgcacgcagtgatttccccgtgctgtatgtttgatgaactaaattgtgttttccgtagatatgtgctatataaaagtggtagataactttattatcttgctggtgttaaaaattggcagccataaacctgatcgtttaggagttgtgcttttcacaagcccagcacctgaatctgtcgaatttctgaacagctttcataaattgcaatggttgcttaagtttattttgaaataagttat

SEQ ID NO: 68631 - DNA, 532 bp, Zea Mays
ctgctatcttcatcagtctatctcgacccattcccgcgagccgtcccccttccctcttcatccgctcgctccgtctcccgcgctcctgccatcccctccggccactccgaccttccgtggagggagattccttgcccggtgggaatctcagggctgatttgaagactgccggcaaagatccatcgaggaggcggcgattccatcccgaatcacgacatccggcctaagcgaaggagctgaataggcgcgcatcaccctcgtcgtcctagccgtcaccggctccatttgaatgtgccttaagttgctagtccccgaaccctatccctccgccgttctcaaggtgcaggtccacctgatgctacacaactcgcctgccgagctcgacgtcccatcgtcggcttcctctctccagggtccagtttcagtagaagggatttacaatgtttctatatgatgaatgggactgcgaaattaagaagtgaatctttctatgcgttggcagataaactgagcagtgaggggtcttgatggt

SEQ ID NO: 68632 - DNA, 719 bp, Zea Mays
aggggcgggagagagaagcgcgcagagagagacgcacgcggcaaacagagaaagaacgagctgcgcgcagggaagaagaaaaaacagggacgccatgggggaaaatcttcagggaaggagcatgctcgcgagcaggatccgcgacgagggagctgaggcaacacgcggcaaggaaagcaggcgctgcatgaaagaaagcaagggctccacggcgcgccagtagggagagaagcagggcgccatgggagcttcacggtgcggtgcagagaggactccagagcacgcggcgaacagggagcgagctgagggagaagaaagaaatggctgggcgcgcaggagactccacggcacagggagcaaccaagactgggcgccatggggaaaagcttcagggaggagggagatccacccaggcgccatgggggcgagcaggaccgatccagtgacgcggcagtggaggccagaaagagagagggagccgcaaccatggaagagacgtcgaggaagagagacactcgctgctgggaggacggcgttgagggagggagctcgaagccgacgccggggagtcgacgcccatccaccgaagcacactggaccggacgactccgagggcgcaaaatggcgaggagctgggccagagggtgctcggtgagggacgctggggaggagcataggagcacgccgctgcagggaaggagaagatgactggggataag

SEQ ID NO: 68633 - DNA, 2755 bp, Zea Mays
aagtaacacaaatcacacacaccaatatttttgcaacggaaatcttattatcaaattttacaagttacaaaagttttacattatattcatcggagtgattacaaaagtataagtttgatatatatgctagctcaagtgaccatcctcaataagaagtataggagagttatttagacttataagaaggtcgagcccaccggcacttaacaccatcatcagcagcacaaaactataacctgaaaaacaacagggaataaaaccctgagtacggaattactcagcaaagacttacctgactaaagaaaagactttcaagggtatgctggctagagggattcaaggtatggcttatcaagaatcaaagactctgctttgcaaaaatgcttactaaaagtggatccttaaaaatccatttttacttgtcaagttaagtaaaattacctgcatctagagttctttctaccctagttcaagcacttggcctatactagccgtcttttatcaccctttttcttccctggattgctacgtgtagggcagttaccaagtcttcatgtccgcgaagttatggcgatccgaattgattatactcagctaaggatctccaatcacacgacatatgtagcacttgacccttgcatatgtcaactcgccaatagggctcttaagaccagatcaggttcacgccaaccgagagcacagatacaccaccgtccagcctcttgccacggagggtacacgctactctcgccatctctccactcccattgcgtgttatcttattctggtattagtctgcccgaggcaaagcttacccatgttgaggcatgtgaccagttaaagggtcctcgatcagcaagcctacatcgagacggtccttaatcgactcagacggagacactacaccgagactcccttctcgtgcaagtcaaccgcctggtctcagctttattaatttcaacccaaagtttggtacttggcagaggtacatattttccgatgttgaacccatcaaggccttgatggattcaatatcaagttttatttttgaaaacattcccatccactgaagcatcacctttgttttaaaacaaaacaattttgtttgctaaagaaaagctaagcatcataaaattcttttcaaaaagggtatcaaggaagggtaatcaatttttcaaggaaggaaatgcatcaatggtttagcacacaactcctatcacctaatgcatcaaacaaggtgataaagatttttaaaacatcaaggaggtagcaaatgcaccggggcttgcctaaataacactaggttagtgtttgttaagtggcgaccacatggcaagcatccttttgcttggcactccttctgattatccatctttcggttcgtccatcagcatcaccatgcggagtagcccgcgcttggggtcgacttgggtcgttttccgcatcacgtgattatttatcgtacctcatgagatgcacgatgcacatgtatgagcacatgtataacaagtataatatagataatctacactaaaaaagatgaaacacttaaaaccaagcattaagcatcatggatatcacagcagggcatcgactacatccattaaccaaattgacataataacactaaaacatctatttttattcctagctttttattaactctttaaactgtgtatcttaattacttgatttacatatttatctaaatcgatcatcaaaatatacgcatgctaaattaataacatttattgtgaccaataattctatttaatctatttataaacttaattgactggaatacgaattaacttacccttatgacatccgacttgaaaccacgaaatcgacgcctttcagctcagcatttcaccggaaatagggtgagtgctacgtcaaatcgcgcttctttgtccacatcgagaattcttcggccgcgtactgatttattttcttctgcgcctaatcttctcagatcttggtgtagacgaggatgacgatcgacgacatgttcgagctttttgtcgcgcacttggtgaacatcacgctgctagcttcatcttcacccgatgcttgggatttcttgacgacgcacggaacgacgacgacgaccttcagctgaacacccgcgagctatatacactggcttcactttcttcatccgcacacataaattgcatcgacgaacgacgagatcagaaaggcgcggtgttggggaaaataccaaaaatgacgggtgatggagctggcagatgacgatggtgctacggcgaagcgaataaggctagacgacggcgtggtccgtcgcgagagaacgccagcacacagcacggcgaatagcgggagtcaatcggcgagattgaactacggcacgatgcgcattaggaacaagcgcacacggtagcgaacacggtcgccgagccaaacggcacagggccaagcgacgaatgcgttaggcgaggtcgcgactatggattacggcaaggtcggcagggaagatcggcaccacgatggcaacaattgtcgcccatcaccaacagcacccgcacgaccaccaatccgggaccaaagaacgacgtacgacgaggtcgaggacgagctcagacacggggaacaggaagcagcaaccgagcagggcacgagctgcacgcgacctcagtgcacagggatgagctcggcaaggaagcagagcgcgcacaagggagcaggtcggtcgcggtagtaggcgcggctgtggcagcaaggcgagaccgtg

SEQ ID NO: 68634 - DNA, 1402 bp, Zea Mays
tgctgtgttaatcgcgcctcacatgcagatgagctctcaacatcccgaatacatacggcgcaattagtgctccatgttatcgccgctcaagggcactgaaaccgttatgaatcagctaacaattcatccaaacaaagcaatcaacaaccttatgtaagtatctgagcttctagatgcacggcacattaattgtctcgtcctactgctagcaccagaccgctgtcttcttgagcacattgaggtcttcggatttctccgggggtggccgcgcgcagcaccggcaatgtcgtcatgcaagcggtacttgccgtgcttgatattgttgttgctgcacggaggacgaggtgcggtggccgggaaggtgtcggcaatcgtcgtgttcggcgactcttccgtggacacggggaacaacaatttcatcccgaccatcgcgcggagcaacttctggccgtacggccgcgactacgacgatggcctccccacgggccggttctccaatgggcgcctcgccaccgacttcatctccgaggccttcggcctgccgccgtccatccccgcctacctggacaacaactgcaccatcgaccagctcgccacaggagtctccttcgcctccgctgcgacaggcctcgataacgcgacggccggcgtcttgtccgtgatcacgctggacgagcagctcgcttacttcaaggagtacacggaccgcctcaagatcgccaagggcgaggcggcggcggaggagatcatcagcgaagcgctctacatctgctgggactcgccgaggccgccatacgccgcgtgcacaccctcggcggccgcaaaatggacttcaccgggctcacgcccatgggctgcctccccgccgagcggatcggcaaccgcgacaaccccggggagtgcaacgagcagtacaacgctgttgccaggaccttcaacgccaagctgcaggagctcgtcctcaagcttaacaaggaactgctgggactgcagctcgtcttcgccgacacgtaccagctcctcgccaacgtcgtaaacaggccggccgactacggatttgacaatgctgtgcaaggttgttgtgggacggggcttttcgaggcaggttacttttgtagcttcagcacatcaatgctatgcgaaaatgccaacaagtatgtattctttgatgcgatccatcccacggagaagatgtacaaattatttgatcttcctaatagaaatgcggcatggacaggtctatacggccatgcctgtgtacaatctataatgcacatagacacacctaccgctcctccacatacaactttgattgttgaaaccatatcatatacaattttaaattatagcacgtgtactataaattttatcttatagatcaatgttgttgtcacgaacaaaa

SEQ ID NO: 68635 - DNA, 3815 bp, Zea Mays
ccggtctccagacccgaaacgctgacgccaaatcaaatcaaaccttgctgccttctgcatccggtagcagcaagtcgccgcttgtgcccttcctcctcactttccctcgctgacgcccgatccccatgattcgattacgcgacccgccttgcaaaccctagcttctcccgctctctccctttccaatgcgccccaaaccctagcttcccgcccgcccacccgccggtcatgcgcgcctccgcctccgctgtccccatggaggcctccgcctccgcccgcagatccgccgctagccccgaccccggcgcgaagaagccgcgcctcgcgcagccgccggcacgggaccccagatcttacgccgctgccgccgccgcctccaatggcggcgcaagcgccgccgagcaagcgctggttgacgagctgctcggccagtaccggaccgcgcttggggagctcaccttcaattccaagcccatcatcaccaacctcaccatcatcgctggcgagaacctccaggccgctaagcccatcgccgccgtaatctgcgccaacatcctcgaggttccaagtgaacagaaactaccatcgctgtatctgcttgacagtattgtaaaaaatattggaaaagattatgtcaaacatttctcagcaagattaccagaggtgttctgcaaggcatataaacaagttgatccttctatacatcatagcatgaggcatctttttggaacatggaaaggagtgtttcctctacctcctctccaaacgattgagaaggaacttggttttcagtcatctaccaatggattatcaggtgctgcaccatcaaggactgattctcaatcgccgcgtccatccaatagcatacatgggatacttggaagtggtgctaagacagctgtaattgctgatacagacgatgatattgagagggctaataggctaggtactgaaagaagtgcagggagacgattggatgctcctaatgctagacctaacatagagcacattcagagggacccttttagcaatcctattcatgaaaaacttgcaggtagagatgtgaggggccttggattctccaacacttcacagcaggctgttgtgggaactggtcaagttcgctcaaaacccagaggccaagatggaattgggggaccctattatgcctctggtgttgtgtcttctgaagaaaaaattgacaagcgcagcaacttttatacaagcaaggatgttcggccatcaggatctgtacatttcgatagtgctcttcttccaactcgatcaattaatgctaatagagttggtaggccttcatcaaacaaaagctggaagcactctgaggaagaagaatatgtttgggatgatgtaccctctaaaacaacagaatatagtggtacccataatataataaaaggagaatggatgtctgatgatggcaatgctaagtttgcaagcctccaaagtgctaaatgggcagatgcaggacctgtggaatgtatagatcccaagacacataaagttgataatgtgtcaagatttggatttgcagcaggtcaagaaagaagaatttcagcatacatggatcaggaagagtaccttcttggcaagcgtgaggtggaagctagaattgatagggaaattaggccctatggacaacagttcccagcagctcgagattcctctctctgggtgtcccaggaaaaagcactccccgacaatgggttggacccttgggtatcaaagttttcaaatcagccagcagagatgtccatttgtactggcaccatgccagcaagtatcatatcatctgtacctgttaggttatcaggacactatgctggaaggtcaaacctagatactacaaatagtgtgccaataagatcaactgaggcttttgggcagcagaagcatagatattggtcatcttcccctccacaagctcacccaccttcatctactgcaccctttgcacgtcagggttctccaaatcatgacgagtctgatttttatccttctggatcattttctcaattgggccaagatcctcaagaagaatatagccagagagcattgcctgtacttgctaaaggttctcatgttgtggttcacaatgatgaacttactcagggccaacctagtctacaggcaaccctgcagacacaaaagtaccctatcatacagtccaagtcacatattaatccatctgatcaattgcaagcaagctttttgtgtgaaaattctccatcactgttcagaccttccattcagcttggagaagtatctttacccagtgattccacccctataagctcagatctgacaagtgctagtaatttgttggctggtctcataaagagtgggttcaaaccaagtaaccacagtgatgcacagcctcttggtccgagtggctcacttctagtggcttctttatcacttcaaaatgctgctggtgaaaataccattttgcagacacagacaccaaacacttctcgtccaccattgccaccaggtctaccaccacctccatcaacacagagtgcagagaaagctgcgccgctctcgagtcttctcagttccctggttgcaaagggattaatctcttctcctgcctctgattcatctgatgctgtcatttcacagccaaataaagaatcaagcataaatggtaaagatgtcgcagcttcaggtgtgcctttgccagctctgaagtcttcatttggtaaggtgtcatcatctaattctgattcatctgccccaccaaacgcttcgttacccaaagctatcgaaattgagatgggtgacctcattggcctggagttcaagccagagaaacttcgcaagtaccatgagcatgtaattagctacctcgatgaccaaagccatcagtgtaaaatgtgtggtaataggttcgggcttgaagaactgagtttgcacacatcaagctgtgggccaagggagtcaaggactatctatactggtatcgcacctaagagatggtatcctagcaggaacatttacattgatggatcacatgaaattgaggatagcgctgaggcttctgatgcaggtttaggttctgcagaagtgtgtgagtttatggtccatgcagacgagaggcaaattatctgtgcactgtgtggggaaccatttgatgacgtatattcttttgagaaggggaactggatgtacaaggatgcagtattcttggattatgccaagggtaaaaatagctgcggaaacaatgttaagggtgaagagcatgtgcctatagtccatgtaagatgtatgccaagaggctcaaacgatggcatggacgttgactagaatggttgttcacagaagccaagttctcgaggggcctagaggtggatgaggctgaagctggtgtttgcacgaggcaatgtgcatcatcaggtggtctgcggcaactgggcttaagacatacatgtaagatgcttggtggaggtggcaggcgttatcagaaacaaatcttgcgaagatctgcaaccatccatggatttaaccatgccctttacaaagtgcttacacaaagaataaagccccagaggagcacttcggccatgcggttcagaattatcaaaatcttcatatttttggtctccatctgagaaggggctgggtctttatgttgatacaaagagagctttgcaagaggatgtcaaaagaatgtatgatttctttacgtggaaaaggggtatgatatcccgcatgcgcaacgcctccttgctcgatcgactacatggcaaaaagcggaatatgtcagaagggattcaagcgaagaccaaagagcg

SEQ ID NO: 68636 - DNA, 3866 bp, Zea Mays
ccggtctccagacccgaaacgctgacgccaaatcaaatcaaaccttgctgccttctgcatccggtagcagcaagtcgccgcttgtgcccttcctcctcactttccctcgctgacgcccgatccccatgattcgattacgcgacccgccttgcaaaccctagcttctcccgctctctccctttccaatgcgccccaaaccctagcttcccgcccgcccacccgccggtcatgcgcgcctccgcctccgctgtccccatggaggcctccgcctccgcccgcagatccgccgctagccccgaccccggcgcgaagaagccgcgcctcgcgcagccgccggcacgggaccccagatcttacgccgctgccgccgccgcctccaatggcggcgcaagcgccgccgagcaagcgctggttgacgagctgctcggccagtaccggaccgcgcttggggagctcaccttcaattccaagcccatcatcaccaacctcaccatcatcgctggcgagaacctccaggccgctaagcccatcgccgccgtaatctgcgccaacatcctcgaggttccaagtgaacagaaactaccatcgctgtatctgcttgacagtattgtaaaaaatattggaaaagattatgtcaaacatttctcagcaagattaccagaggtgttctgcaaggcatataaacaagttgatccttctatacatcatagcatgaggcatctttttggaacatggaaaggagtgtttcctctacctcctctccaaacgattgagaaggaacttggttttcagtcatctaccaatggattatcaggtgctgcaccatcaaggactgattctcaatcgccgcgtccatccaatagcatacatgtaaatccaaaatatttggaagcgaggcagcagctcaatcaaccaactaaggggatacttggaagtggtgctaagacagctgtaattgctgatacagacgatgatattgagagggctaataggctaggtactgaaagaagtgcagggagacgattggatgctcctaatgctagacctaacatagagcacattcagagggacccttttagcaatcctattcatgaaaaacttgcaggtagagatgtgaggggccttggattctccaacacttcacagcaggctgttgtgggaactggtcaagttcgctcaaaacccagaggccaagatggaattgggggaccctattatgcctctggtgttgtgtcttctgaagaaaaaattgacaagcgcagcaacttttatacaagcaaggatgttcggccatcaggatctgtacatttcgatagtgctcttcttccaactcgatcaattaatgctaatagagttggtaggccttcatcaaacaaaagctggaagcactctgaggaagaagaatatgtttgggatgatgtaccctctaaaacaacagaatatagtggtacccataatataataaaaggagaatggatgtctgatgatggcaatgctaagtttgcaagcctccaaagtgctaaatgggcagatgcaggacctgtggaatgtatagatcccaagacacataaagttgataatgtgtcaagatttggatttgcagcaggtcaagaaagaagaatttcagcatacatggatcaggaagagtaccttcttggcaagcgtgaggtggaagctagaattgatagggaaattaggccctatggacaacagttcccagcagctcgagattcctctctctgggtgtcccaggaaaaagcactccccgacaatgggttggacccttgggtatcaaagttttcaaatcagccagcagagatgtccatttgtactggcaccatgccagcaagtatcatatcatctgtacctgttaggttatcaggacactatgctggaaggtcaaacctagatactacaaatagtgtgccaataagatcaactgaggcttttgggcagcagaagcatagatattggtcatcttcccctccacaagctcacccaccttcatctactgcaccctttgcacgtcagggttctccaaatcatgacgagtctgatttttatccttctggatcattttctcaattgggccaagatcctcaagaagaatatagccagagagcattgcctgtacttgctaaaggttctcatgttgtggttcacaatgatgaacttactcagggccaacctagtctacaggcaaccctgcagacacaaaagtaccctatcatacagtccaagtcacatattaatccatctgatcaattgcaagcaagctttttgtgtgaaaattctccatcactgttcagaccttccattcagcttggagaagtatctttacccagtgattccacccctataagctcagatctgacaagtgctagtaatttgttggctggtctcataaagagtgggttcaaaccaagtaaccacagtgatgcacagcctcttggtccgagtggctcacttctagtggcttctttatcacttcaaaatgctgctggtgaaaataccattttgcagacacagacaccaaacacttctcgtccaccattgccaccaggtctaccaccacctccatcaacacagagtgcagagaaagctgcgccgctctcgagtcttctcagttccctggttgcaaagggattaatctcttctcctgcctctgattcatctgatgctgtcatttcacagccaaataaagaatcaagcataaatggtaaagatgtcgcagcttcaggtgtgcctttgccagctctgaagtcttcatttggtaaggtgtcatcatctaattctgattcatctgccccaccaaacgcttcgttacccaaagctatcgaaattgagatgggtgacctcattggcctggagttcaagccagagaaacttcgcaagtaccatgagcatgtaattagctacctcgatgaccaaagccatcagtgtaaaatgtgtggtaataggttcgggcttgaagaactgagtttgcacacatcaagctgtgggccaagggagtcaaggactatctatactggtatcgcacctaagagatggtatcctagcaggaacatttacattgatggatcacatgaaattgaggatagcgctgaggcttctgatgcaggtttaggttctgcagaagtgtgtgagtttatggtccatgcagacgagaggcaaattatctgtgcactgtgtggggaaccatttgatgacgtatattcttttgagaaggggaactggatgtacaaggatgcagtattcttggattatgccaagggtaaaaatagctgcggaaacaatgttaagggtgaagagcatgtgcctatagtccatgtaagatgtatgccaagaggctcaaacgatggcatggacgttgactagaatggttgttcacagaagccaagttctcgaggggcctagaggtggatgaggctgaagctggtgtttgcacgaggcaatgtgcatcatcaggtggtctgcggcaactgggcttaagacatacatgtaagatgcttggtggaggtggcaggcgttatcagaaacaaatcttgcgaagatctgcaaccatccatggatttaaccatgccctttacaaagtgcttacacaaagaataaagccccagaggagcacttcggccatgcggttcagaattatcaaaatcttcatatttttggtctccatctgagaaggggctgggtctttatgttgatacaaagagagctttgcaagaggatgtcaaaagaatgtatgatttctttacgtggaaaaggggtatgatatcccgcatgcgcaacgcctccttgctcgatcgactacatggcaaaaagcggaatatgtcagaagggattcaagcgaagaccaaagagcg

SEQ ID NO: 68637 - DNA, 3591 bp, Zea Mays
atggaggcctccgcctccgcccgcagatccgccgctagccccgaccccggcgcgaagaagccgcgcctcgcgcagccgccggcacgggaccccagatcttacgccgctgccgccgccgcctccaatggcggcgcaagcgccgccgagcaagcgctggttgacgagctgctcggccagtaccggaccgcgcttggggagctcaccttcaattccaagcccatcatcaccaacctcaccatcatcgctggcgagaacctccaggccgctaagcccatcgccgccgtaatctgcgccaacatcctcgaggttccaagtgaacagaaactaccatcgctgtatctgcttgacagtattgtaaaaaatattggaaaagattatgtcaaacatttctcagcaagattaccagaggtgttctgcaaggcatataaacaagttgatccttctatacatcatagcatgaggcatctttttggaacatggaaaggagtgtttcctctacctcctctccaaacgattgagaaggaacttggttttcagtcatctaccaatggattatcaggtgctgcaccatcaaggactgattctcaatcgccgcgtccatccaatagcatacatgtaaatccaaaatatttggaagcgaggcagcagctcaatcaaccaactaaggggatacttggaagtggtgctaagacagctgtaattgctgatacagacgatgatattgagagggctaataggctaggtactgaaagaagtgcagggagacgattggatgctcctaatgctagacctgtagagatgtgaggggccttggattctccaacacttcacagcaggctgttgtgggaactggtcaagttcgctcaaaacccagaggccaagatggaattgggggaccctattatgcctctggtgttgtgtcttctgaagaaaaaattgacaagcgcagcaacttttatacaagcaaggatgttcggccatcaggatctgtacatttcgatagtgctcttcttccaactcgatcaattaatgctaatagagttggtaggccttcatcaaacaaaagctggaagcactctgaggaagaagaatatgtttgggatgatgtaccctctaaaacaacagaatatagtggtacccataatataataaaaggagaatggatgtctgatgatggcaatgctaagtttgcaagcctccaaagtgctaaatgggcagatgcaggacctgtggaatgtatagatcccaagacacataaagttgataatgtgtcaagatttggatttgcagcaggtcaagaaagaagaatttcagcatacatggatcaggaagagtaccttcttggcaagcgtgaggtggaagctagaattgatagggaaattaggccctatggacaacagttcccagcagctcgagattcctctctctgggtgtcccaggaaaaagcactccccgacaatgggttggacccttgggtatcaaagttttcaaatcagccagcagagatgtccatttgtactggcaccatgccagcaagtatcatatcatctgtacctgttaggttatcaggacactatgctggaaggtcaaacctagatactacaaatagtgtgccaataagatcaactgaggcttttgggcagcagaagcatagatattggtcatcttcccctccacaagctcacccaccttcatctactgcaccctttgcacgtcagggttctccaaatcatgacgagtctgatttttatccttctggatcattttctcaattgggccaagatcctcaagaagaatatagccagagagcattgcctgtacttgctaaaggttctcatgttgtggttcacaatgatgaacttactcagggccaacctagtctacaggcaaccctgcagacacaaaagtaccctatcatacagtccaagtcacatattaatccatctgatcaattgcaagcaagctttttgtgtgaaaattctccatcactgttcagaccttccattcagcttggagaagtatctttacccagtgattccacccctataagctcagatctgacaagtgctagtaatttgttggctggtctcataaagagtgggttcaaaccaagtaaccacagtgatgcacagcctcttggtccgagtggctcacttctagtggcttctttatcacttcaaaatgctgctggtgaaaataccattttgcagacacagacaccaaacacttctcgtccaccattgccaccaggtctaccaccacctccatcaacacagagtgcagagaaagctgcgccgctctcgagtcttctcagttccctggttgcaaagggattaatctcttctcctgcctctgattcatctgatgctgtcatttcacagccaaataaagaatcaagcataaatggtaaagatgtcgcagcttcaggtgtgcctttgccagctctgaagtcttcatttggtaaggtgtcatcatctaattctgattcatctgccccaccaaacgcttcgttacccaaagctatcgaaattgagatgggtgacctcattggcctggagttcaagccagagaaacttcgcaagtaccatgagcatgtaattagctacctcgatgaccaaagccatcagtgtaaaatgtgtggtaataggttcgggcttgaagaactgagtttgcacacatcaagctgtgggccaagggagtcaaggactatctatactggtatcgcacctaagagatggtatcctagcaggaacatttacattgatggatcacatgaaattgaggatagcgctgaggcttctgatgcaggtttaggttctgcagaagtgtgtgagtttatggtccatgcagacgagaggcaaattatctgtgcactgtgtggggaaccatttgatgacgtatattcttttgagaaggggaactggatgtacaaggatgcagtattcttggattatgccaagggtaaaaatagctgcggaaacaatgttaagggtgaagagcatgtgcctatagtccatgtaagatgtatgccaagaggctcaaacgatggcatggacgttgactagaatggttgttcacagaagccaagttctcgaggggcctagaggtggatgaggctgaagctggtgtttgcacgaggcaatgtgcatcatcaggtggtctgcggcaactgggcttaagacatacatgtaagatgcttggtggaggtggcaggcgttatcagaaacaaatcttgcgaagatctgcaaccatccatggatttaaccatgccctttacaaagtgcttacacaaagaataaagccccagaggagcacttcggccatgcggttcagaattatcaaaatcttcatatttttggtctccatctgagaaggggctgggtctttatgttgatacaaagagagctttgcaagaggatgtcaaaagaatgtatgatttctttacgtggaaaaggggtatgatatcccgcatgtaagttgagcactgctgttttctgacgatacgtttcttgactgttaggaatttttgcactacgaaactgataatacaacatgatagaggcaggactaaggggaatgtttggtttacat

SEQ ID NO: 68638 - DNA, 4135 bp, Zea Mays
ccggtctccagacccgaaacgctgacgccaaatcaaatcaaaccttgctgccttctgcatccggtagcagcaagtcgccgcttgtgcccttcctcctcactttccctcgctgacgcccgatccccatgattcgattacgcgacccgccttgcaaaccctagcttctcccgctctctccctttccaatgcgccccaaaccctagcttcccgcccgcccacccgccggtcatgcgcgcctccgcctccgctgtccccatggaggcctccgcctccgcccgcagatccgccgctagccccgaccccggcgcgaagaagccgcgcctcgcgcagccgccggcacgggaccccagatcttacgccgctgccgccgccgcctccaatggcggcgcaagcgccgccgagcaagcgctggttgacgagctgctcggccagtaccggaccgcgcttggggagctcaccttcaattccaagcccatcatcaccaacctcaccatcatcgctggcgagaacctccaggccgctaagcccatcgccgccgtaatctgcgccaacatcctcgaggtgacctttgtctttgactcctcttacgctcgtcaaactgccgtctccccttcttcctcaattcaccatgtaaaagtaactctaaggcgccaagcatccactggcgcttcgttttcaaaacagtgtggtaaaatcacaaagttgaaaaacaagggatttcagaaagttctactacaaactgaagtttatgatacaccgtcttgtacatatgaaaaatatgtccatgcactggttccaagtgaacagaaactaccatcgctgtatctgcttgacagtattgtaaaaaatattggaaaagattatgtcaaacatttctcagcaagattaccagaggtgttctgcaaggcatataaacaagttgatccttctatacatcatagcatgaggcatctttttggaacatggaaaggagtgtttcctctacctcctctccaaacgattgagaaggaacttggttttcagtcatctaccaatggattatcaggtgctgcaccatcaaggactgattctcaatcgccgcgtccatccaatagcatacatgtaaatccaaaatatttggaagcgaggcagcagctcaatcaaccaactaaggggatacttggaagtggtgctaagacagctgtaattgctgatacagacgatgatattgagagggctaataggctaggtactgaaagaagtgcagggagacgattggatgctcctaatgctagacctaacatagagcacattcagagggacccttttagcaatcctattcatgaaaaacttgcaggtagagatgtgaggggccttggattctccaacacttcacagcaggctgttgtgggaactggtcaagttcgctcaaaacccagaggccaagatggaattgggggaccctattatgcctctggtgttgtgtcttctgaagaaaaaattgacaagcgcagcaacttttatacaagcaaggatgttcggccatcaggatctgtacatttcgatagtgctcttcttccaactcgatcaattaatgctaatagagttggtaggccttcatcaaacaaaagctggaagcactctgaggaagaagaatatgtttgggatgatgtaccctctaaaacaacagaatatagtggtacccataatataataaaaggagaatggatgtctgatgatggcaatgctaagtttgcaagcctccaaagtgctaaatgggcagatgcaggacctgtggaatgtatagatcccaagacacataaagttgataatgtgtcaagatttggatttgcagcaggtcaagaaagaagaatttcagcatacatggatcaggaagagtaccttcttggcaagcgtgaggtggaagctagaattgatagggaaattaggccctatggacaacagttcccagcagctcgagattcctctctctgggtgtcccaggaaaaagcactccccgacaatgggttggacccttgggtatcaaagttttcaaatcagccagcagagatgtccatttgtactggcaccatgccagcaagtatcatatcatctgtacctgttaggttatcaggacactatgctggaaggtcaaacctagatactacaaatagtgtgccaataagatcaactgaggcttttgggcagcagaagcatagatattggtcatcttcccctccacaagctcacccaccttcatctactgcaccctttgcacgtcagggttctccaaatcatgacgagtctgatttttatccttctggatcattttctcaattgggccaagatcctcaagaagaatatagccagagagcattgcctgtacttgctaaaggttctcatgttgtggttcacaatgatgaacttactcagggccaacctagtctacaggcaaccctgcagacacaaaagtaccctatcatacagtccaagtcacatattaatccatctgatcaattgcaagcaagctttttgtgtgaaaattctccatcactgttcagaccttccattcagcttggagaagtatctttacccagtgattccacccctataagctcagatctgacaagtgctagtaatttgttggctggtctcataaagagtgggttcaaaccaagtaaccacagtgatgcacagcctcttggtccgagtggctcacttctagtggcttctttatcacttcaaaatgctgctggtgaaaataccattttgcagacacagacaccaaacacttctcgtccaccattgccaccaggtctaccaccacctccatcaacacagagtgcagagaaagctgcgccgctctcgagtcttctcagttccctggttgcaaagggattaatctcttctcctgcctctgattcatctgatgctgtcatttcacagccaaataaagaatcaagcataaatggtaaagatgtcgcagcttcaggtgtgcctttgccagctctgaagtcttcatttggtaaggtgtcatcatctaattctgattcatctgccccaccaaacgcttcgttacccaaagctatcgaaattgagatgggtgacctcattggcctggagttcaagccagagaaacttcgcaagtaccatgagcatgtaattagctacctcgatgaccaaagccatcagtgtaaaatgtgtggtaataggttcgggcttgaagaactgagtttgcacacatcaagctgtgggccaagggagtcaaggactatctatactggtatcgcacctaagagatggtatcctagcaggaacatttacattgatggatcacatgaaattgaggatagcgctgaggcttctgatgcaggtttaggttctgcagaagtgtgtgagtttatggtccatgcagacgagaggcaaattatctgtgcactgtgtggggaaccatttgatgacgtatattcttttgagaaggggaactggatgtacaaggatgcagtattcttggattatgccaagggtaaaaatagctgcggaaacaatgttaagggtgaagagcatgtgcctatagtccatgtaagatgtatgccaagaggctcaaacgatggcatggacgttgactagaatggttgttcacagaagccaagttctcgaggggcctagaggtggatgaggctgaagctggtgtttgcacgaggcaatgtgcatcatcaggtggtctgcggcaactgggcttaagacatacatgtaagatgcttggtggaggtggcaggcgttatcagaaacaaatcttgcgaagatctgcaaccatccatggatttaaccatgccctttacaaagtgcttacacaaagaataaagccccagaggagcacttcggccatgcggttcagaattatcaaaatcttcatatttttggtctccatctgagaaggggctgggtctttatgttgatacaaagagagctttgcaagaggatgtcaaaagaatgtatgatttctttacgtggaaaaggggtatgatatcccgcatgtaagttgagcactgctgttttctgacgatacgtttcttgactgttaggaatttttgcactacgaaactgataatacaacatgatagaggcaggactaaggggaatgtttggtttacat

SEQ ID NO: 68639 - DNA, 2865 bp, Zea Mays
gattttggtcacgaagccaccgtaggaggcgtatgtctcctacactcttctcataccagtgctcactctcaggacgccatgccatctcctccaccggtagccgcccctctctactcgttctcatcgtcgggccgacatctagctccctgcgccctccccttcctgccatgactgacgcccctctctccatggtgccacgcgtcatcatagccgtgtttggaccactccggtgccggcgtcatccattctcgaaatctcatgatttggtggagaagacaatgtccaaacacaacgcttgctaagtgttcgatgatttgtttgagccaagaatcttcgtcgttctagtggtttcgagtctgatttagttatggtgagatccttttctatccttgctagttaactttaatggtggtttggatggataatttacctatgatgcttcttttgtttatagcacagactcattattattttaggtggtgtttatagtgttatgaaggaaatagtcgttcttttattttgttttgtttgtgtgatattatgttgtgtaaaatttgtttggtgaatatatatgcatcatgagttagtggtaatacctcttcgtggatagtgacatgattgtattcatgattatggttaaaataagtgatgacggtagtgttgttcgaacctacacgtacagttttgattgcacaactaattgagtgaagtaaatcatgttttctgtgaacgtgttgtatataaacattgtagataactcctttatcttacttgtgtaaaaatttcatgaccataggtttagtagtttagtagttatgattttctcaagtccagtttcagaatctgtccaaattctgtacaggtttcggaaattggattgtttggctaagttaaatggagaatcagcccttagtaattatagaagaattttagtactttccgtaagctttccaaaaaaatttggatcaccctttttgtgatctataaattaagttacagctgtttgagttaggatctctgaatttgtccaaatttggacagcagagcctttctcatgttttctgtccttgatatatattgaattaacctaggatgtttataaatgaattgtagacaattctactagctttttaaaaagtctaggatcaattgattcgaatgcctgaaactctagttattgatttttgaagtgagtagtcgaattctgtccaaatccggacagaatttacgtttagcactgattgacctttcaaaatgcagaatcatgttgtgcttgtaatacaaaagttataggggattccataagatttctagaaagtcttaattcactatttttggattaatattgtcggtgtttcgaccccggtgggtcactggaccgacgagtaaattgttgtcgcgtgccccagcccagatgggtcggcgcgagacggagcgtgaagggggggaaaaccggagggaggcaggagtaaaaggggaaacccgcggccttcgtgtttgtcccgcgcccaggtcgggtgcgcttgcagtagggggtcacaagcgtccgcgtgggagggagcgagaggcctgcacgcgccgtaccgtcctccccgcgtggccaaccttccgtaagagggccctggaccttccttttataggcgtaaggagagggtccaggtgtacaatgggagatgtagcagtgtgctaacgtgtctagcagagaggagctagtgccctaagtacatgccgtcgtggcagccggagaggttttggcaccctgttcatgagatgtcgtggccgtcggaggagcgctggagcctggcggaaggacagctgtcggggctgtcgagtccttgctgacgtctccttgcttccgtaagggggctgagagccgccgtcgtcatggagcacgcggggcgccatcattatttgctttgccggggtgagccagatgggacgccggtcttgttccccgtagccagagctagctaggggtagggcaatgatggcccctcctgcgacgtggtcggtccgagccctgggtcggacgaggcggaggctcctccgaggtcgaggtcgagtctgtcttccgaggtcgaggtcaagtccgagcccctgggtcgggcgaggcggagatcgtcggctgaggccagggccgagtccgagcactggggttgggcgaggcggagttcgtcgtcttccagggccgaggccgagtccgagccctggggtcgggcgaggcggagttcgtcgtcatccggggccgacgccgagtccgagccctagggtcgggcgaggcggagttcgtcgtcttctggggccgaggccgagtccgagccctggggtcgtgcaaggcggagttcgtcgtcttctggggccgaggccgagtccgagcccttgggtcgggcgaggtggagttcgtcgtcttccggggccgaggtcgagtccgagccctggggtcgggcgaggtagagcttcctatggcgcccgaggccagacttggctgctgtcagcctcactctgtcgagtggcacaacagtcggagcggcgcaggcggcgctgtcctcttgttaggccggtcagtggagcggcgaagtgactgcggtcgcttcggctctgtcgactgaagggcgcgcgtcaggatgaggtgtcaggtcatccttgcattaaatgctcctgcgatatggtcggtcggcatggcgatttggccaaggttgcttcttggcgaaggctgggcctcgggtgagccggaggtgtgtccgttgcttgagggggccctcaggcgagacgtaaatcctctggagtcggctacccttgcccgaggctgggctcgggcgaggcgagatcgtgtcccttaagtggaccgagccttgacttaatcgc

SEQ ID NO: 68640 - DNA, 3148 bp, Zea Mays
ccttatcctcttgcgtgagagattttggaattcagacagcatcacacgtataaactctagagatttccccaccgcccttgattttggtcacgaagccaccgtaggaggcgtatgtctcctacactcttctcataccagtgctcactctcaggacgccatgccatctcctccaccggtagccgcccctctctactcgttctcatcgtcgggccgacatctagctccctgcgccctccccttcctgccatgactgacgcccctctctccatggtgctcgcccaacctccacttccctgttccagcatctcccttggccgccccaactccttccatggacgccaatagcagcagcccactccttcttttgttctccatggatgaaagcccaagcatctgcgtctcccctaggtttttgcacaatcgcagcagcacctcttaattctcactcgtctgttgctcgatgttatgtgcagcaggccacgcgtcatcatagccgtgtttggaccactccggtgccggcgtcatccattctcgaaatctcatgatttggtggagaagacaatgtccaaacacaacgcttgctaagtgttcgatgatttgtttgagccaagaatcttcgtcgttctagtggtttcgagtctgatttagttatggtgagatccttttctatccttgctagttaactttaatggtggtttggatggataatttacctatgatgcttcttttgtttatagcacagactcattattattttaggtggtgtttatagtgttatgaaggaaatagtcgttcttttattttgttttgtttgtgtgatattatgttgtgtaaaatttgtttggtgaatatatatgcatcatgagttagtggtaatacctcttcgtggatagtgacatgattgtattcatgattatggttaaaataagtgatgacggtagtgttgttcgaacctacacgtacagttttgattgcacaactaattgagtgaagtaaatcatgttttctgtgaacgtgttgtatataaacattgtagataactcctttatcttacttgtgtaaaaatttcatgaccataggtttagtagtttagtagttatgattttctcaagtccagtttcagaatctgtccaaattctgtacaggtttcggaaattggattgtttggctaagttaaatggagaatcagcccttagtaattatagaagaattttagtactttccgtaagctttccaaaaaaatttggatcaccctttttgtgatctataaattaagttacagctgtttgagttaggatctctgaatttgtccaaatttggacagcagagcctttctcatgttttctgtccttgatatatattgaattaacctaggatgtttataaatgaattgtagacaattctactagctttttaaaaagtctaggatcaattgattcgaatgcctgaaactctagttattgatttttgaagtgagtagtcgaattctgtccaaatccggacagaatttacgtttagcactgattgacctttcaaaatgcagaatcatgttgtgcttgtaatacaaaagttataggggattccataagatttctagaaagtcttaattcactatttttggattaatattgtcggtgtttcgaccccggtgggtcactggaccgacgagtaaattgttgtcgcgtgccccagcccagatgggtcggcgcgagacggagcgtgaagggggggaaaaccggagggaggcaggagtaaaaggggaaacccgcggccttcgtgtttgtcccgcgcccaggtcgggtgcgcttgcagtagggggtcacaagcgtccgcgtgggagggagcgagaggcctgcacgcgccgtaccgtcctccccgcgtggccaaccttccgtaagagggccctggaccttccttttataggcgtaaggagagggtccaggtgtacaatgggagatgtagcagtgtgctaacgtgtctagcagagaggagctagtgccctaagtacatgccgtcgtggcagccggagaggttttggcaccctgttcatgagatgtcgtggccgtcggaggagcgctggagcctggcggaaggacagctgtcggggctgtcgagtccttgctgacgtctccttgcttccgtaagggggctgagagccgccgtcgtcatggagcacgcggggcgccatcattatttgctttgccggggtgagccagatgggacgccggtcttgttccccgtagccagagctagctaggggtagggcaatgatggcccctcctgcgacgtggtcggtccgagccctgggtcggacgaggcggaggctcctccgaggtcgaggtcgagtctgtcttccgaggtcgaggtcaagtccgagcccctgggtcgggcgaggcggagatcgtcggctgaggccagggccgagtccgagcactggggttgggcgaggcggagttcgtcgtcttccagggccgaggccgagtccgagccctggggtcgggcgaggcggagttcgtcgtcatccggggccgacgccgagtccgagccctagggtcgggcgaggcggagttcgtcgtcttctggggccgaggccgagtccgagccctggggtcgtgcaaggcggagttcgtcgtcttctggggccgaggccgagtccgagcccttgggtcgggcgaggtggagttcgtcgtcttccggggccgaggtcgagtccgagccctggggtcgggcgaggtagagcttcctatggcgcccgaggccagacttggctgctgtcagcctcactctgtcgagtggcacaacagtcggagcggcgcaggcggcgctgtcctcttgttaggccggtcagtggagcggcgaagtgactgcggtcgcttcggctctgtcgactgaagggcgcgcgtcaggatgaggtgtcaggtcatccttgcattaaatgctcctgcgatatggtcggtcggcatggcgatttggccaaggttgcttcttggcgaaggctgggcctcgggtgagccggaggtgtgtccgttgcttgagggggccctcaggcgagacgtaaatcctctggagtcggctacccttgcccgaggctgggctcgggcgaggcgagatcgtgtcccttaagtggaccgagccttgacttaatcgc

SEQ ID NO: 68641 - DNA, 2890 bp, Zea Mays
cccctcccttatcctacatacacgatacttctctttttctccttatcctcttgcgtgagagattttggaattcagacagcatcacacgtataaactctagagatttccccaccgcccttgattttggtcacgaagccaccgtaggaggcgtatgtctcctacactcttctcataccagtgctcactctcaggacgccatgccatctcctccaccgcaggccacgcgtcatcatagccgtgtttggaccactccggtgccggcgtcatccattctcgaaatctcatgatttggtggagaagacaatgtccaaacacaacgcttgctaagtgttcgatgatttgtttgagccaagaatcttcgtcgttctagtggtttcgagtctgatttagttatggtgagatccttttctatccttgctagttaactttaatggtggtttggatggataatttacctatgatgcttcttttgtttatagcacagactcattattattttaggtggtgtttatagtgttatgaaggaaatagtcgttcttttattttgttttgtttgtgtgatattatgttgtgtaaaatttgtttggtgaatatatatgcatcatgagttagtggtaatacctcttcgtggatagtgacatgattgtattcatgattatggttaaaataagtgatgacggtagtgttgttcgaacctacacgtacagttttgattgcacaactaattgagtgaagtaaatcatgttttctgtgaacgtgttgtatataaacattgtagataactcctttatcttacttgtgtaaaaatttcatgaccataggtttagtagtttagtagttatgattttctcaagtccagtttcagaatctgtccaaattctgtacaggtttcggaaattggattgtttggctaagttaaatggagaatcagcccttagtaattatagaagaattttagtactttccgtaagctttccaaaaaaatttggatcaccctttttgtgatctataaattaagttacagctgtttgagttaggatctctgaatttgtccaaatttggacagcagagcctttctcatgttttctgtccttgatatatattgaattaacctaggatgtttataaatgaattgtagacaattctactagctttttaaaaagtctaggatcaattgattcgaatgcctgaaactctagttattgatttttgaagtgagtagtcgaattctgtccaaatccggacagaatttacgtttagcactgattgacctttcaaaatgcagaatcatgttgtgcttgtaatacaaaagttataggggattccataagatttctagaaagtcttaattcactatttttggattaatattgtcggtgtttcgaccccggtgggtcactggaccgacgagtaaattgttgtcgcgtgccccagcccagatgggtcggcgcgagacggagcgtgaagggggggaaaaccggagggaggcaggagtaaaaggggaaacccgcggccttcgtgtttgtcccgcgcccaggtcgggtgcgcttgcagtagggggtcacaagcgtccgcgtgggagggagcgagaggcctgcacgcgccgtaccgtcctccccgcgtggccaaccttccgtaagagggccctggaccttccttttataggcgtaaggagagggtccaggtgtacaatgggagatgtagcagtgtgctaacgtgtctagcagagaggagctagtgccctaagtacatgccgtcgtggcagccggagaggttttggcaccctgttcatgagatgtcgtggccgtcggaggagcgctggagcctggcggaaggacagctgtcggggctgtcgagtccttgctgacgtctccttgcttccgtaagggggctgagagccgccgtcgtcatggagcacgcggggcgccatcattatttgctttgccggggtgagccagatgggacgccggtcttgttccccgtagccagagctagctaggggtagggcaatgatggcccctcctgcgacgtggtcggtccgagccctgggtcggacgaggcggaggctcctccgaggtcgaggtcgagtctgtcttccgaggtcgaggtcaagtccgagcccctgggtcgggcgaggcggagatcgtcggctgaggccagggccgagtccgagcactggggttgggcgaggcggagttcgtcgtcttccagggccgaggccgagtccgagccctggggtcgggcgaggcggagttcgtcgtcatccggggccgacgccgagtccgagccctagggtcgggcgaggcggagttcgtcgtcttctggggccgaggccgagtccgagccctggggtcgtgcaaggcggagttcgtcgtcttctggggccgaggccgagtccgagcccttgggtcgggcgaggtggagttcgtcgtcttccggggccgaggtcgagtccgagccctggggtcgggcgaggtagagcttcctatggcgcccgaggccagacttggctgctgtcagcctcactctgtcgagtggcacaacagtcggagcggcgcaggcggcgctgtcctcttgttaggccggtcagtggagcggcgaagtgactgcggtcgcttcggctctgtcgactgaagggcgcgcgtcaggatgaggtgtcaggtcatccttgcattaaatgctcctgcgatatggtcggtcggcatggcgatttggccaaggttgcttcttggcgaaggctgggcctcgggtgagccggaggtgtgtccgttgcttgagggggccctcaggcgagacgtaaatcctctggagtcggctacccttgcccgaggctgggctcgggcgaggcgagatcgtgtcccttaagtggaccgagccttgacttaatcgc

SEQ ID NO: 68642 - DNA, 927 bp, Zea Mays
atgtcgcctgcgcggcctcctccgccttccgctcgcctccgcgccttcccccgcgatggagtcctcacctccttctatgccggtcgattccccagtatccctggatgccttaatcgccgatcctgcggccgcgccggccgcgtgtactgcctcttctctggcggtgataaccgcaagaaacaggatgaagctaggaaagcactggaaaatgccctagggaagaaggctgagtttgacaaatggggtgtggaaattgaaaggaggcaaaggggctaccctagagatcctgctgcttgtggtggaggatggtcaggaggaggcagctggtttaggcggcttactggtggaggtttctgggatgcagcaaaacaaactgttcttacaatccttggcattatcgcggcgcttactgtgttttccagggcgcattggttgaaaggtctggaccaaagtcaagtacccttggccttagcaatgtggctggagtgcctgtgaaagaaaaggctggaatgtctgcgaaagaaagagtagttgggaaatgggcaatggactgaagtagtgcacagttatgtcttgtgagcaactctctctgtttcaatgtatgtacgacagtagacatgttacaataatttctatgaaactatgaccttttaaatgaaatatgttgtgatgctagtcaatgttagaaaaaatttgaccaaaaggattcctaaaatcagacggagtatttcttgttcagagttttgcagacactgaaatgttgatgtttgccgaattgtttgagatgaagaccgtgattagtggttgttcagagttttgtatcagcgttgccactcaatatgaagtacgagcattcgtgttttaagttgtttttattacgtgtaacatttctgagtcattctgtaagctctacacgctgtaatcctg

SEQ ID NO: 68643 - DNA, 1049 bp, Zea Mays
cgccactctagctaccgagcgagccatgtcgcctgcgcggcctcctccgccttccgctcgcctccgcgccttcccccgcgatggagtcctcacctccttctatgccggtcgattccccagtatccctggatgccttaatcgccgatcctgcggccgcgccggccgcgtgtactgcctcttctctggcggtgataaccgcaagaaacaggatgaagctaggaaagcactggaaaatgccctagggaagaaggctgagtttgacaaatggggtgtggaaattgaaaggaggcaaaggggctaccctagagatcctgctgcttgtggtggaggatggtcaggaggaggcagctggtttaggcggcttactggtggaggtttctgggatgcagcaaaacaaactgttcttacaatccttggcattatcgcggcgtttttcctgattgcaaacttcaatatactggtggcttctgttatcaattcgttgttgcttgtgctgcggcagattcggcgcatactctccttcatagcttactgtgttttccagggcgcattggttgaaaggtctggaccaaagtcaagtacccttggccttagcaatgtggctggagtgcctgtgaaagaaaaggctggaatgtctgcgaaagaaagagtagttgggaaatgggcaatggactgaagtagtgcacagttatgtcttgtgagcaactctctctgtttcaatgtatgtacgacagtagacatgttacaataatttctatgaaactatgaccttttaaatgaaatatgttgtgatgctagtcaatgttagaaaaaatttgaccaaaaggattcctaaaatcagacggagtatttcttgttcagagttttgcagacactgaaatgttgatgtttgccgaattgtttgagatgaagaccgtgattagtggttgttcagagttttgtatcagcgttgccactcaatatgaagtacgagcattcgtgttttaagttgtttttattacgtgtaacatttctgagtcattctgtaagctctacacgctgtaatcctg

SEQ ID NO: 68644 - DNA, 1074 bp, Zea Mays
cgccactctagctaccgagcgagccatgtcgcctgcgcggcctcctccgccttccgctcgcctccgcgccttcccccgcgatggagtcctcacctccttctatgccggtcgattccccagtatccctggatgccttaatcgccgatcctgcggccgcgccggccgcgtgtactgcctcttctctggcggtgataaccgcaagaaacaggatcaaattactattttccctacaggatgaagctaggaaagcactggaaaatgccctagggaagaaggctgagtttgacaaatggggtgtggaaattgaaaggaggcaaaggggctaccctagagatcctgctgcttgtggtggaggatggtcaggaggaggcagctggtttaggcggcttactggtggaggtttctgggatgcagcaaaacaaactgttcttacaatccttggcattatcgcggcgtttttcctgattgcaaacttcaatatactggtggcttctgttatcaattcgttgttgcttgtgctgcggcagattcggcgcatactctccttcatagcttactgtgttttccagggcgcattggttgaaaggtctggaccaaagtcaagtacccttggccttagcaatgtggctggagtgcctgtgaaagaaaaggctggaatgtctgcgaaagaaagagtagttgggaaatgggcaatggactgaagtagtgcacagttatgtcttgtgagcaactctctctgtttcaatgtatgtacgacagtagacatgttacaataatttctatgaaactatgaccttttaaatgaaatatgttgtgatgctagtcaatgttagaaaaaatttgaccaaaaggattcctaaaatcagacggagtatttcttgttcagagttttgcagacactgaaatgttgatgtttgccgaattgtttgagatgaagaccgtgattagtggttgttcagagttttgtatcagcgttgccactcaatatgaagtacgagcattcgtgttttaagttgtttttattacgtgtaacatttctgagtcattctgtaagctctacacgctgtaatcctg

SEQ ID NO: 68645 - DNA, 938 bp, Zea Mays
ccacgccactctagctaccgagcgagccatgtcgcctgcgcggcctcctccgccttccgctcgcctccgcgccttcccccgcgatggagtcctcacctccttctatgccggtcgattccccagtatccctggatgccttaatcgccgatcctgcggccgcgccggccgcgtgtactgcctcttctctggcggtgataaccgcaagaaacaggatgaagctaggaaagcactggaaaatgccctagggaagaaggctgagtttgacaaatggggtgtggaaattgaaaggaggcaaaggggctaccctagagatcctgctgcttgtggtggaggatggtcaggaggaggcagctggtttaggcggcttactggtggaggtttctgggatgcagcaaaacaaactgttcttacaatccttggcattatcgcggcgggcgcattggttgaaaggtctggaccaaagtcaagtacccttggccttagcaatgtggctggagtgcctgtgaaagaaaaggctggaatgtctgcgaaagaaagagtagttgggaaatgggcaatggactgaagtagtgcacagttatgtcttgtgagcaactctctctgtttcaatgtatgtacgacagtagacatgttacaataatttctatgaaactatgaccttttaaatgaaatatgttgtgatgctagtcaatgttagaaaaaatttgaccaaaaggattcctaaaatcagacggagtatttcttgttcagagttttgcagacactgaaatgttgatgtttgccgaattgtttgagatgaagaccgtgattagtggttgttcagagttttgtatcagcgttgccactcaatatgaagtacgagcattcgtgttttaagttgtttttattacgtgtaacatttctgagtcattctgtaagctctacacgctgtaatcctg

SEQ ID NO: 68646 - DNA, 803 bp, Zea Mays
cgagaacagactctgaaggcaaaaaaaaaaaaagtaggcccagcccagttgtgtaagcagccttcaccgtaacacaaacccacgcggccacgccactctagctaccgagcgagccatgtcgcctgcgcggcctcctccgccttccgctcgcctccgcgccttcccccgcgatggagtcctcacctccttctatgccggtcgattccccagtatccctggatgccttaatcgccgatcctgcggccgcgccggccgcgtgtactgcctcttctctggcggtgataaccgcaagaaacagggcgcattggttgaaaggtctggaccaaagtcaagtacccttggccttagcaatgtggctggagtgcctgtgaaagaaaaggctggaatgtctgcgaaagaaagagtagttgggaaatgggcaatggactgaagtagtgcacagttatgtcttgtgagcaactctctctgtttcaatgtatgtacgacagtagacatgttacaataatttctatgaaactatgaccttttaaatgaaatatgttgtgatgctagtcaatgttagaaaaaatttgaccaaaaggattcctaaaatcagacggagtatttcttgttcagagttttgcagacactgaaatgttgatgtttgccgaattgtttgagatgaagaccgtgattagtggttgttcagagttttgtatcagcgttgccactcaatatgaagtacgagcattcgtgttttaagttgtttttattacgtgtaacatttctgagtcattctgtaagctctacacgctgtaatcctg

SEQ ID NO: 68647 - DNA, 4789 bp, Zea Mays
cgccactctagctaccgagcgagccatgtcgcctgcgcggcctcctccgccttccgctcgcctccgcgccttcccccgcgatggagtcctcacctccttctatgccggtcgattccccagtatccctggatgccttaatcgccgatcctgcggccgcgccggccgcgtgtactgcctcttctctggcggtgataaccgcaagaaacaggttctggcctccgggggttgagtgtcacatcggtgctgcatcaggatcaggcaaacaccgtcgcggatgactgagttggcggtaggagaggtatgcggacaaggtttggttttagtggatcctgttgggccggatttggccttgtaatctcaattgttagactttgttaatctctggtattgggccgtattgtggccgtgtattcgtgggcgggtcagccacacgtataagaggcaaatatctgcgctgaagaagggatggaagaacagaaaccaaatattcatacctctgtctgcttctcttgcctgtgttctttccctttcttctctcttctctccggtgatctctggcgataatccaccggatatcacaaactggtatcagaggcattttccggcgacacttcgatcgtcgtcgagcgacatctcagggaagacatcacggcgccaagtcggccatctgttcaggcgcgtcacgtggttgcagccatggaagaggtggagaaaaggctgactgagaagttccagcaagcatgggaggcgtcgactgccactctcatggagctgtcgaagaagatggatgggttggacacgctgtcgaccaagatgtccgagatggagaagcgacagatggagcatgagaagatcacacagtacgtgcaggcaaaaatggatctctccatgaagtctctggcacaggtatcccaagatcaagcgcgactatcaaatgtggtggcgaatgcaaaccgaggagggagcgtcgcgcagaggggaggaactggtgacgggttgatgggagctcatccacaggcaataccacccagtttccagacatcccagaccgcccctcatgtgtctcatccgacaggaggttcagggaaccattcgtcaggtgaggaggcaagatttggacaagaagaagttaacagaagaggaatagagtcggatcaacatcaccgaaggacttggctacccaagtgggatttcccggtatttgaaggggaagaagctagggtatggatagataattgtgaagcctacttcctgctataccagattccagaggagttcagagtaagcgctgcctctctccatcttaagggtcgtgctgctcactggtaccaatcatttcgagattctgtcgggttcgtagattggattcagttcaagttggagattcggaatgaatttgatcttactacacattcagacaggatgttggaattgttaacactaaggcagacggggactgtgttggaatataagacacaatttgagaaacttgtctattgcattaggttgtttgacaaggctgtgagtgagaccttcttggtgacacaatttgttttgggtctcaaacatgagttgaaggttggggtggagatgcaatttcctaaaacagtggctatggccgctcaactagctttgaaacatgagagtttgcatagcagacacactgcaggaacaagaaaagcagtgggagtaaagggggttcctccagtgggcttcaaagaaggtacagagtctcaaggagaattatggaaggccaaacaattgaaggactataggagggcaaatggactttgttttaaattatccctcaatgctatgagtggcactaacaacccaagatgtgtgagaatacaagcattgatcaaggaccagttaatccttcagttgttggattcaggcagctctaacactttcataagtgagctagcctgttctaggattgggtgtgaaactcagaatatagagcctgttgcagtgaaggtagcaaatgagcagatcatctactgccagaagaaggttgtccaattgaagtggtggtgtggtgggaaaacctttactgtagatgcatttgtgttaccagccactgcatatgatatggtactgggaatggattggctggaaaagtttagtcccatgttatgtgattgggatagaaaatgggtggaattcagttatgaaggagtgagaatcaggctgcaaggggtgggcaataaatctgcagctctgttgccagaagcatcccatgagcaaatccagaggtggcacaaggggaatgaaatttgggcagttgcattgctacaacaagtgacaccagagttgaaggtagtcactggtcaagtccctgagtgtgttcaagaggtgttggaccagtttaaggaagtgtttaaaaccccagattctttaccaccctcaagagaatatgatcatactatctctctgttgcctggaactacacctgtgaatgtaaggccctatagatactcaccattacagaaggatgagattgagaggcaagtccaggaaatgttgcaagcaggaacaatcactagaagtgtcagcccctttgcttctcctgttttgttggttaagaagaaggatgggagttggagattttgtgtggactatagaaaattgaatgatattacagtgaagaacaaattccctatgcctatcatagatgagtttattgatgagttagcaggagccaaggtgttttccaaattggatatggctgcgggttttcatcagataagaatggcagaccaagatgaaatgaaaacagcatttaagactcaccatggacacttccaatttagagttatgccatttggtctcacaaatgcaccagctacatttcagtgtttgatgaatgctgtatttcagcaactcatgaggaagtgtgtcttgatttttatggatgatatattggtgtatagcccttcactggagacacatgttgttcatctacaacaagtttttcaagtattagaaacacatcagttgtatgcaaaaaggagcaaatgtgcttttgctctcactcaaatagaatacttggggcatattatttcagacaaaggtgtgtcaactgacccttctaagacagaatcaatgagaaggtggcctactccaaagtcacacacggaacttagaggatttttgggactcacaggctattacaggaagtttgtcaaggggtatgggatactggcaaaacctctgacggtactgctgcaacaaaaacagtttggatggccaccatcagcacaaactgcctttgaggctttgaaggatgctatgattaccactcctgttcttgccttacctaatttcagtgagacatttgtcattgaaactgacgcttgtgacactggcattggagcagtgttgtcgcaaaagggacatcctgtggctttttatagtaaagctttaggagtgaagaacagccaactgtcaacttatgagaaggaatttcttgcaatattaatggcagtagagaagtggagatgttatctgagtagaggaccttttgtgattcggactgatcacagaagtttgtgtcatcttcaggatcagactttggcaacggatatgcagaagaaagcaatgaccaaattggccggactgcaattttcagtacaatataaaaagggagcagaaaataaagctgcagatgccctttctagagtggcccataatatggaattgtcggccatttctgcaacaactcctgtgtggcttcaggagataacaaattcctatgagttggatactcatgctcaaagtctattggcagaactggctgtctctagtccaaatgagcaagggtttgaattgaagaatgggctgatttacaagaataacaggcttgtagtgggacaaaatgtggggctgcaaacaaagttgatttcagcctttcatgcatctcctttgggaggacattcaggaatccaggccacctatcaaagggtgaagaagttatttctttggaatggactcaaggctgatgtggaacaatttgtgaggcaatgtcacgtgtgtcaacaagctaaacacgaacattgtaagtacccaggtctgcttcagcctttgcctattccccaaagttcctggcaagacttgtccatggattttattgaagggctacctaaatccaatgggtattctgtgatcttagtggttgtggatcgcttgacaaaatatgcccattttttagcagttaaacatcctttcacagcttcacacattgctcacttgtttttctctcaagtggttaaactacatggattccctcataccatagtttcagacagggataaagtgtttaccagcacattttggcaagagttattcaaattgtctggaactcagttacatctcagttcagcataccacccccaaagtgatggtcaaacggagcgtgtgaatcaatgcttggagatgtttttgagatgtgctgttcacaattccccttctcagtgggcaaaatggttagactcagcagagttgtggtacaacacatcctatcatacttctataaagtgttctccatttaaagctttatatggagttgagcctaatttgggatgcattcctgtcactgactctttgaatccttcagaagctcaactcaccttgcagcaaagacaggaattcttggaagtaatcaagacaaatttggcatctgctcaaagcaggatgaagcattatgctgatctgaataggtcttttagacagtttcagattggagatctggtttacttgaagttgcagccttttgcacaagtttcag

SEQ ID NO: 68648 - DNA, 2273 bp, Zea Mays
caaatgcaaaccctggccgtcgtcttcctcataccagccgtgagtccctcgctgcgcacgcggtgctagtacacatgtgcacgacgttcgtccccgtacgtgtggactatgtggaagcgcagctgcgactgttgcgctgacacactgcggaggaggagacgatcgtgatcggctatttcctcttcatcgacgcgtgcatataaccaaacctagctgcgcttcctccagatctcggcgctctggccccatggccaccctcgttactagctccagtctctccgctcaccgcccttgcgccctctagctccggatcgcccgcgcacacgaggccatggagcccgcagccgaggacgttgcagccgccgcgccggactcgtgggaatcggccgacatcgacgggcccataagccggcttatcctctccgcgcgccgcgtgtcctcctcgccggacctcgctgacaacccggacccgccccagccgccgcctgcgctgcagccgcagggcccgccttcggttccctcggctgcgcgcgaggatttgatggctcaggtcgatcagttcctacgagaggctctagagaagccgagggagaggctttctgtgctaagaatggagcaagaaattttgaagttcattggtgaccctaggtttacagagtatgaattcaatggtcttccaacttcatatttgcgtctcgctgcacatcgcctggcgcagcattacttcctgcagtccattgccataccagacaacagtttgcctgatggaactggttcgcatatcatccttcgtaagacatcatctgagtgccaactgcctgatgtctgccttgcagatattccagttaacctaccacaagaagaaaacatctctgtggcgaaagtagctattaagcagaggcctcaaaagaatctccatggcatgaacagctcaagtgctcactcctttagagacaatcaccagaaaagcgttgaagaaagaaaagaggaatacaacaaagcacgagcgcgtatatttaacaacggcgtcagtaatgctactgatgggagatcagctgaggaagtgacttcactcactactcttcacaggtccacttccttggagttgaactcaaacaatagaatgggccaaggggctgaaattactcttgagaggaccttgactaccacttcagctagcagcatgtcaaatagaagcaagagtgataaggagcctgcagtcaatagaaacagacagaacaatagggttgcaattttcagagaccgtgagtcagagcgcagggatcctgattatgacagaagctatgacaggtatatgcaaagatttgatcctggatttggatttagtggagggtcatacacaattcgacctctgtatgcccctgctgttaactacaacactgaattccctcagcttggttcagcacaccaatcacctgttgctgtcgaacagcaacctcgtccaatagctcagcacatgcctgtgacatggtctgcggctcaagcaaccaatgcaattggctatgggccagatggtgtcatggggccttacagccctggccatattcgtgcacctgtgagatcatctgttttcatgcatgcttcacagcaatatgccataccttcacgccctggagttccatttgtacatccacaggaatccatgggaccatttgcacaagttgagatgctgaaggagcacatcttgccctatttgaatgggctctgttgtcgaaggactgatgacgatgatgaaaaattgggattcgcagtgagtgggcgatcagggaggagagcaaagattggggtggtccagtatgtgaacaggcgacagggatgtggccccattgtgcataggatggttgccgggttgaactgaggaggcatgaagaggacgttgtttcttgctttgcctagtgcgggcccggcaccattgttgatcaggtttagaagcagaggcatctctgttgacacaattgatggtcaggtttacaagcagactcatctggtagtcagtgttgtgttgtaaattaatgagtgttattgaattaccgaacctatttcttgtaccatgcatgacaagcaacgacactagttatgatcatgacgaatcatgtaacagacctgtttactgcagtgcagtgtttaatgttagaccgggttatttgcttgtgtttggtagttgtttaaggtttcactcttctttttttattaaggtattgctggaaactaatacttcctctataccaaaagattagttgttatagctcttg

SEQ ID NO: 68649 - DNA, 3143 bp, Zea Mays
caaatgcaaaccctggccgtcgtcttcctcataccagccgtgagtccctcgctgcgcacgcggtgctagtacacatgtgcacgacgttcgtccccgtacgtgtggactatgtggaagcgcagctgcgactgttgcgctgacacactgcggaggaggagacgatcgtgatcggctatttcctcttcatcgacgcgtgcatataaccaaacctagctgcgcttcctccagatctcggcgctctggccccatggccaccctcgttactagctccagtctctccgctcaccgcccttgcgccctctagctccggatcgcccgcgcacacgaggccatggagcccgcagccgaggacgttgcagccgccgcgccggactcgtgggaatcggccgacatcgacgggcccataagccggcttatcctctccgcgcgccgcgtgtcctcctcgccggacctcgctgacaacccggacccgccccagccgccgcctgcgctgcagccgcagggcccgccttcggttccctcggctgcgcgcgaggatttgatggctcaggtcgatcagttcctacgagaggctctagagaagccgagggagaggctttctgtgctaagaatggagcaagaaattttgaagttcattggtgaccctaggtttacagagtatgaattcaatggtcttccaacttcatatttgcgtctcgctgcacatcgcctggcgcagcattacttcctgcagtccattgccataccagacaacagtttgcctgatggaactggttcgcatatcatccttcgtaagacatcatctgagtgccaactgcctgatgtctgccttgcagatattccagttaacctaccacaagaagaaaacatctctgtggcgaaagtagctattaagcagaggcctcaaaagaatctccatggcatgaacagctcaagtgctcactcctttagagacaatcaccagaaaagcgttgaagaaagaaaagaggaatacaacaaagcacgagcgcgtatatttaacaacggcgtcagtaatgctactgatgggagatcagctgaggaagtgacttcactcactactcttcacaggtccacttccttggagttgaactcaaacaatagaatgggccaaggggctgaaattactcttgagaggaccttgactaccacttcagctagcagcatgtcaaatagaagcaagagtgataaggagcctgcagtcaatagaaacagacagaacaatagggttgcaattttcagagaccgtgagtcagagcgcagggatcctgattatgacagaagctatgacaggtatatgcaaagatttgatcctggatttggatttagtggagggtcatacacaattcgacctctgtatgcccctgctgttaactacaacactgaattccctcagcttggttcagcacaccaatcacctgttgctgtcgaacagcaacctcgtccaatagctcagcacatgcctgtgacatggtctgcggctcaagcaaccaatgcaattggctatgggccagatggtgtcatggggccttacagccctggccatattcgtgcacctgtgagatcatctgttttcatgcatgcttcacagcaatatgccataccttcacgccctggagttccatttgtacatccacaggaatccatgggaccatttgcacaagtatgtatgcgttttttcatcctatgtgattcagttcgttctttgttaccatactgagttaatatttgctcgagtattattatagaagcttatggatacacagtatatggttggtactcactataataacattatatgttcctagaaatcctattgcatgatattcaactgcatatcgtaatagtcgtcgtattgcattatatgtcatagtctactcttctccatttcaaactgtaagactgtgtccaggaggtgttgtaaaataggggacacggaactgtagataaaattgtttgatattgtttgcagagtgaagtttgaaataggggatgagataagaaatctgttggagatagcctaagtcgttttgggttttctaggtacatagcttttgctatgcatctagatatacattatgtttagatacatagtaaaagttaagtacattgaaaaaccagcacggcttacaatttggaatggagggggtatttaacttcgaatgagttgaaactccatgagatgcactagttaaatttagttcttggctaacagattttttactggtacagactcaccaacaacaatctaatgctagtttgcgctttgctcggccctggtgaggggcgccgtgcatgcctgcacctgccagtgtgcaatgaacacattacccttcgttttgctggcagatggtagcaggcattaaagaacccagaggtgtaaggcagagtcagccatccatttgatattgtcagcctgtacacactctcggtgtagttgctccctggtccctgcatactgagatgcaggagggacacttcatactctgtactctaaacagaagcaactcgaggtttattgggcaacccctcttccaatccacaagaagctgggaggtgaagcttgggctgtggggccacctgcatgcccctttcaacttccttctgttgcttgctcctcacagtgagtgggcgatcagggaggagagcaaagattggggtggtccagtatgtgaacaggcgacagggatgtggccccattgtgcataggatggttgccgggttgaactgaggaggcatgaagaggacgttgtttcttgctttgcctagtgcgggcccggcaccattgttgatcaggtttagaagcagaggcatctctgttgacacaattgatggtcaggtttacaagcagactcatctggtagtcagtgttgtgttgtaaattaatgagtgttattgaattaccgaacctatttcttgtaccatgcatgacaagcaacgacactagttatgatcatgacgaatcatgtaacagacctgtttactgcagtgcagtgtttaatgttagaccgggttatttgcttgtgtttggtagttgtttaaggtttcactcttctttttttattaaggtattgctggaaactaatacttcctctataccaaaagattagttgttatagctcttg

SEQ ID NO: 68650 - DNA, 2457 bp, Zea Mays
caaatgcaaaccctggccgtcgtcttcctcataccagccgtgagtccctcgctgcgcacgcggtgctagtacacatgtgcacgacgttcgtccccgtacgtgtggactatgtggaagcgcagctgcgactgttgcgctgacacactgcggaggaggagacgatcgtgatcggctatttcctcttcatcgacgcgtgcatataaccaaacctagctgcgcttcctccagatctcggcgctctggccccatggccaccctcgttactagctccagtctctccgctcaccgcccttgcgccctctagctccggatcgcccgcgcacacgaggccatggagcccgcagccgaggacgttgcagccgccgcgccggactcgtgggaatcggccgacatcgacgggcccataagccggcttatcctctccgcgcgccgcgtgtcctcctcgccggacctcgctgacaacccggacccgccccagccgccgcctgcgctgcagccgcagggcccgccttcggttccctcggctgcgcgcgaggatttgatggctcaggtcgatcagttcctacgagaggctctagagaagccgagggagaggctttctgtgctaagaatggagcaagaaattttgaagttcattggtgaccctaggtttacagagtatgaattcaatggtcttccaacttcatatttgcgtctcgctgcacatcgcctggcgcagcattacttcctgcagtccattgccataccagacaacagtttgcctgatggaactggttcgcatatcatccttcgtaagacatcatctgagtgccaactgcctgatgtctgccttgcagatattccagttaacctaccacaagaagaaaacatctctgtggcgaaagtagctattaagcagaggcctcaaaagaatctccatggcatgaacagctcaagtgctcactcctttagagacaatcaccagaaaagcgttgaagaaagaaaagaggaatacaacaaagcacgagcgcgtatatttaacaacggcgtcagtaatgctactgatgggagatcagctgaggaagtgacttcactcactactcttcacaggtccacttccttggagttgaactcaaacaatagaatgggccaaggggctgaaattactcttgagaggaccttgactaccacttcagctagcagcatgtcaaatagaagcaagagtgataaggagcctgcagtcaatagaaacagacagaacaatagggttgcaattttcagagaccgtgagtcagagcgcagggatcctgattatgacagaagctatgacaggtatatgcaaagatttgatcctggatttggatttagtggagggtcatacacaattcgacctctgtatgcccctgctgttaactacaacactgaattccctcagcttggttcagcacaccaatcacctgttgctgtcgaacagcaacctcgtccaatagctcagcacatgcctgtgacatggtctgcggctcaagcaaccaatgcaattggctatgggccagatggtgtcatggggccttacagccctggccatattcgtgcacctgtgagatcatctgttttcatgcatgcttcacagcaatatgccataccttcacgccctggagttccatttgtacatccacaggaatccatgggaccatttgcacaaatggtagcaggcattaaagaacccagaggtgtaaggcagagtcagccatccatttgatattgtcagcctgtacacactctcggtgtagttgctccctggtccctgcatactgagatgcaggagggacacttcatactctgtactctaaacagaagcaactcgaggtttattgggcaacccctcttccaatccacaagaagctgggaggtgaagcttgggctgtggggccacctgcatgcccctttcaacttccttctgttgcttgctcctcacagtgagtgggcgatcagggaggagagcaaagattggggtggtccagtatgtgaacaggcgacagggatgtggccccattgtgcataggatggttgccgggttgaactgaggaggcatgaagaggacgttgtttcttgctttgcctagtgcgggcccggcaccattgttgatcaggtttagaagcagaggcatctctgttgacacaattgatggtcaggtttacaagcagactcatctggtagtcagtgttgtgttgtaaattaatgagtgttattgaattaccgaacctatttcttgtaccatgcatgacaagcaacgacactagttatgatcatgacgaatcatgtaacagacctgtttactgcagtgcagtgtttaatgttagaccgggttatttgcttgtgtttggtagttgtttaaggtttcactcttctttttttattaaggtattgctggaaactaatacttcctctataccaaaagattagttgttatagctcttg

SEQ ID NO: 68651 - DNA, 1933 bp, Zea Mays
caaatgcaaaccctggccgtcgtcttcctcataccagccgtgagtccctcgctgcgcacgcggtgctagtacacatgtgcacgacgttcgtccccgtacgtgtggactatgtggaagcgcagctgcgactgttgcgctgacacactgcggaggaggagacgatcgtgatcggctatttcctcttcatcgacgcgtgcatataaccaaacctagctgcgcttcctccagatctcggcgctctggccccatggccaccctcgttactagctccagtctctccgctcaccgcccttgcgccctctagctccggatcgcccgcgcacacgaggccatggagcccgcagccgaggacgttgcagccgccgcgccggactcgtgggaatcggccgacatcgacgggcccataagccggcttatcctctccgcgcgccgcgtgtcctcctcgccggacctcgctgacaacccggacccgccccagccgccgcctgcgctgcagccgcagggcccgccttcggttccctcggctgcgcgcgaggatttgatggctcaggtcgatcagttcctacgagaggctctagagaagccgagggagaggctttctgtgctaagaatggagcaagaaattttgaagttcattggtgaccctaggtttacagaatattccagttaacctaccacaagaagaaaacatctctgtggcgaaagtagctattaagcagaggcctcaaaagaatctccatggcatgaacagctcaagtgctcactcctttagagacaatcaccagaaaagcgttgaagaaagaaaagaggaatacaacaaagcacgagcgcgtatatttaacaacggcgtcagtaatgctactgatgggagatcagctgaggaagtgacttcactcactactcttcacaggtccacttccttggagttgaactcaaacaatagaatgggccaaggggctgaaattactcttgagaggaccttgactaccacttcagctagcagcatgtcaaatagaagcaagagtgataaggagcctgcagtcaatagaaacagacagaacaatagggttgcaattttcagagaccgtgagtcagagcgcagggatcctgattatgacagaagctatgacaggtatatgcaaagatttgatcctggatttggatttagtggagggtcatacacaattcgacctctgtatgcccctgctgttaactacaacactgaattccctcagcttggttcagcacaccaatcacctgttgctgtcgaacagcaacctcgtccaatagctcagcacatgcctgtgacatggtctgcggctcaagcaaccaatgcaattggctatgggccagatggtgtcatggggccttacagccctggccatattcgtgcacctgtgagatcatctgttttcatgcatgcttcacagcaatatgccataccttcacgccctggagttccatttgtacatccacaggaatccatgggaccatttgcacaaccccattgtgcataggatggttgccgggttgaactgaggaggcatgaagaggacgttgtttcttgctttgcctagtgcgggcccggcaccattgttgatcaggtttagaagcagaggcatctctgttgacacaattgatggtcaggtttacaagcagactcatctggtagtcagtgttgtgttgtaaattaatgagtgttattgaattaccgaacctatttcttgtaccatgcatgacaagcaacgacactagttatgatcatgacgaatcatgtaacagacctgtttactgcagtgcagtgtttaatgttagaccgggttatttgcttgtgtttggtagttgtttaaggtttcactcttctttttttattaaggtattgctggaaactaatacttcctctataccaaaagattagttgttatagctcttg

SEQ ID NO: 68652 - DNA, 2182 bp, Zea Mays
caaatgcaaaccctggccgtcgtcttcctcataccagccgtgagtccctcgctgcgcacgcggtgctagtacacatgtgcacgacgttcgtccccgtacgtgtggactatgtggaagcgcagctgcgactgttgcgctgacacactgcggaggaggagacgatcgtgatcggctatttcctcttcatcgacgcgtgcatataaccaaacctagctgcgcttcctccagatctcggcgctctggccccatggccaccctcgttactagctccagtctctccgctcaccgcccttgcgccctctagctccggatcgcccgcgcacacgaggccatggagcccgcagccgaggacgttgcagccgccgcgccggactcgtgggaatcggccgacatcgacgggcccataagccggcttatcctctccgcgcgccgcgtgtcctcctcgccggacctcgctgacaacccggacccgccccagccgccgcctgcgctgcagccgcagggcccgccttcggttccctcggctgcgcgcgaggatttgatggctcaggtcgatcagttcctacgagaggctctagagaagccgagggagaggctttctgtgctaagaatggagcaagaaattttgaagttcattggtgaccctaggtttacagagtatgaattcaatggtcttccaacttcatatttgcgtctcgctgcacatcgcctggcgcagcattacttcctgcagtccattgccataccagacaacagtttgcctgatggaactggttcgcatatcatccttcgtaagacatcatctgagtgccaactgcctgatgtctgccttgcagatattccagttaacctaccacaagaagaaaacatctctgtggcgaaagtagctattaagcagaggcctcaaaagaatctccatggcatgaacagctcaagtgctcactcctttagagacaatcaccagaaaagcgttgaagaaagaaaagaggaatacaacaaagcacgagcgcgtatatttaacaacggcgtcagtaatgctactgatgggagatcagctgaggaagtgacttcactcactactcttcacaggtccacttccttggagttgaactcaaacaatagaatgggccaaggggctgaaattactcttgagaggaccttgactaccacttcagctagcagcatgtcaaatagaagcaagagtgataaggagcctgcagtcaatagaaacagacagaacaatagggttgcaattttcagagaccgtgagtcagagcgcagggatcctgattatgacagaagctatgacaggtatatgcaaagatttgatcctggatttggatttagtggagggtcatacacaattcgacctctgtatgcccctgctgttaactacaacactgaattccctcagcttggttcagcacaccaatcacctgttgctgtcgaacagcaacctcgtccaatagctcagcacatgcctgtgacatggtctgcggctcaagcaaccaatgcaattggctatgggccagatggtgtcatggggccttacagccctggccatattcgtgcacctgtgagatcatctgttttcatgcatgcttcacagcaatatgccataccttcacgccctggagttccatttgtacatccacaggaatccatgggaccatttgcacaatgagtgggcgatcagggaggagagcaaagattggggtggtccagtatgtgaacaggcgacagggatgtggccccattgtgcataggatggttgccgggttgaactgaggaggcatgaagaggacgttgtttcttgctttgcctagtgcgggcccggcaccattgttgatcaggtttagaagcagaggcatctctgttgacacaattgatggtcaggtttacaagcagactcatctggtagtcagtgttgtgttgtaaattaatgagtgttattgaattaccgaacctatttcttgtaccatgcatgacaagcaacgacactagttatgatcatgacgaatcatgtaacagacctgtttactgcagtgcagtgtttaatgttagaccgggttatttgcttgtgtttggtagttgtttaaggtttcactcttctttttttattaaggtattgctggaaactaatacttcctctataccaaaagattagttgttatagctcttg

SEQ ID NO: 68653 - DNA, 464 bp, Zea Mays
ctaatatcgagcgtgcgtggtacatatgcatggacgccatgtaaacatgtcctagcagctgctaacaacgtaccaccccaatcctcccagatctagcctcaccttgagctgtgtctggcactgtctttagctcagtgtcgctgctgccttcgggtttagcaaaattcaccgtgcccgcgagttcatcacccaaattgataacacactatgcttcgccaccctcttgcgcttgtgtaaccacaacccagccgcatgtcttcacccgagccccctgagaggcgtcttgccctactgttcatcgccgcgctatccaatttccgcctcatcgtggctaggtcatccagaacgtggccacgacgtcgtcactcatcttcatgggtcgcctcatcgtcagccggtctatccccgctttctccagtctgatctgcgtaagcgtcatggtgtggaacacctagaagaagtgg

SEQ ID NO: 68654 - DNA, 2101 bp, Zea Mays
tcatacttgcgtccataacagttctagccgaaggagcgttcgccatgtctgaaatggagtctgtcgcggctcttatggactcgacaagctccaagatacaacagcttcaggaggcattcgctgagcttgagagccagagcgctttctgcatgaacttcaagtggaagcagcttgaagaccactttcgtggtcttgaacaatccctcaagaaaaagtttgacgagctaaaagagcaggagaaggagttccaggagactgtcgcaaaatcagagcagatgctggagcagcgggaggcagctgttgtggccaaggaactgacctctttggagaggttgcaggagaagagggaagctgcattagctatgatctttagcaagtccaggctttccttacctgttccttccatcaacccaatgaacaaggcactggataatcttggtgtcaagtggcctaaaccggcttctgaggagagtgtgcacttgcaagttgataatgctgcagtgaggcctcgttctgagcttgttgcactctgtgaggaaatgaatgtgaacgggcttcataagttcatatccgacaacaggaagaacttggcagccatccgcgaggaaattcctagtgcactgaagaaaacatctcatccttatggcctggtgttggattccctggaagacttttattctggagataatcttgtattagatggaaaaaaggatggtgaccttctgggtgttagaaggacatgtttgatgttgatggagtcacttggacaactgcactctaatgatataacttgttcttctttggagaggcacatgcttacaactaatatcatagagcgagcaaagacgattgcatttaagtggaagtccaagttagataatcttgacattgatgctagcaatgggaactgtcttgaagctcatgcgtttcttcaactcctggcaacctttggtatttctgctgaattcaatgaagatgacttgtgcaaattgcttccatatgtcagtcgtcgtcgtcagacacctgaactttgtcgattgcttgggttgtcgcagaaaatgccaggtgtcattgaagttctggtggaaagtggaagacctattgatgcaattaatttggcttatgtgtttgagcttactgaacaatttgaaccagtacaccttcttaaagcatatctaagggatgttaagaaaatgtcacacgccaggaatgtcaaaacttctcctggagcacagaatgagatgaatgaacgtgagttatctgcgctgaaatctgtcattaagtgcattgaagagcacaaacttgagcagcagtaccctgtggatccacttcagaaaagggttttgcagctagagaaagcaaaggcagacaagaggatggctgttgaagcagcaaagccgcagtccaagaggcctcgtgccaatggatcggcctttgcaacccgtgctacaggctttgctgacaagagcttctactcagcaaccccagagaggcatccattcaatccttgcgagaggcagtttgtgtatggcgctgaggttcatcttcctcccatgatgacctcagcgtcttacacgatgcaacctgcccatggaccttattacggtaatggctacccagttcagtaccaggtctcgtatatccactaatggagacagccaggtgcaggtgctctttcctaacaatctagcttaacctgctgctctttgctgtagtcgtatcagttactctgcaagtttccctagctggaaatatttggaccactcaatgtgtgtgctctgagtggctgttgtggtaattttatgccctaatgacatgacataaattactcctaatatttagctatcgatgaatctcccaatgtacttcattcggcttgtgaaatgcctgtcactgaagaagcgcccaggggcatgaaaatatcatgtcgtcatggacgcctgccaaactgtcagttgcatcctgactggttgttgtttttagtttggtgtatcttttatgcccaagtatatttgctgagttatcatcttcagtttgccgattctaattggtttgtactccctcttttttctaaattataagatactttgatttttttgat

SEQ ID NO: 68655 - DNA, 1642 bp, Zea Mays
cattggctccctggatatccctcctccctctcgcgcttgcagcaaaatccaatgcttcgctctcgcttctgcagattgctcgctccccaaaaccttcacaaaaaaagccacccaaaaaaatccgtttcataactgaaaaaatcaaatagaaaaatcaagtgaagccggtaaagaaaaaaatggcagtggttggcctatccagtgctttcgctcctctcagaggttcttggatagccgtaaggatcaggcagggtggccaacgtgcagggatcagcttgtgtccatctccaaggagcaggaggagctgcgcggcagtggttcgggcggaggtgagcttcgtggacgccgacgaggcgaagaggctcgtgggcgaggagggctacacggtgctggacatcagggacagggcgcagcgcgagagggcacacatcaagtcctccacacacgtgcctctcttcattgagaaccaagacaacgacattgggaccatcgtgaagcgccagctgcacaacaacttcgcggggctcttcttcgggctgcccttcaccaagctcaacccggacttcgccctgacagtcaaggacaagttctcgccggaaagcaagctgctggttgtctgccaggaaggtctcagcagctgctgcagatgcactggagaaagaaggcttccaaaatattgcatgcatcacatcaggtcttcaaacagtgaagccaggaacgtttgaatctgtggggaaaagtgagctgcagaacgcggggaaagctggccttgtgaccatccaagggaagatttctgtagtccttgggactgtattgattagtgcctacctgtttataacattcttcccagaccaggctgagaagctttttgacttggctggcatcagcttgtgatcagagctgatgttcttcggtactccacttcataatcaggatggttgatcaagtcagattcactcagatgtttccagactgaaaaggaatttttgctctgtgtactattagggaattcttgagagattagcacttaaattctttgaaacatcccttttctcgatgtacctcctatatatatcgtatgcttgattcatctacatgtttgtgttgctttttgaagtatctagacctgcagttatgattcaggatttcaaatagaagctttttatccatctaatcatgctcatccacttgagaacattgaccctgaaagattatgtagaccttgataccaattgcagttgcagatgaaatgattgtcttgtgtaatggtgtaataatagatcttgcactttttggggtgtgttagcgtcaatctgggtgccagtcactgggagttgttccgctcggtgggctctctgtggcggcgcggacggtccgcgacttggacagtaggagcagggttccctgtgccgagccagacggtctgcgctgcgctgggctggcggcgttcagcaacgacacctggaatctcgccctccgagagggaccttgtcaggaaggagagatcctagggtttatcttgggatcgataggccacccaatatgtctctagatgatgtagagtcacataggtgaagattgggataaagaagactatgttactggactcctagggcaagaatgtaaagaaattaataaacag

SEQ ID NO: 68656 - DNA, 1700 bp, Zea Mays
caaatggccaaaagacagtggatctggctaaacctcccgtggatccagcgtggcgtgattccattggctccctggatatccctcctccctctcgcgcttgcagcaaaatccaatgcttcgctctcgcttctgcagattgctcgctccccaaaaccttcacaaaaaaagccacccaaaaaaatccgtttcataactgaaaaaatcaaatagaaaaatcaagtgaagccggtaaagaaaaaaatggcagtggttggcctatccagtgctttcgctcctctcagaggttcttggatagccgtaaggatcaggcagggtggccaacgtgcagggatcagcttgtgtccatctccaaggagcaggaggagctgcgcggcagtggttcgggcggaggtgagcttcgtggacgccgacgaggcgaagaggctcgtgggcgaggagggctacacggtgctggacatcagggacagggcgcagcgcgagagggcacacatcaagtcctccacacacgtgcctctcttcattgagaaccaagacaacgacattgggaccatcgtgaagcgccagctgcacaacaacttcgcggggctcttcttcgggctgcccttcaccaagctcaacccggacttcgccctgacagtcaaggacaagttctcgccggaaagcaagctgctggttgtctgccaggaaggtctcagctgctgcagatgcactggagaaagaaggcttccaaaatattgcatgcatcacatcaggtcttcaaacagtgaagccaggaacgtttgaatctgtggggaaaagtgagctgcagaacgcggggaaagctggccttgtgaccatccaagggaagatttctgtagtccttgggactgtattgattagtgcctacctgtttataacattcttcccagaccaggctgagaagctttttgacttggctggcatcagcttgtgatcagagctgatgttcttcggtactccacttcataatcaggatggttgatcaagtcagattcactcagatgtttccagactgaaaaggaatttttgctctgtgtactattagggaattcttgagagattagcacttaaattctttgaaacatcccttttctcgatgtacctcctatatatatcgtatgcttgattcatctacatgtttgtgttgctttttgaagtatctagacctgcagttatgattcaggatttcaaatagaagctttttatccatctaatcatgctcatccacttgagaacattgaccctgaaagattatgtagaccttgataccaattgcagttgcagatgaaatgattgtcttgtgtaatggtgtaataatagatcttgcactttttggggtgtgttagcgtcaatctgggtgccagtcactgggagttgttccgctcggtgggctctctgtggcggcgcggacggtccgcgacttggacagtaggagcagggttccctgtgccgagccagacggtctgcgctgcgctgggctggcggcgttcagcaacgacacctggaatctcgccctccgagagggaccttgtcaggaaggagagatcctagggtttatcttgggatcgataggccacccaatatgtctctagatgatgtagagtcacataggtgaagattgggataaagaagactatgttactggactcctagggcaagaatgtaaagaaattaataaacag

SEQ ID NO: 68657 - DNA, 1797 bp, Zea Mays
gttaatcatttcctaaaaatactttgccaagagttttgtagcctaacaagatctggctaaacctcacgatgctggtggtctgcccagcacaaatggccaaaagacagtggatctggctaaacctcccgtggatccagcgtggcgtgattccattggctccctggatatccctcctccctctcgcgcttgcagcaaaatccaatgcttcgctctcgcttctgcagattgctcgctccccaaaaccttcacaaaaaaagccacccaaaaaaatccgtttcataactgaaaaaatcaaatagaaaaatcaagtgaagccggtaaagaaaaaaatggcagtggttggcctatccagtgctttcgctcctctcagaggttcttggatagccgtaaggatcaggcagggtggccaacgtgcagggatcagcttgtgtccatctccaaggagcaggaggagctgcgcggcagtggttcgggcggaggtgagcttcgtggacgccgacgaggcgaagaggctcgtgggcgaggagggctacacggtgctggacatcagggacagggcgcagcgcgagagggcacacatcaagtcctccacacacgtgcctctcttcattgagaaccaagacaacgacattgggaccatcgtgaagcgccagctgcacaacaacttcgcggggctcttcttcgggctgcccttcaccaagctcaacccggacttcgccctgacagtcaaggacaagttctcgccggaaagcaagctgctggttgtctgccaggaaggtctcaggtcagcagctgctgcagatgcactggagaaagaaggcttccaaaatattgcatgcatcacatcaggtcttcaaacagtgaagccaggaacgtttgaatctgtggggaaaagtgagctgcagaacgcggggaaagctggccttgtgaccatccaagggaagatttctgtagtccttgggactgtattgattagtgcctacctgtttataacattcttcccagaccaggctgagaagctttttgacttggctggcatcagcttgtgatcagagctgatgttcttcggtactccacttcataatcaggatggttgatcaagtcagattcactcagatgtttccagactgaaaaggaatttttgctctgtgtactattagggaattcttgagagattagcacttaaattctttgaaacatcccttttctcgatgtacctcctatatatatcgtatgcttgattcatctacatgtttgtgttgctttttgaagtatctagacctgcagttatgattcaggatttcaaatagaagctttttatccatctaatcatgctcatccacttgagaacattgaccctgaaagattatgtagaccttgataccaattgcagttgcagatgaaatgattgtcttgtgtaatggtgtaataatagatcttgcactttttggggtgtgttagcgtcaatctgggtgccagtcactgggagttgttccgctcggtgggctctctgtggcggcgcggacggtccgcgacttggacagtaggagcagggttccctgtgccgagccagacggtctgcgctgcgctgggctggcggcgttcagcaacgacacctggaatctcgccctccgagagggaccttgtcaggaaggagagatcctagggtttatcttgggatcgataggccacccaatatgtctctagatgatgtagagtcacataggtgaagattgggataaagaagactatgttactggactcctagggcaagaatgtaaagaaattaataaacag

SEQ ID NO: 68658 - DNA, 1256 bp, Zea Mays
cattggctccctggatatccctcctccctctcgcgcttgcagcaaaatccaatgcttcgctctcgcttctgcagattgctcgctccccaaaaccttcacaaaaaaagccacccaaaaaaatccgtttcataactgaaaaaatcaaatagaaaaatcaagtgaagccggtaaagaaaaaaatggcagtggttggcctatccagtgctttcgctcctctcagaggttcttggatagccgtaaggatcaggcagggtggccaacgtgcagggatcagcttgtgtccatctccaaggagcaggaggagctgcgcggcagtggttcgggcggaggtgagcttcgtggacgccgacgaggcgaagaggctcgtgggcgaggagggctacacggtgctggacatcagggacagggcgcagcgcgagagggcacacatcaagtcctccacacacgtgcctctcttcattgagaaccaagacaacgacattgggaccatcgtgaagcgccagctgcacaacaacttcgcggggctcttcttcgggctgcccttcaccaagctcaacccggacttcgccctgacagtcaaggacaagttctcgccggaaagcaagctgctggttgtctgccaggaaggtctcagcagctgctgcagatgcactggagaaagaaggcttccaaaatattgcatgcatcacatcaggtcttcaaacagtgaagccaggaacgtttgaatctgtggggaaaagtgagctgcagaacgcggggaaagctggccttgtgaccatccaagggaagatttctgtagtccttgggactgtattgattagtgcctacctgtttataacattcttcccagaccaggctgagaagctttttgacttggctggcatcagcttgtgatcagagctgatgttcttcggtactccacttcataatcaggtcatcatttgcatctgttcgctgaaattatgtcagaattatgtttatccagagatccctgtcctctccaaaatagaaacgttacaattatttgatgtcgatacgagttacatcttgattctgaggttccttcatgtatttcaattctactttggagttttctaatgaatttgacatgactgctcaagttaatgctagaatgcctctaacaattcatttgacatgcaaaagtgcaaatgcccttgctttattgtaataacatcataaactcccttcttcataggtagtaagaccaaaaaatgcttttagatgctaactaggga

SEQ ID NO: 68659 - DNA, 857 bp, Zea Mays
cgagggcgacggaggcagggtcactcgaaaggagaggcagcgcatcgccgccgtgcacaacgccgtctggaacacccccccccccccccccccccccccccccctcgctccaccggtcgccactcgtctgacgggagcatggagggttctaacttgaaaggtttggtagatgatgaaattgtcgtgaagacaggcaaagctgcaggcatcggtttagcttttggcagtgtgtatggtgcactacattctatgttgtttgatggacctcaggtgtcgagcaggctcttgcaaggtacaggatgaagaaggacatcattaatggtgctgttgcaggttttgctgctggtgcttctctgggtttcagtgctggaagcttccgggcagcattcttttcaggctctgcagtcgctttgacatctgtagtgctggatgtcaccggaacgaaaactactgatgaagaagaaaaaggccagcactagccaccctgagatatggaagagtactatctgtttcagaggagtttcatctctaaagaaatgctagtagagtagtagtataggcggcagtgaggatttcttaaccatcgatactagcacacaaacgtactactccctccgttttttatttatttatcgtgttttagtttaaagtgggcgacaaatattcgagaatggaggtagtatgttcataatagaggtagtaggttgtatacttcgctggggtcatggtctgaggtagttggttgtttcttcctgacgtatgctctatgcttaagaatgtatatcccttctgtgcagagggttcatgctcttctatggtttatatatatatatgtgtgtgttttcattcatgctgaa

SEQ ID NO: 68660 - DNA, 838 bp, Zea Mays
ctgggacgagcttctcctccttggatggtggttgtagatcccgtgggagcttcaagtggcgacgttgcacggagccgtcgtcggtgttgcctttagcgagatttctcggagaagggagcatggagggttctaacttgaaaggtttggtagatgatgaaattgtcgtgaagacaggcaaagctgcaggcatcggtttagcttttggcagtgtgtatggtgcactacattctatgttgtttgatggacctcaggtgtcgagcaggctcttgcaaggtacaggatgaagaaggacatcattaatggtgctgttgcaggttttgctgctggtgcttctctgggtttcagtgctggaagcttccgggcagcattcttttcaggctctgcagtcgctttgacatctgtagtgctggatgtcaccggaacgaaaactactgatgaagaagaaaaaggccagcactagccaccctgagatatggaagagtactatctgtttcagaggagtttcatctctaaagaaatgctagtagagtagtagtataggcggcagtgaggatttcttaaccatcgatactagcacacaaacgtactactccctccgttttttatttatttatcgtgttttagtttaaagtgggcgacaaatattcgagaatggaggtagtatgttcataatagaggtagtaggttgtatacttcgctggggtcatggtctgaggtagttggttgtttcttcctgacgtatgctctatgcttaagaatgtatatcccttctgtgcagagggttcatgctcttctatggtttatatatatatatgtgtgtgttttcattcatgctgaa

SEQ ID NO: 68661 - DNA, 762 bp, Zea Mays
ctttcttatcttctctccctgcttccccatgacgcgcataccctgatgcttgtaaccgccactgcccctatcacctggttgttgccgatcccagcgcccagatgcaaagccccccggcgcggctcttaccggcggcccggcacggtgctagcctgcgcagctagcgcggcgtgcggcggccagccaaccgacgaccgtggcagcccgcggcgcgacccggccagccgcccctattttcccttgcgtgcggccaaccagcatagcgcgcgcggcagcccagcgtggctcggccatggcggcctgcgcggccctcggcgcccagtgtgagtccggcagccggcgggtgagcagccccgtgacgatcgtccccggaagttcccggcgcccgttcctggcctgtacgcgatcgccgagatcgcgattcgtttccgagcttcgagggatcgaagatcaagagttggcgaccaagtgatctggttcttcgagttctacgaggctgaagatcctgagcatctgtttggtgaaggcaagtgtcctttgacccattatgtcccatttactttacaattcactgtcccgcatactatgaacaacctaaggattgactagctttctatttacctggtccttgattaccttttgggctactatggttagattcatgcaattgctttactttaatcaatgaacatgatgtgaagacttatgatacgatgttgtcattatgattatgatgttggactggtgatacttaaggggact

SEQ ID NO: 68662 - DNA, 768 bp, Zea Mays
ctctccctttcttatcttctctccctgcttccccatgacccgcatatcctgatgcttgtaaccaccactgcccctatcacctagttgttgccgatcccagcgcccagatgcaaaggcccccggcgcggctcttacaggcggcccggcacggtgctagcctgcgcagctagcgcggcgtgcggcggccagccaaccgacggccgtggcagcctgcggctcgactcggccagccgcccctattttcccttgcgtgcggccaactagcacagcgcgcgcggcagcccagcgtggttcggccatggcggcatgcgcggccctcggcgcccagtgcgagtccggcagccggcgggtgagcagccccgtgacgatcgtccctggaagttcccggcgcccgttcctagcctgtacgcgatcgccgagatcgcgattcgtttccgagcttcgagggatcgaagatcaagagttggcgaccaagtgatctggttcttcgagttctacgaggctgaagatcctgagcatctgtttggtgaaggcaagtgtcctttgacccattatgtcccatttactttacaattcactgtcccgcatactatgaacaacctaaggattgactagctttctatttacctggtccttgattaccttttgggctactatggttagattcatgcaattgctttactttaatcaatgaacatgatgtgaagacttatgatacgatgttgtcattatgattatgatgttggactggtgatacttaaggggact

SEQ ID NO: 68663 - DNA, 779 bp, Zea Mays
ccaccgtccatctctccctttcttatcttctctccctgcttccccatgacccgcatatcctgatgcttgtaaccaccactgcccctatcacctagttgttgccgatcccagcgcccagatgcaaaggcccccggcgcggctcttacaggcggcccggcacggtgctagcctgcgcagctagcgcggcgtgcggcggccagccaaccgacggccgtggcagcctgcggctcgactcggccagccgcccctattttcccttgcgtgcggccaactagcacagcgcgcgcggcagcccagcgtggttcggccatggcggcatgcgcggccctcggcgcccagtgcgagtccggcagccggcgggtgagcagccccgtgacgatcgtccctggaagttcccggcgcccgttcctagcctgtacgcgatcgccgagatcgcgattcgtttccgagcttcgagggatcgaagatcaagagttggcgaccaagtgatctggttcttcgagttctacgaggctgaagatcctgagcatctgtttggtgaaggcaagtgtcctttgacccattatgtcccatttactttacaattcactgtcccgcatactatgaacaacctaaggattgactagctttctatttacctggtccttgattaccttttgggctactatggttagattcatgcaattgctttactttaatcaatgaacatgatgtgaagacttatgatacgatgttgtcattatgattatgatgttggactggtgatacttaaggggact

SEQ ID NO: 68664 - DNA, 780 bp, Zea Mays
gtggaaaccaccgtccatctctccctttcttatcttctctccctgcttccccatgacccgcatatcctgatgcttgtaaccaccactgcccctatcacctagttgttgccgatcccagcgcccagatgcaaaggcccccggcgcggctcttacaggcggcccggcacggtgctagcctgcgcagctagcgcggcgtgcggcggccagccaaccgacggccgtggcagcctgcggctcgactcggccagccgcccctattttcccttgcgtgcggccaactagcacagcgcgcgcggcagcccagcgtggttcggccatggcggcatgcgcggccctcggcgcccagtgcgagtccggcagccggcgggtgagcagccccgtgacgatcgtccctggaagttcccggcgcccgttcctagcctgtacgcgatcgccgagatcgcgattcgttttcgagctttgagggatcgaagatcaagagttggcgaccaagtgatctggttcttcgagttctatgaggctgaagatcctgagcatctgtttggtgaagacaagtgttctttgacccattatgtcccatttactttacaattcactgtcccgcatactatgaacaacctaaggattgactagctttctatttacctggtccttgattaccttttgggctactatggttagattcatgctattgctttactttaatcaatgaacatgatgtgaacacttatgatacgatgttgtcattatgattatgatgttggactggtgatacttaag

SEQ ID NO: 68665 - DNA, 3145 bp, Zea Mays
aacagatggggatgggggcatgccggcgttgggagcagaagcagaagcggctgtttttatttggattccagatagtatggctgccaaaatggctggagctgtccaagtgctcaaggatgacactgttaaacgcacacccatggcacgacctagtaacggccgtgaaggaaagcccattaggttgctgtcgaaccacttctcagtgaagcttagaggagttgatgctgttttctaccaatacagtgtctgcatcaaatctgaggatgataaggtggttgatagcaagggtattggccgaaaggtcatagataaactattgcaaacatactgttctgagcttgatgggaaggattttgcatatgatggagagaaatgtctatttactgtgggacctcttccacagaataactttgagttcactgttatcttggaggaaacatcttcaagggctgctggtggaagtccagtgcatgaaagccctactcaagctaacaaaaagcgagtcaagcgatcacatctggcaaaaaagttcagtgtagacataagttatgccgcaaagattcctcttcagtcggttgctttggctcttcgaggaagcgagtcagaacatggtcaagatgttctgagagtccttgacgttgttttaaggcaacagcaggctaagagaggttgtctacttgttagacagtcatttttcagtgatgatagtcgaaaccttgttgatttaactggtggagttagtggttgtcgtggactccactctagtttccgtactacaattggtggtctttcactaaatatggatgtttcaaccactatggttgtaactcctggaccagttattgattttctcgtcacaaatcaaaatgtaagagacatcagagatattgactggcccagggccaagaaaatgcttaaaaatctcagagttaaagctaagcacaacaacatggagttcaagattattggccttagtgatcaaccatgctctagacagatgttcccaatgaaagttcgaaatggaaacatcgaaattaaatctgttgatatcactgttcaggattattttaaatccaagcaagttgagctaacaatgccttatctgccatgtcttgatgtgggaaaaccaaaacgccctaattatctcccaattgagttatgccacatggtatcacttcaacgttatacaaaggcactgtcttctcaacaaagggcaatgttggttgaaaagtcacgacagaaacctcaagaaagaatgcgagttgttacagatgctgtaaaaagtaatatgtatgatgatgatccaatcttatcttcatgtggtattgaaattgagaaacaacttactcgtgttgacgctcgtgttctctctgcaccagcgctagttgtgggcaacagtgaagattgcatcccaaacaggggtaggtggaactacaataataagaggctattcgatccagtcaagattgagcgttgggccattgttaatttctctgctcgttgtgacatgagccgaatctcaagagaactgataaactgtggacgcagcaaaggcattttcattgaatgtcctcacagtttggtggatgaggacagccagtctaggagatgttcacctgtggaaagggttgaaaagatgtttgaaaaagtcaaagcaagccttcctggtcctccagagtttctcctttgtcttttaccagagaggaagaattgtgatatttacgggccatggaagaagaaaaatcttcatgaaatgggtattgtcactcaatgcattgctccaagtaataagatgaatgatcaatatttcaccaatgttcttctaaaaattaatgctaagcttggtggaatgaactccaaactggcactggaacatcgtcaaatgataccagttgtgactcaaataccaacattaattcttggcatggatgtttcacatggttctccaggtcgagcagatataccatcaattgctgcggttgttggatctagatgctggccattgatatcacggtacagagcatctgtgcgcacccagtctccaaaggtagagatgattgattctctatttaagccactggatgatgggaaggatgatggcataatgagggaacttctactagacttctaccaaaccagtcaacaaagaaagcctaagcagataatcatcttcagggatggtgttagcgagtctcagtttagccaagtactgaacgtagaacttaatcaaattataaaggcatatcagagtatgggacagggggaccttccgaagttcacagtgatcattgctcaaaagaatcaccacacaaaactcttccaagctgattcaccagagaacgttccacctgggactgttgtggactccggcatagttcatccaagacagtatgatttctacatgtgtgctcatgccggaccaattggtacttcaaggccaacccattaccatgtgttgcttgatgagattggcttctctgcagataatctccagaagctagttctttcactttcatatgtgtaccagaggagcaccactgcgatttctgtggtggcacctatctgttatgcccacctcgcagcagctcagatgggccagttcatgaaatttgaagagtttgcagatacgtcgtcagggagtgtcaattcatcatcgccaccatcaataccagaattgccacggctgcatgctgatgtctgcagttccatgttcttctgttgacgtgattttagtttgaccgttgtggggtagggccaattctttgtgaaaggaaccttaccttatatgttggcacacagcaggctaaccgtttttgtgaagaaaccatgtaggtcgttagttgtcgtatatcgcacgcgtgcatctttttggagcggttttcggctccccccacccacaggtggcggttccgttaggtacagtttccagattttaacgatgctaatacagtaaaagcagtttgtacattctacgcagattttgcagggatacgtggttagatgatctttttgttatgcccagaaatacgtgtgcattggggggttatgaaagtgagctaaatttctgtgcctcgcatggcatccaattgtactcggagattgtgtttgtgctcgatacgcttcctgccactgaaatgcgaaaatg

SEQ ID NO: 68666 - DNA, 3172 bp, Zea Mays
cctatcgtgttgcttagggtatatgtgtccgattaaatgtgggacaagctgacaaacccatcgtggtgaagaaatcaagggttttatttggattccagatagtatggctgccaaaatggctggagctgtccaagtgctcaaggatgacactgttaaacgcacacccatggcacgacctagtaacggccgtgaaggaaagcccattaggttgctgtcgaaccacttctcagtgaagcttagaggagttgatgctgttttctaccaatacagtgtctgcatcaaatctgaggatgataaggtggttgatagcaagggtattggccgaaaggtcatagataaactattgcaaacatactgttctgagcttgatgggaaggattttgcatatgatggagagaaatgtctatttactgtgggacctcttccacagaataactttgagttcactgttatcttggaggaaacatcttcaagggctgctggtggaagtccagtgcatgaaagccctactcaagctaacaaaaagcgagtcaagcgatcacatctggcaaaaaagttcagtgtagacataagttatgccgcaaagattcctcttcagtcggttgctttggctcttcgaggaagcgagtcagaacatggtcaagatgttctgagagtccttgacgttgttttaaggcaacagcaggctaagagaggttgtctacttgttagacagtcatttttcagtgatgatagtcgaaaccttgttgatttaactggtggagttagtggttgtcgtggactccactctagtttccgtactacaattggtggtctttcactaaatatggatgtttcaaccactatggttgtaactcctggaccagttattgattttctcgtcacaaatcaaaatgtaagagacatcagagatattgactggcccagggccaagaaaatgcttaaaaatctcagagttaaagctaagcacaacaacatggagttcaagattattggccttagtgatcaaccatgctctagacagatgttcccaatgaaagttcgaaatggaaacatcgaaattaaatctgttgatatcactgttcaggattattttaaatccaagcaagttgagctaacaatgccttatctgccatgtcttgatgtgggaaaaccaaaacgccctaattatctcccaattgagttatgccacatggtatcacttcaacgttatacaaaggcactgtcttctcaacaaagggcaatgttggttgaaaagtcacgacagaaacctcaagaaagaatgcgagttgttacagatgctgtaaaaagtaatatgtatgatgatgatccaatcttatcttcatgtggtattgaaattgagaaacaacttactcgtgttgacgctcgtgttctctctgcaccagcgctagttgtgggcaacagtgaagattgcatcccaaacaggggtaggtggaactacaataataagaggctattcgatccagtcaagattgagcgttgggccattgttaatttctctgctcgttgtgacatgagccgaatctcaagagaactgataaactgtggacgcagcaaaggcattttcattgaatgtcctcacagtttggtggatgaggacagccagtctaggagatgttcacctgtggaaagggttgaaaagatgtttgaaaaagtcaaagcaagccttcctggtcctccagagtttctcctttgtcttttaccagagaggaagaattgtgatatttacgggccatggaagaagaaaaatcttcatgaaatgggtattgtcactcaatgcattgctccaagtaataagatgaatgatcaatatttcaccaatgttcttctaaaaattaatgctaagcttggtggaatgaactccaaactggcactggaacatcgtcaaatgataccagttgtgactcaaataccaacattaattcttggcatggatgtttcacatggttctccaggtcgagcagatataccatcaattgctgcggttgttggatctagatgctggccattgatatcacggtacagagcatctgtgcgcacccagtctccaaaggtagagatgattgattctctatttaagccactggatgatgggaaggatgatggcataatgagggaacttctactagacttctaccaaaccagtcaacaaagaaagcctaagcagataatcatcttcagggatggtgttagcgagtctcagtttagccaagtactgaacgtagaacttaatcaaattataaaggcatatcagagtatgggacagggggaccttccgaagttcacagtgatcattgctcaaaagaatcaccacacaaaactcttccaagctgattcaccagagaacgttccacctgggactgttgtggactccggcatagttcatccaagacagtatgatttctacatgtgtgctcatgccggaccaattggtacttcaaggccaacccattaccatgtgttgcttgatgagattggcttctctgcagataatctccagaagctagttctttcactttcatatgtgtaccagaggagcaccactgcgatttctgtggtggcacctatctgttatgcccacctcgcagcagctcagatgggccagttcatgaaatttgaagagtttgcagatacgtcgtcagggagtgtcaattcatcatcgccaccatcaataccagaattgccacggctgcatgctgatgtctgcagttccatgttcttctgttgacgtgattttagtttgaccgttgtggggtagggccaattctttgtgaaaggaaccttaccttatatgttggcacacagcaggctaaccgtttttgtgaagaaaccatgtaggtcgttagttgtcgtatatcgcacgcgtgcatctttttggagcggttttcggctccccccacccacaggtggcggttccgttaggtacagtttccagattttaacgatgctaatacagtaaaagcagtttgtacattctacgcagattttgcagggatacgtggttagatgatctttttgttatgcccagaaatacgtgtgcattggggggttatgaaagtgagctaaatttctgtgcctcgcatggcatccaattgtactcggagattgtgtttgtgctcgatacgcttcctgccactgaaatgcgaaaatg

SEQ ID NO: 68667 - DNA, 3202 bp, Zea Mays
cttgtttctatttgagctaggtttacattctgattagtggtgtttttaaaattttcctctgcaccttgttagttttttttttgaggaattcactccattccaaattttaagacgttcttcctttccagatagtatggctgccaaaatggctggagctgtccaagtgctcaaggatgacactgttaaacgcacacccatggcacgacctagtaacggccgtgaaggaaagcccattaggttgctgtcgaaccacttctcagtgaagcttagaggagttgatgctgttttctaccaatacagtgtctgcatcaaatctgaggatgataaggtggttgatagcaagggtattggccgaaaggtcatagataaactattgcaaacatactgttctgagcttgatgggaaggattttgcatatgatggagagaaatgtctatttactgtgggacctcttccacagaataactttgagttcactgttatcttggaggaaacatcttcaagggctgctggtggaagtccagtgcatgaaagccctactcaagctaacaaaaagcgagtcaagcgatcacatctggcaaaaaagttcagtgtagacataagttatgccgcaaagattcctcttcagtcggttgctttggctcttcgaggaagcgagtcagaacatggtcaagatgttctgagagtccttgacgttgttttaaggcaacagcaggctaagagaggttgtctacttgttagacagtcatttttcagtgatgatagtcgaaaccttgttgatttaactggtggagttagtggttgtcgtggactccactctagtttccgtactacaattggtggtctttcactaaatatggatgtttcaaccactatggttgtaactcctggaccagttattgattttctcgtcacaaatcaaaatgtaagagacatcagagatattgactggcccagggccaagaaaatgcttaaaaatctcagagttaaagctaagcacaacaacatggagttcaagattattggccttagtgatcaaccatgctctagacagatgttcccaatgaaagttcgaaatggaaacatcgaaattaaatctgttgatatcactgttcaggattattttaaatccaagcaagttgagctaacaatgccttatctgccatgtcttgatgtgggaaaaccaaaacgccctaattatctcccaattgagttatgccacatggtatcacttcaacgttatacaaaggcactgtcttctcaacaaagggcaatgttggttgaaaagtcacgacagaaacctcaagaaagaatgcgagttgttacagatgctgtaaaaagtaatatgtatgatgatgatccaatcttatcttcatgtggtattgaaattgagaaacaacttactcgtgttgacgctcgtgttctctctgcaccagcgctagttgtgggcaacagtgaagattgcatcccaaacaggggtaggtggaactacaataataagaggctattcgatccagtcaagattgagcgttgggccattgttaatttctctgctcgttgtgacatgagccgaatctcaagagaactgataaactgtggacgcagcaaaggcattttcattgaatgtcctcacagtttggtggatgaggacagccagtctaggagatgttcacctgtggaaagggttgaaaagatgtttgaaaaagtcaaagcaagccttcctggtcctccagagtttctcctttgtcttttaccagagaggaagaattgtgatatttacgggccatggaagaagaaaaatcttcatgaaatgggtattgtcactcaatgcattgctccaagtaataagatgaatgatcaatatttcaccaatgttcttctaaaaattaatgctaagcttggtggaatgaactccaaactggcactggaacatcgtcaaatgataccagttgtgactcaaataccaacattaattcttggcatggatgtttcacatggttctccaggtcgagcagatataccatcaattgctgcggttgttggatctagatgctggccattgatatcacggtacagagcatctgtgcgcacccagtctccaaaggtagagatgattgattctctatttaagccactggatgatgggaaggatgatggcataatgagggaacttctactagacttctaccaaaccagtcaacaaagaaagcctaagcagataatcatcttcagggatggtgttagcgagtctcagtttagccaagtactgaacgtagaacttaatcaaattataaaggcatatcagagtatgggacagggggaccttccgaagttcacagtgatcattgctcaaaagaatcaccacacaaaactcttccaagctgattcaccagagaacgttccacctgggactgttgtggactccggcatagttcatccaagacagtatgatttctacatgtgtgctcatgccggaccaattggtacttcaaggccaacccattaccatgtgttgcttgatgagattggcttctctgcagataatctccagaagctagttctttcactttcatatgtgtaccagaggagcaccactgcgatttctgtggtggcacctatctgttatgcccacctcgcagcagctcagatgggccagttcatgaaatttgaagagtttgcagatacgtcgtcagggagtgtcaattcatcatcgccaccatcaataccagaattgccacggctgcatgctgatgtctgcagttccatgttcttctgttgacgtgattttagtttgaccgttgtggggtagggccaattctttgtgaaaggaaccttaccttatatgttggcacacagcaggctaaccgtttttgtgaagaaaccatgtaggtcgttagttgtcgtatatcgcacgcgtgcatctttttggagcggttttcggctccccccacccacaggtggcggttccgttaggtacagtttccagattttaacgatgctaatacagtaaaagcagtttgtacattctacgcagattttgcagggatacgtggttagatgatctttttgttatgcccagaaatacgtgtgcattggggggttatgaaagtgagctaaatttctgtgcctcgcatggcatccaattgtactcggagattgtgtttgtgctcgatacgcttcctgccactgaaatgcgaaaatg

SEQ ID NO: 68668 - DNA, 3475 bp, Zea Mays
ctcgtttttgctctataatttctctaccctgtcactctgggattctgtttctgtttctgcgttgatcatgacctccaattgcaatgattgaatggttcgcttcgtctgtgtttggaaatcagtgtaacattcggctcctgcttccattgtttctgtttccgaaattatagttctgacttctgagatatatgacacgaggaagtcactctcgcatatatctggccactgaggatagtgttaagtgttatgtcaagtacttgtttctatttgagctaggtttacattctgattagtggtgtttttaaaattttcctctgcaccttgttagttttttttttgaggaattcactccattccaaattttaagacgttcttcctttccagttttatttggattccagatagtatggctgccaaaatggctggagctgtccaagtgctcaaggatgacactgttaaacgcacacccatggcacgacctagtaacggccgtgaaggaaagcccattaggttgctgtcgaaccacttctcagtgaagcttagaggagttgatgctgttttctaccaatacagtgtctgcatcaaatctgaggatgataaggtggttgatagcaagggtattggccgaaaggtcatagataaactattgcaaacatactgttctgagcttgatgggaaggattttgcatatgatggagagaaatgtctatttactgtgggacctcttccacagaataactttgagttcactgttatcttggaggaaacatcttcaagggctgctggtggaagtccagtgcatgaaagccctactcaagctaacaaaaagcgagtcaagcgatcacatctggcaaaaaagttcagtgtagacataagttatgccgcaaagattcctcttcagtcggttgctttggctcttcgaggaagcgagtcagaacatggtcaagatgttctgagagtccttgacgttgttttaaggcaacagcaggctaagagaggttgtctacttgttagacagtcatttttcagtgatgatagtcgaaaccttgttgatttaactggtggagttagtggttgtcgtggactccactctagtttccgtactacaattggtggtctttcactaaatatggatgtttcaaccactatggttgtaactcctggaccagttattgattttctcgtcacaaatcaaaatgtaagagacatcagagatattgactggcccagggccaagaaaatgcttaaaaatctcagagttaaagctaagcacaacaacatggagttcaagattattggccttagtgatcaaccatgctctagacagatgttcccaatgaaagttcgaaatggaaacatcgaaattaaatctgttgatatcactgttcaggattattttaaatccaagcaagttgagctaacaatgccttatctgccatgtcttgatgtgggaaaaccaaaacgccctaattatctcccaattgagttatgccacatggtatcacttcaacgttatacaaaggcactgtcttctcaacaaagggcaatgttggttgaaaagtcacgacagaaacctcaagaaagaatgcgagttgttacagatgctgtaaaaagtaatatgtatgatgatgatccaatcttatcttcatgtggtattgaaattgagaaacaacttactcgtgttgacgctcgtgttctctctgcaccagcgctagttgtgggcaacagtgaagattgcatcccaaacaggggtaggtggaactacaataataagaggctattcgatccagtcaagattgagcgttgggccattgttaatttctctgctcgttgtgacatgagccgaatctcaagagaactgataaactgtggacgcagcaaaggcattttcattgaatgtcctcacagtttggtggatgaggacagccagtctaggagatgttcacctgtggaaagggttgaaaagatgtttgaaaaagtcaaagcaagccttcctggtcctccagagtttctcctttgtcttttaccagagaggaagaattgtgatatttacgggccatggaagaagaaaaatcttcatgaaatgggtattgtcactcaatgcattgctccaagtaataagatgaatgatcaatatttcaccaatgttcttctaaaaattaatgctaagcttggtggaatgaactccaaactggcactggaacatcgtcaaatgataccagttgtgactcaaataccaacattaattcttggcatggatgtttcacatggttctccaggtcgagcagatataccatcaattgctgcggttgttggatctagatgctggccattgatatcacggtacagagcatctgtgcgcacccagtctccaaaggtagagatgattgattctctatttaagccactggatgatgggaaggatgatggcataatgagggaacttctactagacttctaccaaaccagtcaacaaagaaagcctaagcagataatcatcttcagggatggtgttagcgagtctcagtttagccaagtactgaacgtagaacttaatcaaattataaaggcatatcagagtatgggacagggggaccttccgaagttcacagtgatcattgctcaaaagaatcaccacacaaaactcttccaagctgattcaccagagaacgttccacctgggactgttgtggactccggcatagttcatccaagacagtatgatttctacatgtgtgctcatgccggaccaattggtacttcaaggccaacccattaccatgtgttgcttgatgagattggcttctctgcagataatctccagaagctagttctttcactttcatatgtgtaccagaggagcaccactgcgatttctgtggtggcacctatctgttatgcccacctcgcagcagctcagatgggccagttcatgaaatttgaagagtttgcagatacgtcgtcagggagtgtcaattcatcatcgccaccatcaataccagaattgccacggctgcatgctgatgtctgcagttccatgttcttctgttgacgtgattttagtttgaccgttgtggggtagggccaattctttgtgaaaggaaccttaccttatatgttggcacacagcaggctaaccgtttttgtgaagaaaccatgtaggtcgttagttgtcgtatatcgcacgcgtgcatctttttggagcggttttcggctccccccacccacaggtggcggttccgttaggtacagtttccagattttaacgatgctaatacagtaaaagcagtttgtacattctacgcagattttgcagggatacgtggttagatgatctttttgttatgcccagaaatacgtgtgcattggggggttatgaaagtgagctaaatttctgtgcctcgcatggcatccaattgtactcggagattgtgtttgtgctcgatacgcttcctgccactgaaatgcgaaaatg

SEQ ID NO: 68669 - DNA, 3363 bp, Zea Mays
cgaactgctggaccggagatggcctaaacatagggtttagaccgttgccgtccctactcccgcctagccgaccccactcgtcccagtcccagtcccagtccgccgcctggttccttcttgctcttccctccactctctacagacgcagattgacaaggaagagagagagaggccgaggggaggaggcgtcgtcgtcttcttctgaatgcctgaacatagtatggctgccaaaatggctggagctgtccaagtgctcaaggatgacactgttaaacgcacacccatggcacgacctagtaacggccgtgaaggaaagcccattaggttgctgtcgaaccacttctcagtgaagcttagaggagttgatgctgttttctaccaatacagtgtctgcatcaaatctgaggatgataaggtggttgatagcaagggtattggccgaaaggtcatagataaactattgcaaacatactgttctgagcttgatgggaaggattttgcatatgatggagagaaatgtctatttactgtgggacctcttccacagaataactttgagttcactgttatcttggaggaaacatcttcaagggctgctggtggaagtccagtgcatgaaagccctactcaagctaacaaaaagcgagtcaagcgatcacatctggcaaaaaagttcagtgtagacataagttatgccgcaaagattcctcttcagtcggttgctttggctcttcgaggaagcgagtcagaacatggtcaagatgttctgagagtccttgacgttgttttaaggcaacagcaggctaagagaggttgtctacttgttagacagtcatttttcagtgatgatagtcgaaaccttgttgatttaactggtggagttagtggttgtcgtggactccactctagtttccgtactacaattggtggtctttcactaaatatggatgtttcaaccactatggttgtaactcctggaccagttattgattttctcgtcacaaatcaaaatgtaagagacatcagagatattgactggcccagggccaagaaaatgcttaaaaatctcagagttaaagctaagcacaacaacatggagttcaagattattggccttagtgatcaaccatgctctagacagatgttcccaatgaaagttcgaaatggaaacatcgaaattaaatctgttgatatcactgttcaggattattttaaatccaagcaagttgagctaacaatgccttatctgccatgtcttgatgtgggaaaaccaaaacgccctaattatctcccaattgagttatgccacatggtatcacttcaacgttatacaaaggcactgtcttctcaacaaagggcaatgttggttgaaaagtcacgacagaaacctcaagaaagaatgcgagttgttacagatgctgtaaaaagtaatatgtatgatgatgatccaatcttatcttcatgtggtattgaaattgagaaacaacttactcgtgttgacgctcgtgttctctctgcaccagcgctagttgtgggcaacagtgaagattgcatcccaaacaggggtaggtggaactacaataataagaggctattcgatccagtcaagattgagcgttgggccattgttaatttctctgctcgttgtgacatgagccgaatctcaagagaactgataaactgtggacgcagcaaaggcatttttggtggatgaggacagccagtctaggagatgttcacctgtggaaagggttgaaaagatgtttgaaaaagtcaaagcaagccttcctggtcctccagagtttctcctttgtcttttaccagagaggaagaattgtgatatttacgggccatggaagaagaaaaatcttcatgaaatgggtattgtcactcaatgcattgctccaagtaataagatgaatgatcaatatttcaccaatgttcttctaaaaattaatgctaagcttggtggaatgaactccaaactggcactggaacatcgtcaaatgataccagttgtgactcaaataccaacattaattcttggcatggatgtttcacatggttctccaggtcgagcagatataccatcaattgctgcgtctcatagtttaaatgaacagcaagcacaataagttgcactatatctagggaacaccaacatgaatgttatggcgaatgcgccgaagtgttgcggttgttggatctagatgctggccattgatatcacggtacagagcatctgtgcgcacccagtctccaaaggtagagatgattgattctctatttaagccactggatgatgggaaggatgatggcataatgagggaacttctactagacttctaccaaaccagtcaacaaagaaagcctaagcagataatcatcttcagggatggtgttagcgagtctcagtttagccaagtactgaacgtagaacttaatcaaattataaaggcatatcagagtatgggacagggggaccttccgaagttcacagtgatcattgctcaaaagaatcaccacacaaaactcttccaagctgattcaccagagaacgttccacctgggactgttgtggactccggcatagttcatccaagacagtatgatttctacatgtgtgctcatgccggaccaattggtacttcaaggccaacccattaccatgtgttgcttgatgagattggcttctctgcagataatctccagaagctagttctttcactttcatatgtgtaccagaggagcaccactgcgatttctgtggtggcacctatctgttatgcccacctcgcagcagctcagatgggccagttcatgaaatttgaagagtttgcagatacgtcgtcagggagtgtcaattcatcatcgccaccatcaataccagaattgccacggctgcatgctgatgtctgcagttccatgttcttctgttgacgtgattttagtttgaccgttgtggggtagggccaattctttgtgaaaggaaccttaccttatatgttggcacacagcaggctaaccgtttttgtgaagaaaccatgtaggtcgttagttgtcgtatatcgcacgcgtgcatctttttggagcggttttcggctccccccacccacaggtggcggttccgttaggtacagtttccagattttaacgatgctaatacagtaaaagcagtttgtacattctacgcagattttgcagggatacgtggttagatgatctttttgttatgcccagaaatacgtgtgcattggggggttatgaaagtgagctaaatttctgtgcctcgcatggcatccaattgtactcggagattgtgtttgtgctcgatacgcttcctgccactgaaatgcgaaaatg

SEQ ID NO: 68670 - DNA, 3285 bp, Zea Mays
cgaactgctggaccggagatggcctaaacatagggtttagaccgttgccgtccctactcccgcctagccgaccccactcgtcccagtcccagtcccagtccgccgcctggttccttcttgctcttccctccactctctacagacgcagattgacaaggaagagagagagaggccgaggggaggaggcgtcgtcgtcttcttctgaatgcctgaactatggctgccaaaatggctggagctgtccaagtgctcaaggatgacactgttaaacgcacacccatggcacgacctagtaacggccgtgaaggaaagcccattaggttgctgtcgaaccacttctcagtgaagcttagaggagttgatgctgttttctaccaatacagtgtctgcatcaaatctgaggatgataaggtggttgatagcaagggtattggccgaaaggtcatagataaactattgcaaacatactgttctgagcttgatgggaaggattttgcatatgatggagagaaatgtctatttactgtgggacctcttccacagaataactttgagttcactgttatcttggaggaaacatcttcaagggctgctggtggaagtccagtgcatgaaagccctactcaagctaacaaaaagcgagtcaagcgatcacatctggcaaaaaagttcagtgtagacataagttatgccgcaaagattcctcttcagtcggttgctttggctcttcgaggaagcgagtcagaacatggtcaagatgttctgagagtccttgacgttgttttaaggcaacagcaggctaagagaggttgtctacttgttagacagtcatttttcagtgatgatagtcgaaaccttgttgatttaactggtggagttagtggttgtcgtggactccactctagtttccgtactacaattggtggtctttcactaaatatggatgtttcaaccactatggttgtaactcctggaccagttattgattttctcgtcacaaatcaaaatgtaagagacatcagagatattgactggcccagggccaagaaaatgcttaaaaatctcagagttaaagctaagcacaacaacatggagttcaagattattggccttagtgatcaaccatgctctagacagatgttcccaatgaaagttcgaaatggaaacatcgaaattaaatctgttgatatcactgttcaggattattttaaatccaagcaagttgagctaacaatgccttatctgccatgtcttgatgtgggaaaaccaaaacgccctaattatctcccaattgagttatgccacatggtatcacttcaacgttatacaaaggcactgtcttctcaacaaagggcaatgttggttgaaaagtcacgacagaaacctcaagaaagaatgcgagttgttacagatgctgtaaaaagtaatatgtatgatgatgatccaatcttatcttcatgtggtattgaaattgagaaacaacttactcgtgttgacgctcgtgttctctctgcaccagcgctagttgtgggcaacagtgaagattgcatcccaaacaggggtaggtggaactacaataataagaggctattcgatccagtcaagattgagcgttgggccattgttaatttctctgctcgttgtgacatgagccgaatctcaagagaactgataaactgtggacgcagcaaaggcattttcattgaatgtcctcacagtttggtggatgaggacagccagtctaggagatgttcacctgtggaaagggttgaaaagatgtttgaaaaagtcaaagcaagccttcctggtcctccagagtttctcctttgtcttttaccagagaggaagaattgtgatatttacgggccatggaagaagaaaaatcttcatgaaatgggtattgtcactcaatgcattgctccaagtaataagatgaatgatcaatatttcaccaatgttcttctaaaaattaatgctaagcttggtggaatgaactccaaactggcactggaacatcgtcaaatgataccagttgtgactcaaataccaacattaattcttggcatggatgtttcacatggttctccaggtcgagcagatataccatcaattgctgcggttgttggatctagatgctggccattgatatcacggtacagagcatctgtgcgcacccagtctccaaaggtagagatgattgattctctatttaagccactggatgatgggaaggatgatggcataatgagggaacttctactagacttctaccaaaccagtcaacaaagaaagcctaagcagataatcatcttcagggatggtgttagcgagtctcagtttagccaagtactgaacgtagaacttaatcaaattataaaggcatatcagagtatgggacagggggaccttccgaagttcacagtgatcattgctcaaaagaatcaccacacaaaactcttccaagctgattcaccagagaacgttccacctgggactgttgtggactccggcatagttcatccaagacagtatgatttctacatgtgtgctcatgccggaccaattggtacttcaaggccaacccattaccatgtgttgcttgatgagattggcttctctgcagataatctccagaagctagttctttcactttcatatgtgtaccagaggagcaccactgcgatttctgtggtggcacctatctgttatgcccacctcgcagcagctcagatgggccagttcatgaaatttgaagagtttgcagatacgtcgtcagggagtgtcaattcatcatcgccaccatcaataccagaattgccacggctgcatgctgatgtctgcagttccatgttcttctgttgacgtgattttagtttgaccgttgtggggtagggccaattctttgtgaaaggaaccttaccttatatgttggcacacagcaggctaaccgtttttgtgaagaaaccatgtaggtcgttagttgtcgtatatcgcacgcgtgcatctttttggagcggttttcggctccccccacccacaggtggcggttccgttaggtacagtttccagattttaacgatgctaatacagtaaaagcagtttgtacattctacgcagattttgcagggatacgtggttagatgatctttttgttatgcccagaaatacgtgtgcattggggggttatgaaagtgagctaaatttctgtgcctcgcatggcatccaattgtactcggagattgtgtttgtgctcgatacgcttcctgccactgaaatgcgaaaatg

SEQ ID NO: 68671 - DNA, 3400 bp, Zea Mays
cgaactgctggaccggagatggcctaaacatagggtttagaccgttgccgtccctactcccgcctagccgaccccactcgtcccagtcccagtcccagtccgccgcctggttccttcttgctcttccctccactctctacagacgcagattgacaaggaagagagagagaggccgaggggaggaggcgtcgtcgtcttcttctgaatgcctgaacttttatttggattccagatagtatggctgccaaaatggctggagctgtccaagtgctcaaggatgacactgttaaacgcacacccatggcacgacctagtaacggccgtgaaggaaagcccattaggttgctgtcgaaccacttctcagtgaagcttagaggagttgatgctgttttctaccaatacagtgtctgcatcaaatctgaggatgataaggtggttgatagcaagggtattggccgaaaggtcatagataaactattgcaaacatactgttctgagcttgatgggaaggattttgcatatgatggagagaaatgtctatttactgtgggacctcttccacagaataactttgagttcactgttatcttggaggaaacatcttcaagggctgctggtggaagtccagtgcatgaaagccctactcaagctaacaaaaagcgagtcaagcgatcacatctggcaaaaaagttcagtgtagacataagttatgccgcaaagattcctcttcagtcggttgctttggctcttcgaggaagcgagtcagaacatggtcaagatgttctgagagtccttgacgttgttttaaggcaacagcaggctaagagaggttgtctacttgttagacagtcatttttcagtgatgatagtcgaaaccttgttgatttaactggtggagttagtggttgtcgtggactccactctagtttccgtactacaattggtggtctttcactaaatatggatgtttcaaccactatggttgtaactcctggaccagttattgattttctcgtcacaaatcaaaatgtaagagacatcagagatattgactggcccagggccaagaaaatgcttaaaaatctcagagttaaagctaagcacaacaacatggagttcaagattattggccttagtgatcaaccatgctctagacagatgttcccaatgaaagttcgaaatggaaacatcgaaattaaatctgttgatatcactgttcaggattattttaaatccaagcaagttgagctaacaatgccttatctgccatgtcttgatgtgggaaaaccaaaacgccctaattatctcccaattgagttatgccacatggtatcacttcaacgttatacaaaggcactgtcttctcaacaaagggcaatgttggttgaaaagtcacgacagaaacctcaagaaagaatgcgagttgttacagatgctgtaaaaagtaatatgtatgatgatgatccaatcttatcttcatgtggtattgaaattgagaaacaacttactcgtgttgacgctcgtgttctctctgcaccagcgctagttgtgggcaacagtgaagattgcatcccaaacaggggtaggtggaactacaataataagaggctattcgatccagtcaagattgagcgttgggccattgttaatttctctgctcgttgtgacatgagccgaatctcaagagaactgataaactgtggacgcagcaaaggcattttcattgaatgtcctcacagtttggtggatgaggacagccagtctaggagatgttcacctgtggaaagggttgaaaagatgtttgaaaaagtcaaagcaagccttcctggtcctccagagtttctcctttgtcttttaccagagaggaagaattgtgatatttacgggccatggaagaagaaaaatcttcatgaaatgggtattgtcactcaatgcattgctccaagtaataagatgaatgatcaatatttcaccaatgttcttctaaaaattaatgctaagcttggtggaatgaactccaaactggcactggaacatcgtcaaatgataccagttgtgactcaaataccaacattaattcttggcatggatgtttcacatggttctccaggtcgagcagatataccatcaattgctgcgtctcatagtttaaatgaacagcaagcacaataagttgcactatatctagggaacaccaacatgaatgttatggcgaatgcgccgaagtgttgcggttgttggatctagatgctggccattgatatcacggtacagagcatctgtgcgcacccagtctccaaaggtagagatgattgattctctatttaagccactggatgatgggaaggatgatggcataatgagggaacttctactagacttctaccaaaccagtcaacaaagaaagcctaagcagataatcatcttcagggatggtgttagcgagtctcagtttagccaagtactgaacgtagaacttaatcaaattataaaggcatatcagagtatgggacagggggaccttccgaagttcacagtgatcattgctcaaaagaatcaccacacaaaactcttccaagctgattcaccagagaacgttccacctgggactgttgtggactccggcatagttcatccaagacagtatgatttctacatgtgtgctcatgccggaccaattggtacttcaaggccaacccattaccatgtgttgcttgatgagattggcttctctgcagataatctccagaagctagttctttcactttcatatgtgtaccagaggagcaccactgcgatttctgtggtggcacctatctgttatgcccacctcgcagcagctcagatgggccagttcatgaaatttgaagagtttgcagatacgtcgtcagggagtgtcaattcatcatcgccaccatcaataccagaattgccacggctgcatgctgatgtctgcagttccatgttcttctgttgacgtgattttagtttgaccgttgtggggtagggccaattctttgtgaaaggaaccttaccttatatgttggcacacagcaggctaaccgtttttgtgaagaaaccatgtaggtcgttagttgtcgtatatcgcacgcgtgcatctttttggagcggttttcggctccccccacccacaggtggcggttccgttaggtacagtttccagattttaacgatgctaatacagtaaaagcagtttgtacattctacgcagattttgcagggatacgtggttagatgatctttttgttatgcccagaaatacgtgtgcattggggggttatgaaagtgagctaaatttctgtgcctcgcatggcatccaattgtactcggagattgtgtttgtgctcgatacgcttcctgccactgaaatgcgaaaatg

SEQ ID NO: 68672 - DNA, 3225 bp, Zea Mays
cgaactgctggaccggagatggcctaaacatagggtttagaccgttgccgtccctactcccgcctagccgaccccactcgtcccagtcccagtcccagtccgccgcctggttccttcttgctcttccctccactctctacagacgcagattgacaaggaagagagagagaggccgaggggaggaggcgtcgtcgtcttcttctgaatgcctgaacatagtatggctgccaaaatggctggagctgtccaagtgctcaaggatgacactgttaaacgcacacccatggcacgacctagtaacggccgtgaaggaaagcccattaggttgctgtcgaaccacttctcagtgaagcttagaggagttgatgctgttttctaccaatacagtgtctgcatcaaatctgaggatgataaggtggttgatagcaagggtattggccgaaaggtcatagataaactattgcaaacatactgttctgagcttgatgggaaggattttgcatatgatggagagaaatgtctatttactgtgggacctcttccacagaataactttgagttcactgttatcttggaggaaacatcttcaagggctgctggtggaagtccagtgcatgaaagccctactcaagctaacaaaaagcgagtcaagcgatcacatctggcaaaaaagttcagtgtagacataagttatgccgcaaagattcctcttcagtcggttgctttggctcttcgaggaagcgagtcagaacatggtcaagatgttctgagagtccttgacgttgttttaaggcaacagcaggctaagagaggttgtctacttgttagacagtcatttttcagtgatgatagtcgaaaccttgttgatttaactggtggagttagtggttgtcgtggactccactctagtttccgtactacaattggtggtctttcactaaatatggatgtttcaaccactatggttgtaactcctggaccagttattgattttctcgtcacaaatcaaaatgtaagagacatcagagatattgactggcccagggccaagaaaatgcttaaaaatctcagagttaaagctaagcacaacaacatggagttcaagattattggccttagtgatcaaccatgctctagacagatgttcccaatgaaagttcgaaatggaaacatcgaaattaaatctgttgatatcactgttcaggattattttaaatccaagcaagttgagctaacaatgccttatctgccatgtcttgatgtgggaaaaccaaaacgccctaattatctcccaattgagttatgccacatggtatcacttcaacgttatacaaaggcactgtcttctcaacaaagggcaatgttggttgaaaagtcacgacagaaacctcaagaaagaatgcgagttgttacagatgctgtaaaaagtaatatgtatgatgatgatccaatcttatcttcatgtggtattgaaattgagaaacaacttactcgtgttgacgctcgtgttctctctgcaccagcgctagttgtgggcaacagtgaagattgcatcccaaacaggggtaggtggaactacaataataagaggctattcgatccagtcaagattgagcgttgggccattgttaatttctctgctcgttgtgacatgagccgaatctcaagagaactgataaactgtggacgcagcaaaggcattttcattgaatgtcctcacagtttggtggatgaggacagccagtctaggagatgttcacctgtggaaagggttgaaaagatgtttgaaaaagtcaaagcaagccttcctggtcctccagagtttctcctttgtcttttaccagagaggaagaattgtgatatttacgggccatggaagaagaaaaatcttcatgaaatgggtattgtcactcaatgcattgctccaagtaataagatgaatgatcaatatttcaccaatgttcttctaaaaattaatgctaagcttggtggaatgaactccaaactggcactggaacatcgtcaaatgataccagttgtgactcaaataccaacattaattcttggcatggatgtttcacatggttctccaggtcgagcagatataccatcaattgctgcggttgttggatctagatgctggccattgatatcacggtacagagcatctgtgcgcacccagtctccaaaggtagagatgattgattctctatttaagccactggatgatgggaaggatgatggcataatgagggaacttctactagacttctaccaaaccagtcaacaaagaaagcctaagcagataatcatcttcaggcatatcagagtatgggacagggggaccttccgaagttcacagtgatcattgctcaaaagaatcaccacacaaaactcttccaagctgattcaccagagaacgttccacctgggactgttgtggactccggcatagttcatccaagacagtatgatttctacatgtgtgctcatgccggaccaattggtacttcaaggccaacccattaccatgtgttgcttgatgagattggcttctctgcagataatctccagaagctagttctttcactttcatatgtgtaccagaggagcaccactgcgatttctgtggtggcacctatctgttatgcccacctcgcagcagctcagatgggccagttcatgaaatttgaagagtttgcagatacgtcgtcagggagtgtcaattcatcatcgccaccatcaataccagaattgccacggctgcatgctgatgtctgcagttccatgttcttctgttgacgtgattttagtttgaccgttgtggggtagggccaattctttgtgaaaggaaccttaccttatatgttggcacacagcaggctaaccgtttttgtgaagaaaccatgtaggtcgttagttgtcgtatatcgcacgcgtgcatctttttggagcggttttcggctccccccacccacaggtggcggttccgttaggtacagtttccagattttaacgatgctaatacagtaaaagcagtttgtacattctacgcagattttgcagggatacgtggttagatgatctttttgttatgcccagaaatacgtgtgcattggggggttatgaaagtgagctaaatttctgtgcctcgcatggcatccaattgtactcggagattgtgtttgtgctcgatacgcttcctgccactgaaatgcgaaaatg

SEQ ID NO: 68673 - DNA, 3312 bp, Zea Mays
cgaactgctggaccggagatggcctaaacatagggtttagaccgttgccgtccctactcccgcctagccgaccccactcgtcccagtcccagtcccagtccgccgcctggttccttcttgctcttccctccactctctacagacgcagattgacaaggaagagagagagaggccgaggggaggaggcgtcgtcgtcttcttctgaatgcctgaacttttatttggattccagatagtatggctgccaaaatggctggagctgtccaagtgctcaaggatgacactgttaaacgcacacccatggcacgacctagtaacggccgtgaaggaaagcccattaggttgctgtcgaaccacttctcagtgaagcttagaggagttgatgctgttttctaccaatacagtgtctgcatcaaatctgaggatgataaggtggttgatagcaagggtattggccgaaaggtcatagataaactattgcaaacatactgttctgagcttgatgggaaggattttgcatatgatggagagaaatgtctatttactgtgggacctcttccacagaataactttgagttcactgttatcttggaggaaacatcttcaagggctgctggtggaagtccagtgcatgaaagccctactcaagctaacaaaaagcgagtcaagcgatcacatctggcaaaaaagttcagtgtagacataagttatgccgcaaagattcctcttcagtcggttgctttggctcttcgaggaagcgagtcagaacatggtcaagatgttctgagagtccttgacgttgttttaaggcaacagcaggctaagagaggttgtctacttgttagacagtcatttttcagtgatgatagtcgaaaccttgttgatttaactggtggagttagtggttgtcgtggactccactctagtttccgtactacaattggtggtctttcactaaatatggatgtttcaaccactatggttgtaactcctggaccagttattgattttctcgtcacaaatcaaaatgtaagagacatcagagatattgactggcccagggccaagaaaatgcttaaaaatctcagagttaaagctaagcacaacaacatggagttcaagattattggccttagtgatcaaccatgctctagacagatgttcccaatgaaagttcgaaatggaaacatcgaaattaaatctgttgatatcactgttcaggattattttaaatccaagcaagttgagctaacaatgccttatctgccatgtcttgatgtgggaaaaccaaaacgccctaattatctcccaattgagttatgccacatggtatcacttcaacgttatacaaaggcactgtcttctcaacaaagggcaatgttggttgaaaagtcacgacagaaacctcaagaaagaatgcgagttgttacagatgctgtaaaaagtaatatgtatgatgatgatccaatcttatcttcatgtggtattgaaattgagaaacaacttactcgtgttgacgctcgtgttctctctgcaccagcgctagttgtgggcaacagtgaagattgcatcccaaacaggggtaggtggaactacaataataagaggctattcgatccagtcaagattgagcgttgggccattgttaatttctctgctcgttgtgacatgagccgaatctcaagagaactgataaactgtggacgcagcaaaggcattttcattgaatgtcctcacagtttggtggatgaggacagccagtctaggagatgttcacctgtggaaagggttgaaaagatgtttgaaaaagtcaaagcaagccttcctggtcctccagagtttctcctttgtcttttaccagagaggaagaattgtgatatttacgggccatggaagaagaaaaatcttcatgaaatgggtattgtcactcaatgcattgctccaagtaataagatgaatgatcaatatttcaccaatgttcttctaaaaattaatgctaagcttggtggaatgaactccaaactggcactggaacatcgtcaaatgataccagttgtgactcaaataccaacattaattcttggcatggatgtttcacatggttctccaggtcgagcagatataccatcaattgctgcgctgcaggttgttggatctagatgctggccattgatatcacggtacagagcatctgtgcgcacccagtctccaaaggtagagatgattgattctctatttaagccactggatgatgggaaggatgatggcataatgagggaacttctactagacttctaccaaaccagtcaacaaagaaagcctaagcagataatcatcttcagggatggtgttagcgagtctcagtttagccaagtactgaacgtagaacttaatcaaattataaaggcatatcagagtatgggacagggggaccttccgaagttcacagtgatcattgctcaaaagaatcaccacacaaaactcttccaagctgattcaccagagaacgttccacctgggactgttgtggactccggcatagttcatccaagacagtatgatttctacatgtgtgctcatgccggaccaattggtacttcaaggccaacccattaccatgtgttgcttgatgagattggcttctctgcagataatctccagaagctagttctttcactttcatatgtgtaccagaggagcaccactgcgatttctgtggtggcacctatctgttatgcccacctcgcagcagctcagatgggccagttcatgaaatttgaagagtttgcagatacgtcgtcagggagtgtcaattcatcatcgccaccatcaataccagaattgccacggctgcatgctgatgtctgcagttccatgttcttctgttgacgtgattttagtttgaccgttgtggggtagggccaattctttgtgaaaggaaccttaccttatatgttggcacacagcaggctaaccgtttttgtgaagaaaccatgtaggtcgttagttgtcgtatatcgcacgcgtgcatctttttggagcggttttcggctccccccacccacaggtggcggttccgttaggtacagtttccagattttaacgatgctaatacagtaaaagcagtttgtacattctacgcagattttgcagggatacgtggttagatgatctttttgttatgcccagaaatacgtgtgcattggggggttatgaaagtgagctaaatttctgtgcctcgcatggcatccaattgtactcggagattgtgtttgtgctcgatacgcttcctgccactgaaatgcgaaaatg

SEQ ID NO: 68674 - DNA, 3322 bp, Zea Mays
cgaactgctggaccggagatggcctaaacatagggtttagaccgttgccgtccctactcccgcctagccgaccccactcgtcccagtcccagtcccagtccgccgcctggttccttcttgctcttccctccactctctacagacgcagattgacaaggaagagagagagaggccgaggggaggaggcgtcgtcgtcttcttctgaatgcctgaacttttatttggattccagatagtatggctgccaaaatggctggagctgtccaagtgctcaaggatgacactgttaaacgcacacccatggcacgacctagtaacggccgtgaaggaaagcccattaggttgctgtcgaaccacttctcagtgaagcttagaggagttgatgctgttttctaccaatacagtgtctgcatcaaatctgaggatgataaggtggttgatagcaagggtattggccgaaaggtcatagataaactattgcaaacatactgttctgagcttgatgggaaggattttgcatatgatggagagaaatgtctatttactgtgggacctcttccacagaataactttgagttcactgttatcttggaggaaacatcttcaagttcatgtgctattcagggctgctggtggaagtccagtgcatgaaagccctactcaagctaacaaaaagcgagtcaagcgatcacatctggcaaaaaagttcagtgtagacataagttatgccgcaaagattcctcttcagtcggttgctttggctcttcgaggaagcgagtcagaacatggtcaagatgttctgagagtccttgacgttgttttaaggcaacagcaggctaagagaggttgtctacttgttagacagtcatttttcagtgatgatagtcgaaaccttgttgatttaactggtggagttagtggttgtcgtggactccactctagtttccgtactacaattggtggtctttcactaaatatggatgtttcaaccactatggttgtaactcctggaccagttattgattttctcgtcacaaatcaaaatgtaagagacatcagagatattgactggcccagggccaagaaaatgcttaaaaatctcagagttaaagctaagcacaacaacatggagttcaagattattggccttagtgatcaaccatgctctagacagatgttcccaatgaaagttcgaaatggaaacatcgaaattaaatctgttgatatcactgttcaggattattttaaatccaagcaagttgagctaacaatgccttatctgccatgtcttgatgtgggaaaaccaaaacgccctaattatctcccaattgagttatgccacatggtatcacttcaacgttatacaaaggcactgtcttctcaacaaagggcaatgttggttgaaaagtcacgacagaaacctcaagaaagaatgcgagttgttacagatgctgtaaaaagtaatatgtatgatgatgatccaatcttatcttcatgtggtattgaaattgagaaacaacttactcgtgttgacgctcgtgttctctctgcaccagcgctagttgtgggcaacagtgaagattgcatcccaaacaggggtaggtggaactacaataataagaggctattcgatccagtcaagattgagcgttgggccattgttaatttctctgctcgttgtgacatgagccgaatctcaagagaactgataaactgtggacgcagcaaaggcattttcattgaatgtcctcacagtttggtggatgaggacagccagtctaggagatgttcacctgtggaaagggttgaaaagatgtttgaaaaagtcaaagcaagccttcctggtcctccagagtttctcctttgtcttttaccagagaggaagaattgtgatatttacgggccatggaagaagaaaaatcttcatgaaatgggtattgtcactcaatgcattgctccaagtaataagatgaatgatcaatatttcaccaatgttcttctaaaaattaatgctaagcttggtggaatgaactccaaactggcactggaacatcgtcaaatgataccagttgtgactcaaataccaacattaattcttggcatggatgtttcacatggttctccaggtcgagcagatataccatcaattgctgcggttgttggatctagatgctggccattgatatcacggtacagagcatctgtgcgcacccagtctccaaaggtagagatgattgattctctatttaagccactggatgatgggaaggatgatggcataatgagggaacttctactagacttctaccaaaccagtcaacaaagaaagcctaagcagataatcatcttcagggatggtgttagcgagtctcagtttagccaagtactgaacgtagaacttaatcaaattataaaggcatatcagagtatgggacagggggaccttccgaagttcacagtgatcattgctcaaaagaatcaccacacaaaactcttccaagctgattcaccagagaacgttccacctgggactgttgtggactccggcatagttcatccaagacagtatgatttctacatgtgtgctcatgccggaccaattggtacttcaaggccaacccattaccatgtgttgcttgatgagattggcttctctgcagataatctccagaagctagttctttcactttcatatgtgtaccagaggagcaccactgcgatttctgtggtggcacctatctgttatgcccacctcgcagcagctcagatgggccagttcatgaaatttgaagagtttgcagatacgtcgtcagggagtgtcaattcatcatcgccaccatcaataccagaattgccacggctgcatgctgatgtctgcagttccatgttcttctgttgacgtgattttagtttgaccgttgtggggtagggccaattctttgtgaaaggaaccttaccttatatgttggcacacagcaggctaaccgtttttgtgaagaaaccatgtaggtcgttagttgtcgtatatcgcacgcgtgcatctttttggagcggttttcggctccccccacccacaggtggcggttccgttaggtacagtttccagattttaacgatgctaatacagtaaaagcagtttgtacattctacgcagattttgcagggatacgtggttagatgatctttttgttatgcccagaaatacgtgtgcattggggggttatgaaagtgagctaaatttctgtgcctcgcatggcatccaattgtactcggagattgtgtttgtgctcgatacgcttcctgccactgaaatgcgaaaatg

SEQ ID NO: 68675 - DNA, 3273 bp, Zea Mays
cgaactgctggaccggagatggcctaaacatagggtttagaccgttgccgtccctactcccgcctagccgaccccactcgtcccagtcccagtcccagtccgccgcctggttccttcttgctcttccctccactctctacagacgcagattgacaaggaagagagagagaggccgaggggaggaggcgtcgtcgtcttcttctgaatgcctgaacttttatttggattccagatagtatggctgccaaaatggctggagctgtccaagtgctcaaggatgacactgttaaacgcacacccatggcacgacctagtaacggccgtgaaggaaagcccattaggttgctgtcgaaccacttctcagtgaagcttagaggagttgatgctgttttctaccaatacagtgtctgcatcaaatctgaggatgataaggtggttgatagcaagggtattggccgaaaggtcatagataaactattgcaaacatactgttctgagcttgatgggaaggattttgcatatgatggagagaaatgtctatttactgtgggacctcttccacagaataactttgagttcactgttatcttggaggaaacatcttcaagggctgctggtggaagtccagtgcatgaaagccctactcaagctaacaaaaagcgagtcaagcgatcacatctggcaaaaaagttcagtgtagacataagttatgccgcaaagattcctcttcagtcggttgctttggctcttcgaggaagcgagtcagaacatggtcaagatgttctgagagtccttgacgttgttttaaggcaacagcaggctaagagaggttgtctacttgttagacagtcatttttcagtgatgatagtcgaaaccttgttgatttaactggtggagttagtggttgtcgtggactccactctagtttccgtactacaattggtggtctttcactaaatatggatgtttcaaccactatggttgtaactcctggaccagttattgattttctcgtcacaaatcaaaatgccaagaaaatgcttaaaaatctcagagttaaagctaagcacaacaacatggagttcaagattattggccttagtgatcaaccatgctctagacagatgttcccaatgaaagttcgaaatggaaacatcgaaattaaatctgttgatatcactgttcaggattattttaaatccaagcaagttgagctaacaatgccttatctgccatgtcttgatgtgggaaaaccaaaacgccctaattatctcccaattgagttatgccacatggtatcacttcaacgttatacaaaggcactgtcttctcaacaaagggcaatgttggttgaaaagtcacgacagaaacctcaagaaagaatgcgagttgttacagatgctgtaaaaagtaatatgtatgatgatgatccaatcttatcttcatgtggtattgaaattgagaaacaacttactcgtgttgacgctcgtgttctctctgcaccagcgctagttgtgggcaacagtgaagattgcatcccaaacaggggtaggtggaactacaataataagaggctattcgatccagtcaagattgagcgttgggccattgttaatttctctgctcgttgtgacatgagccgaatctcaagagaactgataaactgtggacgcagcaaaggcattttcattgaatgtcctcacagtttggtggatgaggacagccagtctaggagatgttcacctgtggaaagggttgaaaagatgtttgaaaaagtcaaagcaagccttcctggtcctccagagtttctcctttgtcttttaccagagaggaagaattgtgatatttacgggccatggaagaagaaaaatcttcatgaaatgggtattgtcactcaatgcattgctccaagtaataagatgaatgatcaatatttcaccaatgttcttctaaaaattaatgctaagcttggtggaatgaactccaaactggcactggaacatcgtcaaatgataccagttgtgactcaaataccaacattaattcttggcatggatgtttcacatggttctccaggtcgagcagatataccatcaattgctgcggttgttggatctagatgctggccattgatatcacggtacagagcatctgtgcgcacccagtctccaaaggtagagatgattgattctctatttaagccactggatgatgggaaggatgatggcataatgagggaacttctactagacttctaccaaaccagtcaacaaagaaagcctaagcagataatcatcttcagggatggtgttagcgagtctcagtttagccaagtactgaacgtagaacttaatcaaattataaaggcatatcagagtatgggacagggggaccttccgaagttcacagtgatcattgctcaaaagaatcaccacacaaaactcttccaagctgattcaccagagaacgttccacctgggactgttgtggactccggcatagttcatccaagacagtatgatttctacatgtgtgctcatgccggaccaattggtacttcaaggccaacccattaccatgtgttgcttgatgagattggcttctctgcagataatctccagaagctagttctttcactttcatatgtgtaccagaggagcaccactgcgatttctgtggtggcacctatctgttatgcccacctcgcagcagctcagatgggccagttcatgaaatttgaagagtttgcagatacgtcgtcagggagtgtcaattcatcatcgccaccatcaataccagaattgccacggctgcatgctgatgtctgcagttccatgttcttctgttgacgtgattttagtttgaccgttgtggggtagggccaattctttgtgaaaggaaccttaccttatatgttggcacacagcaggctaaccgtttttgtgaagaaaccatgtaggtcgttagttgtcgtatatcgcacgcgtgcatctttttggagcggttttcggctccccccacccacaggtggcggttccgttaggtacagtttccagattttaacgatgctaatacagtaaaagcagtttgtacattctacgcagattttgcagggatacgtggttagatgatctttttgttatgcccagaaatacgtgtgcattggggggttatgaaagtgagctaaatttctgtgcctcgcatggcatccaattgtactcggagattgtgtttgtgctcgatacgcttcctgccactgaaatgcgaaaatg

SEQ ID NO: 68676 - DNA, 3314 bp, Zea Mays
cgaactgctggaccggagatggcctaaacatagggtttagaccgttgccgtccctactcccgcctagccgaccccactcgtcccagtcccagtcccagtccgccgcctggttccttcttgctcttccctccactctctacagacgcagattgacaaggaagagagagagaggccgaggggaggaggcgtcgtcgtcttcttctgaatgcctgaacttttatttggattccagatagtatggctgccaaaatggctggagctgtccaagtgctcaaggatgacactgttaaacgcacacccatggcacgacctagtaacggccgtgaaggaaagcccattaggttgctgtcgaaccacttctcagtgaagcttagaggagttgatgctgttttctaccaatacagtgtctgcatcaaatctgaggatgataaggtggttgatagcaagggtattggccgaaaggtcatagataaactattgcaaacatactgttctgagcttgatgggaaggattttgcatatgatggagagaaatgtctatttactgtgggacctcttccacagaataactttgagttcactgttatcttggaggaaacatcttcaagggctgctggtggaagtccagtgcatgaaagccctactcaagctaacaaaaagcgagtcaagcgatcacatctggcaaaaaagttcagtgtagacataagttatgccgcaaagattcctcttcagtcggttgctttggctcttcgaggaagcgagtcagaacatggtcaagatgttctgagagtccttgacgttgttttaaggcaacagcaggctaagagaggttgtctacttgttagacagtcatttttcagtgatgatagtcgaaaccttgttgatttaactggtggagttagtggttgtcgtggactccactctagtttccgtactacaattggtggtctttcactaaatatggatgtttcaaccactatggttgtaactcctggaccagttattgattttctcgtcacaaatcaaaatgtaagagacatcagagatattgactggcccaggtgatgcaggccaagaaaatgcttaaaaatctcagagttaaagctaagcacaacaacatggagttcaagattattggccttagtgatcaaccatgctctagacagatgttcccaatgaaagttcgaaatggaaacatcgaaattaaatctgttgatatcactgttcaggattattttaaatccaagcaagttgagctaacaatgccttatctgccatgtcttgatgtgggaaaaccaaaacgccctaattatctcccaattgagttatgccacatggtatcacttcaacgttatacaaaggcactgtcttctcaacaaagggcaatgttggttgaaaagtcacgacagaaacctcaagaaagaatgcgagttgttacagatgctgtaaaaagtaatatgtatgatgatgatccaatcttatcttcatgtggtattgaaattgagaaacaacttactcgtgttgacgctcgtgttctctctgcaccagcgctagttgtgggcaacagtgaagattgcatcccaaacaggggtaggtggaactacaataataagaggctattcgatccagtcaagattgagcgttgggccattgttaatttctctgctcgttgtgacatgagccgaatctcaagagaactgataaactgtggacgcagcaaaggcattttcattgaatgtcctcacagtttggtggatgaggacagccagtctaggagatgttcacctgtggaaagggttgaaaagatgtttgaaaaagtcaaagcaagccttcctggtcctccagagtttctcctttgtcttttaccagagaggaagaattgtgatatttacgggccatggaagaagaaaaatcttcatgaaatgggtattgtcactcaatgcattgctccaagtaataagatgaatgatcaatatttcaccaatgttcttctaaaaattaatgctaagcttggtggaatgaactccaaactggcactggaacatcgtcaaatgataccagttgtgactcaaataccaacattaattcttggcatggatgtttcacatggttctccaggtcgagcagatataccatcaattgctgcggttgttggatctagatgctggccattgatatcacggtacagagcatctgtgcgcacccagtctccaaaggtagagatgattgattctctatttaagccactggatgatgggaaggatgatggcataatgagggaacttctactagacttctaccaaaccagtcaacaaagaaagcctaagcagataatcatcttcagggatggtgttagcgagtctcagtttagccaagtactgaacgtagaacttaatcaaattataaaggcatatcagagtatgggacagggggaccttccgaagttcacagtgatcattgctcaaaagaatcaccacacaaaactcttccaagctgattcaccagagaacgttccacctgggactgttgtggactccggcatagttcatccaagacagtatgatttctacatgtgtgctcatgccggaccaattggtacttcaaggccaacccattaccatgtgttgcttgatgagattggcttctctgcagataatctccagaagctagttctttcactttcatatgtgtaccagaggagcaccactgcgatttctgtggtggcacctatctgttatgcccacctcgcagcagctcagatgggccagttcatgaaatttgaagagtttgcagatacgtcgtcagggagtgtcaattcatcatcgccaccatcaataccagaattgccacggctgcatgctgatgtctgcagttccatgttcttctgttgacgtgattttagtttgaccgttgtggggtagggccaattctttgtgaaaggaaccttaccttatatgttggcacacagcaggctaaccgtttttgtgaagaaaccatgtaggtcgttagttgtcgtatatcgcacgcgtgcatctttttggagcggttttcggctccccccacccacaggtggcggttccgttaggtacagtttccagattttaacgatgctaatacagtaaaagcagtttgtacattctacgcagattttgcagggatacgtggttagatgatctttttgttatgcccagaaatacgtgtgcattggggggttatgaaagtgagctaaatttctgtgcctcgcatggcatccaattgtactcggagattgtgtttgtgctcgatacgcttcctgccactgaaatgcgaaaatg

SEQ ID NO: 68677 - DNA, 3283 bp, Zea Mays
cgaactgctggaccggagatggcctaaacatagggtttagaccgttgccgtccctactcccgcctagccgaccccactcgtcccagtcccagtcccagtccgccgcctggttccttcttgctcttccctccactctctacagacgcagattgacaaggaagagagagagaggccgaggggaggaggcgtcgtcgtcttcttctgaatgcctgaacttttatttggattccagatagtatggctgccaaaatggctggagctgtccaagtgctcaaggatgacactgttaaacgcacacccatggcacgacctagtaacggccgtgaaggaaagcccattaggttgctgtcgaaccacttctcagtgaagcttagaggagttgatgctgttttctaccaatacagtgtctgcatcaaatctgaggatgataaggtggttgatagcaagggtattggccgaaaggtcatagataaactattgcaaacatactgttctgagcttgatgggaaggattttgcatatgatggagagaaatgtctatttactgtgggacctcttccacagaataactttgagttcactgttatcttggaggaaacatcttcaagggctgctggtggaagtccagtgcatgaaagccctactcaagctaacaaaaagcgagtcaagcgatcacatctggcaaaaaagttcagtgtagacataagttatgccgcaaagattcctcttcagtcggttgctttggctcttcgaggaagcgagtcagaacatggtcaagatgttctgagagtccttgacgttgttttaaggcaacagcaggctaagagaggttgtctacttgttagacagtcatttttcagtgatgatagtcgaaaccttgttgatttaactggtggagttagtggttgtcgtggactccactctagtttccgtactacaattggtggtctttcactaaatatggatgtttcaaccactatggttgtaactcctggaccagttattgattttctcgtcacaaatcaaaatgtaagagacatcagagatattgactggcccagggccaagaaaatgcttaaaaatctcagagttaaagctaagcacaacaacatggagttcaagattattggccttagtgatcaaccatgctctagacagatgttcccaatgaaagttcgaaatggaaacatcgaaattaaatctgttgatatcactgttcaggattattttaaatccaagcaagttgagctaacaatgccttatctgccatgtcttgatgtgggaaaaccaaaacgccctaattatctcccaattgagttatgccacatggtatcacttcaacgttatacaaaggcactgtcttctcaacaaagggcaatgttggttgaaaagtcacgacagaaacctcaagaaagaatgcgagttgttacagatgctgtaaaaagtaatatgtatgatgatgatccaatcttatcttcatgtggtattgaaattgagaaacaacttactcgtgttgacgctcgtgttctctctgcaccagcgctagttgtgggcaacagtgaagattgcatcccaaacagggaggctattcgatccagtcaagattgagcgttgggccattgttaatttctctgctcgttgtgacatgagccgaatctcaagagaactgataaactgtggacgcagcaaaggcattttcattgaatgtcctcacagtttggtggatgaggacagccagtctaggagatgttcacctgtggaaagggttgaaaagatgtttgaaaaagtcaaagcaagccttcctggtcctccagagtttctcctttgtcttttaccagagaggaagaattgtgatatttacgggccatggaagaagaaaaatcttcatgaaatgggtattgtcactcaatgcattgctccaagtaataagatgaatgatcaatatttcaccaatgttcttctaaaaattaatgctaagcttggtggaatgaactccaaactggcactggaacatcgtcaaatgataccagttgtgactcaaataccaacattaattcttggcatggatgtttcacatggttctccaggtcgagcagatataccatcaattgctgcggttgttggatctagatgctggccattgatatcacggtacagagcatctgtgcgcacccagtctccaaaggtagagatgattgattctctatttaagccactggatgatgggaaggatgatggcataatgagggaacttctactagacttctaccaaaccagtcaacaaagaaagcctaagcagataatcatcttcagggatggtgttagcgagtctcagtttagccaagtactgaacgtagaacttaatcaaattataaaggcatatcagagtatgggacagggggaccttccgaagttcacagtgatcattgctcaaaagaatcaccacacaaaactcttccaagctgattcaccagagaacgttccacctgggactgttgtggactccggcatagttcatccaagacagtatgatttctacatgtgtgctcatgccggaccaattggtacttcaaggccaacccattaccatgtgttgcttgatgagattggcttctctgcagataatctccagaagctagttctttcactttcatatgtgtaccagaggagcaccactgcgatttctgtggtggcacctatctgttatgcccacctcgcagcagctcagatgggccagttcatgaaatttgaagagtttgcagatacgtcgtcagggagtgtcaattcatcatcgccaccatcaataccagaattgccacggctgcatgctgatgtctgcagttccatgttcttctgttgacgtgattttagtttgaccgttgtggggtagggccaattctttgtgaaaggaaccttaccttatatgttggcacacagcaggctaaccgtttttgtgaagaaaccatgtaggtcgttagttgtcgtatatcgcacgcgtgcatctttttggagcggttttcggctccccccacccacaggtggcggttccgttaggtacagtttccagattttaacgatgctaatacagtaaaagcagtttgtacattctacgcagattttgcagggatacgtggttagatgatctttttgttatgcccagaaatacgtgtgcattggggggttatgaaagtgagctaaatttctgtgcctcgcatggcatccaattgtactcggagattgtgtttgtgctcgatacgcttcctgccactgaaatgcgaaaatg

SEQ ID NO: 68678 - DNA, 3266 bp, Zea Mays
cgaactgctggaccggagatggcctaaacatagggtttagaccgttgccgtccctactcccgcctagccgaccccactcgtcccagtcccagtcccagtccgccgcctggttccttcttgctcttccctccactctctacagacgcagattgacaaggaagagagagagaggccgaggggaggaggcgtcgtcgtcttcttctgaatgcctgaacatagtatggctgccaaaatggctggagctgtccaagtgctcaaggatgacactgttaaacgcacacccatggcacgacctagtaacggccgtgaaggaaagcccattaggttgctgtcgaaccacttctcagtgaagcttagaggagttgatgctgttttctaccaatacagtgtctgcatcaaatctgaggatgataaggtggttgatagcaagggtattggccgaaaggtcatagataaactattgcaaacatactgttctgagcttgatgggaaggattttgcatatgatggagagaaatgtctatttactgtgggacctcttccacagaataactttgagttcactgttatcttggaggaaacatcttcaagggctgctggtggaagtccagtgcatgaaagccctactcaagctaacaaaaagcgagtcaagcgatcacatctggcaaaaaagttcagtgtagacataagttatgccgcaaagattcctcttcagtcggttgctttggctcttcgaggaagcgagtcagaacatggtcaagatgttctgagagtccttgacgttgttttaaggcaacagcaggctaagagaggttgtctacttgttagacagtcatttttcagtgatgatagtcgaaaccttgttgatttaactggtggagttagtggttgtcgtggactccactctagtttccgtactacaattggtggtctttcactaaatatggatgtttcaaccactatggttgtaactcctggaccagttattgattttctcgtcacaaatcaaaatgtaagagacatcagagatattgactggcccagggccaagaaaatgcttaaaaatctcagagttaaagctaagcacaacaacatggagttcaagattattggccttagtgatcaaccatgctctagacagatgttcccaatgaaagttcgaaatggaaacatcgaaattaaatctgttgatatcactgttcaggattattttaaatccaagcaagttgagctaacaatgccttatctgccatgtcttgatgtgggaaaaccaaaacgccctaattatctcccaattgagttatgccacatggtatcacttcaacgttatacaaaggcactgtcttctcaacaaagggcaatgttggttgaaaagtcacgacagaaacctcaagaaagaatgcgagttgttacagatgctgtaaaaagtaatatgtatgatgatgatccaatcttatcttcatgtggtattgaaattgagaaacaacttactcgtgttgacgctcgtgttctctctgcaccagcgctagttgtgggcaacagtgaagattgcatcccaaacagggaggctattcgatccagtcaagattgagcgttgggccattgttaatttctctgctcgttgtgacatgagccgaatctcaagagaactgataaactgtggacgcagcaaaggcattttcattgaatgtcctcacagtttggtggatgaggacagccagtctaggagatgttcacctgtggaaagggttgaaaagatgtttgaaaaagtcaaagcaagccttcctggtcctccagagtttctcctttgtcttttaccagagaggaagaattgtgatatttacgggccatggaagaagaaaaatcttcatgaaatgggtattgtcactcaatgcattgctccaagtaataagatgaatgatcaatatttcaccaatgttcttctaaaaattaatgctaagcttggtggaatgaactccaaactggcactggaacatcgtcaaatgataccagttgtgactcaaataccaacattaattcttggcatggatgtttcacatggttctccaggtcgagcagatataccatcaattgctgcggttgttggatctagatgctggccattgatatcacggtacagagcatctgtgcgcacccagtctccaaaggtagagatgattgattctctatttaagccactggatgatgggaaggatgatggcataatgagggaacttctactagacttctaccaaaccagtcaacaaagaaagcctaagcagataatcatcttcagggatggtgttagcgagtctcagtttagccaagtactgaacgtagaacttaatcaaattataaaggcatatcagagtatgggacagggggaccttccgaagttcacagtgatcattgctcaaaagaatcaccacacaaaactcttccaagctgattcaccagagaacgttccacctgggactgttgtggactccggcatagttcatccaagacagtatgatttctacatgtgtgctcatgccggaccaattggtacttcaaggccaacccattaccatgtgttgcttgatgagattggcttctctgcagataatctccagaagctagttctttcactttcatatgtgtaccagaggagcaccactgcgatttctgtggtggcacctatctgttatgcccacctcgcagcagctcagatgggccagttcatgaaatttgaagagtttgcagatacgtcgtcagggagtgtcaattcatcatcgccaccatcaataccagaattgccacggctgcatgctgatgtctgcagttccatgttcttctgttgacgtgattttagtttgaccgttgtggggtagggccaattctttgtgaaaggaaccttaccttatatgttggcacacagcaggctaaccgtttttgtgaagaaaccatgtaggtcgttagttgtcgtatatcgcacgcgtgcatctttttggagcggttttcggctccccccacccacaggtggcggttccgttaggtacagtttccagattttaacgatgctaatacagtaaaagcagtttgtacattctacgcagattttgcagggatacgtggttagatgatctttttgttatgcccagaaatacgtgtgcattggggggttatgaaagtgagctaaatttctgtgcctcgcatggcatccaattgtactcggagattgtgtttgtgctcgatacgcttcctgccactgaaatgcgaaaatg

SEQ ID NO: 68679 - DNA, 3297 bp, Zea Mays
cacttacacgaactgctggaccggagatggcctaaacatagggtttagaccgttgccgtccctactcccgcctagccgaccccactcgtcccagtcccagtcccagtccgccgcctggttccttcttgctcttccctccactctctacagacgcagattgacaaggaagagagagagaggccgaggggaggaggcgtcgtcgtcttcttctgaatgcctgaacatagtatggctgccaaaatggctggagctgtccaagtgctcaaggatgacactgttaaacgcacacccatggcacgacctagtaacggccgtgaaggaaagcccattaggttgctgtcgaaccacttctcagtgaagcttagaggagttgatgctgttttctaccaatacagtgtctgcatcaaatctgaggatgataaggtggttgatagcaagggtattggccgaaaggtcatagataaactattgcaaacatactgttctgagcttgatgggaaggattttgcatatgatggagagaaatgtctatttactgtgggacctcttccacagaataactttgagttcactgttatcttggaggaaacatcttcaagggctgctggtggaagtccagtgcatgaaagccctactcaagctaacaaaaagcgagtcaagcgatcacatctggcaaaaaagttcagtgtagacataagttatgccgcaaagattcctcttcagtcggttgctttggctcttcgaggaagcgagtcagaacatggtcaagatgttctgagagtccttgacgttgttttaaggcaacagcaggctaagagaggttgtctacttgttagacagtcatttttcagtgatgatagtcgaaaccttgttgatttaactggtggagttagtggttgtcgtggactccactctagtttccgtactacaattggtggtctttcactaaatatggatgtttcaaccactatggttgtaactcctggaccagttattgattttctcgtcacaaatcaaaatgtaagagacatcagagatattgactggcccagggccaagaaaatgcttaaaaatctcagagttaaagctaagcacaacaacatggagttcaagattattggccttagtgatcaaccatgctctagacagatgttcccaatgaaagttcgaaatggaaacatcgaaattaaatctgttgatatcactgttcaggattattttaaatccaagcaagttgagctaacaatgccttatctgccatgtcttgatgtgggaaaaccaaaacgccctaattatctcccaattgagttatgccacatggtatcacttcaacgttatacaaaggcactgtcttctcaacaaagggcaatgttggttgaaaagtcacgacagaaacctcaagaaagaatgcgagttgttacagatgctgtaaaaagtaatatgtatgatgatgatccaatcttatcttcatgtggtattgaaattgagaaacaacttactcgtgttgacgctcgtgttctctctgcaccagcgctagttgtgggcaacagtgaagattgcatcccaaacaggggtaggtggaactacaataataagaggctattcgatccagtcaagattgagcgttgggccattgttaatttctctgctcgttgtgacatgagccgaatctcaagagaactgataaactgtggacgcagcaaaggcattttcattgaatgtcctcacagtttggtggatgaggacagccagtctaggagatgttcacctgtggaaagggttgaaaagatgtttgaaaaagtcaaagcaagccttcctggtcctccagagtttctcctttgtcttttaccagagaggaagaattgtgatatttacgggccatggaagaagaaaaatcttcatgaaatgggtattgtcactcaatgcattgctccaagtaataagatgaatgatcaatatttcaccaatgttcttctaaaaattaatgctaagcttggtggaatgaactccaaactggcactggaacatcgtcaaatgataccagttgtgactcaaataccaacattaattcttggcatggatgtttcacatggttctccaggtcgagcagatataccatcaattgctgcggttgttggatctagatgctggccattgatatcacggtacagagcatctgtgcgcacccagtctccaaaggtagagatgattgattctctatttaagccactggatgatgggaaggatgatggcataatgagggaacttctactagacttctaccaaaccagtcaacaaagaaagcctaagcagataatcatcttcagggatggtgttagcgagtctcagtttagccaagtactgaacgtagaacttaatcaaattataaaggcatatcagagtatgggacagggggaccttccgaagttcacagtgatcattgctcaaaagaatcaccacacaaaactcttccaagctgattcaccagagaacgttccacctgggactgttgtggactccggcatagttcatccaagacagtatgatttctacatgtgtgctcatgccggaccaattggtacttcaaggccaacccattaccatgtgttgcttgatgagattggcttctctgcagataatctccagaagctagttctttcactttcatatgtgtaccagaggagcaccactgcgatttctgtggtggcacctatctgttatgcccacctcgcagcagctcagatgggccagttcatgaaatttgaagagtttgcagatacgtcgtcagggagtgtcaattcatcatcgccaccatcaataccagaattgccacggctgcatgctgatgtctgcagttccatgttcttctgttgacgtgattttagtttgaccgttgtggggtagggccaattctttgtgaaaggaaccttaccttatatgttggcacacagcaggctaaccgtttttgtgaagaaaccatgtaggtcgttagttgtcgtatatcgcacgcgtgcatctttttggagcggttttcggctccccccacccacaggtggcggttccgttaggtacagtttccagattttaacgatgctaatacagtaaaagcagtttgtacattctacgcagattttgcagggatacgtggttagatgatctttttgttatgcccagaaatacgtgtgcattggggggttatgaaagtgagctaaatttctgtgcctcgcatggcatccaattgtactcggagattgtgtttgtgctcgatacgcttcctgccactgaaatgcgaaaatg

SEQ ID NO: 68680 - DNA, 3418 bp, Zea Mays
gttaatttacatgttttttgagttgctcttactattttgaactctattatacaaataatacaatctctagtataaataatattctgtaagaccacttagaacaccacttacacgaactgctggaccggagatggcctaaacatagggtttagaccgttgccgtccctactcccgcctagccgaccccactcgtcccagtcccagtcccagtccgccgcctggttccttcttgctcttccctccactctctacagacgcagattgacaaggaagagagagagaggccgaggggaggaggcgtcgtcgtcttcttctgaatgcctgaacttttatttggattccagatagtatggctgccaaaatggctggagctgtccaagtgctcaaggatgacactgttaaacgcacacccatggcacgacctagtaacggccgtgaaggaaagcccattaggttgctgtcgaaccacttctcagtgaagcttagaggagttgatgctgttttctaccaatacagtgtctgcatcaaatctgaggatgataaggtggttgatagcaagggtattggccgaaaggtcatagataaactattgcaaacatactgttctgagcttgatgggaaggattttgcatatgatggagagaaatgtctatttactgtgggacctcttccacagaataactttgagttcactgttatcttggaggaaacatcttcaagggctgctggtggaagtccagtgcatgaaagccctactcaagctaacaaaaagcgagtcaagcgatcacatctggcaaaaaagttcagtgtagacataagttatgccgcaaagattcctcttcagtcggttgctttggctcttcgaggaagcgagtcagaacatggtcaagatgttctgagagtccttgacgttgttttaaggcaacagcaggctaagagaggttgtctacttgttagacagtcatttttcagtgatgatagtcgaaaccttgttgatttaactggtggagttagtggttgtcgtggactccactctagtttccgtactacaattggtggtctttcactaaatatggatgtttcaaccactatggttgtaactcctggaccagttattgattttctcgtcacaaatcaaaatgtaagagacatcagagatattgactggcccagggccaagaaaatgcttaaaaatctcagagttaaagctaagcacaacaacatggagttcaagattattggccttagtgatcaaccatgctctagacagatgttcccaatgaaagttcgaaatggaaacatcgaaattaaatctgttgatatcactgttcaggattattttaaatccaagcaagttgagctaacaatgccttatctgccatgtcttgatgtgggaaaaccaaaacgccctaattatctcccaattgagttatgccacatggtatcacttcaacgttatacaaaggcactgtcttctcaacaaagggcaatgttggttgaaaagtcacgacagaaacctcaagaaagaatgcgagttgttacagatgctgtaaaaagtaatatgtatgatgatgatccaatcttatcttcatgtggtattgaaattgagaaacaacttactcgtgttgacgctcgtgttctctctgcaccagcgctagttgtgggcaacagtgaagattgcatcccaaacaggggtaggtggaactacaataataagaggctattcgatccagtcaagattgagcgttgggccattgttaatttctctgctcgttgtgacatgagccgaatctcaagagaactgataaactgtggacgcagcaaaggcattttcattgaatgtcctcacagtttggtggatgaggacagccagtctaggagatgttcacctgtggaaagggttgaaaagatgtttgaaaaagtcaaagcaagccttcctggtcctccagagtttctcctttgtcttttaccagagaggaagaattgtgatatttacgggccatggaagaagaaaaatcttcatgaaatgggtattgtcactcaatgcattgctccaagtaataagatgaatgatcaatatttcaccaatgttcttctaaaaattaatgctaagcttggtggaatgaactccaaactggcactggaacatcgtcaaatgataccagttgtgactcaaataccaacattaattcttggcatggatgtttcacatggttctccaggtcgagcagatataccatcaattgctgcggttgttggatctagatgctggccattgatatcacggtacagagcatctgtgcgcacccagtctccaaaggtagagatgattgattctctatttaagccactggatgatgggaaggatgatggcataatgagggaacttctactagacttctaccaaaccagtcaacaaagaaagcctaagcagataatcatcttcagggatggtgttagcgagtctcagtttagccaagtactgaacgtagaacttaatcaaattataaaggcatatcagagtatgggacagggggaccttccgaagttcacagtgatcattgctcaaaagaatcaccacacaaaactcttccaagctgattcaccagagaacgttccacctgggactgttgtggactccggcatagttcatccaagacagtatgatttctacatgtgtgctcatgccggaccaattggtacttcaaggccaacccattaccatgtgttgcttgatgagattggcttctctgcagataatctccagaagctagttctttcactttcatatgtgtaccagaggagcaccactgcgatttctgtggtggcacctatctgttatgcccacctcgcagcagctcagatgggccagttcatgaaatttgaagagtttgcagatacgtcgtcagggagtgtcaattcatcatcgccaccatcaataccagaattgccacggctgcatgctgatgtctgcagttccatgttcttctgttgacgtgattttagtttgaccgttgtggggtagggccaattctttgtgaaaggaaccttaccttatatgttggcacacagcaggctaaccgtttttgtgaagaaaccatgtaggtcgttagttgtcgtatatcgcacgcgtgcatctttttggagcggttttcggctccccccacccacaggtggcggttccgttaggtacagtttccagattttaacgatgctaatacagtaaaagcagtttgtacattctacgcagattttgcagggatacgtggttagatgatctttttgttatgcccagaaatacgtgtgcattggggggttatgaaagtgagctaaatttctgtgcctcgcatggcatccaattgtactcggagattgtgtttgtgctcgatacgcttcctgccactgaaatgcgaaaatg

SEQ ID NO: 68681 - DNA, 2172 bp, Zea Mays
cgaactgctggaccggagatggcctaaacatagggtttagaccgttgccgtccctactcccgcctagccgaccccactcgtcccagtcccagtcccagtccgccgcctggttccttcttgctcttccctccactctctacagacgcagattgacaaggaagagagagagaggccgaggggaggaggcgtcgtcgtcttcttctgaatgcctgaacttttatttggattccagatagtatggctgccaaaatggctggagctgtccaagtgctcaaggatgacactgttaaacgcacacccatggcacgacctagtaacggccgtgaaggaaagcccattaggttgctgtcgaaccacttctcagtgaagcttagaggagttgatgctgttttctaccaatacagtgtctgcatcaaatctgaggatgataaggtggttgatagcaagggtattggccgaaaggtcatagataaactattgcaaacatactgttctgagcttgatgggaaggattttgcatatgatggagagaaatgtctatttactgtgggacctcttccacagaataactttgagttcactgttatcttggaggaaacatcttcaagggctgctggtggaagtccagtgcatgaaagccctactcaagctaacaaaaagcgagtcaagcgatcacatctggcaaaaaagttcagtgtagacataagttatgccgcaaagattcctcttcagtcggttgctttggctcttcgaggaagcgagtcagaacatggtcaagatgttctgagagtccttgacgttgttttaaggcaacagcaggctaagagaggttgtctacttgttagacagtcatttttcagtgatgatagtcgaaaccttgttgatttaactggtggagttagtggttgtcgtggactccactctagtttccgtactacaattggtggtctttcactaaatatggatgtttcaaccactatggttgtaactcctggaccagttattgattttctcgtcacaaatcaaaatgtaagagacatcagagatattgactggcccagggccaagaaaatgcttaaaaatctcagagttaaagctaagcacaacaacatggagttcaagattattggccttagtgatcaaccatgctctagacagatgttcccaatgaaagttcgaaatggaaacatcgaaattaaatctgttgatatcactgttcaggattattttaaatccaagcaagttgagctaacaatgccttatctgccatgtcttgatgtgggaaaaccaaaacgccctaattatctcccaattgagttatgccacatggtatcacttcaacgttatacaaaggcactgtcttctcaacaaagggcaatgttggttgaaaagtcacgacagaaacctcaagaaagaatgcgagttgttacagatgctgtaaaaagtaatatgtatgatgatgatccaatcttatcttcatgtggtattgaaattgagaaacaacttactcgtgttgacgctcgtgttctctctgcaccagcgctagttgtgggcaacagtgaagattgcatcccaaacaggggtaggtggaactacaataataagaggctattcgatccagtcaagattgagcgttgggccattgttaatttctctgctcgttgtgacatgagccgaatctcaagagaactgataaactgtggacgcagcaaaggcattttcattgaatgtcctcacagtttggtggatgaggacagccagtctaggagatgttcacctgtggaaagggttgaaaagatgtttgaaaaagtcaaagcaagccttcctggtcctccagagtttctcctttgtcttttaccagagaggaagaattgtgatatttacgggccatggaagaagaaaaatcttcatgaaatgggtattgtcactcaatgcattgctccaagtaataagatgaatgatcaatatttcaccaatgttcttctaaaaattaatgctaagcttggtggaatgaactccaaactggcactggaacatcgtcaaatgataccagttgtgactcaaataccaacattaattcttggcatggatgtttcacatggttctccaggtcgagcagatataccatcaattgctgcggttgacaaagaccgaaatttacatggggagatg

SEQ ID NO: 68682 - DNA, 2148 bp, Zea Mays
cacttacacgaactgctggaccggagatggcctaaacatagggtttagaccgttgccgtccctactcccgcctagccgaccccactcgtcccagtcccagtcccagtccgccgcctggttccttcttgctcttccctccactctctacagacgcagattgacaaggaagagagagagaggccgaggggaggaggcgtcgtcgtcttcttctgaatgcctgaactatggctgccaaaatggctggagctgtccaagtgctcaaggatgacactgttaaacgcacacccatggcacgacctagtaacggccgtgaaggaaagcccattaggttgctgtcgaaccacttctcagtgaagcttagaggagttgatgctgttttctaccaatacagtgtctgcatcaaatctgaggatgataaggtggttgatagcaagggtattggccgaaaggtcatagataaactattgcaaacatactgttctgagcttgatgggaaggattttgcatatgatggagagaaatgtctatttactgtgggacctcttccacagaataactttgagttcactgttatcttggaggaaacatcttcaagggctgctggtggaagtccagtgcatgaaagccctactcaagctaacaaaaagcgagtcaagcgatcacatctggcaaaaaagttcagtgtagacataagttatgccgcaaagattcctcttcagtcggttgctttggctcttcgaggaagcgagtcagaacatggtcaagatgttctgagagtccttgacgttgttttaaggcaacagcaggctaagagaggttgtctacttgttagacagtcatttttcagtgatgatagtcgaaaccttgttgatttaactggtggagttagtggttgtcgtggactccactctagtttccgtactacaattggtggtctttcactaaatatggatgtttcaaccactatggttgtaactcctggaccagttattgattttctcgtcacaaatcaaaatgtaagagacatcagagatattgactggcccagggccaagaaaatgcttaaaaatctcagagttaaagctaagcacaacaacatggagttcaagattattggccttagtgatcaaccatgctctagacagatgttcccaatgaaagttcgaaatggaaacatcgaaattaaatctgttgatatcactgttcaggattattttaaatccaagcaagttgagctaacaatgccttatctgccatgtcttgatgtgggaaaaccaaaacgccctaattatctcccaattgagttatgccacatggtatcacttcaacgttatacaaaggcactgtcttctcaacaaagggcaatgttggttgaaaagtcacgacagaaacctcaagaaagaatgcgagttgttacagatgctgtaaaaagtaatatgtatgatgatgatccaatcttatcttcatgtggtattgaaattgagaaacaacttactcgtgttgacgctcgtgttctctctgcaccagcgctagttgtgggcaacagtgaagattgcatcccaaacaggggtaggtggaactacaataataagaggctattcgatccagtcaagattgagcgttgggccattgttaatttctctgctcgttgtgacatgagccgaatctcaagagaactgataaactgtggacgcagcaaaggcattttcattgaatgtcctcacagtttggtggatgaggacagccagtctaggagatgttcacctgtggaaagggttgaaaagatgtttgaaaaagtcaaagcaagccttcctggtcctccagagtttctcctttgtcttttaccagagaggaagaattgtgatatttacgggccatggaagaagaaaaatcttcatgaaatgggtattgtcactcaatgcattgctccaagtaataagatgaatgatcaatatttcaccaatgttcttctaaaaattaatgctaagcttggtggaatgaactccaaactggcactggaacatcgtcaaatgataccagttgtgactcaaataccaacattaattcttggcatggatgtttcacatggttctccaggtcgagcagatataccatcaattgctgcgtctcatagtttaaatgaacagc

SEQ ID NO: 68683 - DNA, 843 bp, Zea Mays
atctttccatcattcatcctttcttctccaacacccgtcactctcttctccaactccaagatgtcggccgccaccgccctgcttcatcgaggcccaagacccaatgtctatttttgataaagaaatcaaacagcaacctagcagtcttccttcacttctctgcttccgacctcgtagcgaatcagatcggggggctagggttccagtgcgcctctacaaccagacgcgaggctaggctgggcatggagggaatcgtcacggcccgaaagaggtcccggccagagacggcgaacggggctgccgccgccgggaagcgctccaaagggtggggtcaacactaagcagataagctgagttacatgcgtcaagctatccatccgtgaccaccagtctaaccccaacctaaagaacatcgagctggaaggcaattttgaccagatcaagcaagccagcgacttggtgtgtgatctcatcgcaaccatcaacgcaagcatgccagcgaaaaatccatcttccgctgtggtgccagcaggaggaggccgaggcagtggtccggggggaacgagcagcaactacaagacgaagttgtgcgagaacttcttgaagctatgcgagaacttccaacgactatgtatgagatattgtctcttattatgactagatgagatgtgttttatggctatagatgagacttttgtgatgtaattgatgagactatggatttaaatattgttatgtgattgtgtgtgagatgttttatgtgaaaatatgttgtgctatagttgttgatatatttgttatgttgtggaatgtggtgtaaaataaaaataaaaacatttgtaa

SEQ ID NO: 68684 - DNA, 3384 bp, Zea Mays
atctctctgccgctcctctctattgtttatccccagctggccaagcttccccagctccctctcccatggcagtagtgctccctctgcctggtcgctcgctcttcctcaagcttagctcactgcgcgttgctctagctcgcggagcttcctagatcgcccctccgcgcaccacttcaagctcgccggcgttcggaccgcggcttcctcctccagctccggcgcccggcgtttctcccaggcgcgccccctgaattccctccaccacgccctgccgagattcccccagccgcgcactccttctctacgctcctctctctctctcccagcgctccctccctgctcgctcctccctcagctcgtctctctctctccgctggtcgcgcccttgccctgcttccatggctgcgcgtccctctactagccgagcttcctgtacgcccagagcgtgcccagctgtgaatctcccatggcgcgcacatctccctgctcagtaatccagcgcgcgtgccttgctcctgtgcatgctcgccggccggagctccctagcgcggtcgcccatgccgtgcgcagccaagctcgccctgtgcgccccatctcccttcggatcccctgaaagctccttgcgcgggccacgttcctctactcggccatggccgcgcgctggcgctcttctctgcgcgcgccctgtcttttcccacgcgcagctcatcccaacgtcgagctcggccctgccctctgctccagctcgcccctctctacttgtcctcgctgttgggccagtctacagctcgcagtccctgcgttgccgagtccctggccgcgtctgtgtggttgtgttctttcgtgggaacgctcactttgtcgtggtcctgcgctctctgctcggtccagcgtgggttttagttgtcggtcgagcgcgcccctgtttcctttgtcttaccgtcgtcgttcggtcaccctgcctcgatgtcggtccctacgtgatgtctccgacttgtgttcgcgctgacaaaagaatcccaagaagatgtagagaagcaagcccctggtcgatgccccaagtgctcggcgaaaggccagaacaagaatcatcgccgtttatgcggagttctagttaatatggagagattccaagagttgtgaatgtaagataagtccgtgcaacaattgctgggagctcgaccggatgtctaaactgagcaccatcgtcgccctcgcggttatcaaatcgattttatcatggtgagccaatttattatttcatataattgaattggatagttatatagccacaatgatttttcttgtcgttagcatagacacattgtgtgacgacttccagattggtagtcgtacctgttgctgatcccttgctttatagtagttattacgttctatgtggtttgccttggttattagtttcgagtgaatttaatattagtgcggtatttaacgtgtaatcgacgaaaaactcgaattcgtattcgttaatcgatgtagtgaatctaagctaaatttattattggcgcgtaagtttgttagccgaattgttagatagattaaataaatatgtgtggtgcgaaataaaattaaattagttctttgtaagcaaagtggtataatttataaagcgagggataagtttagcatttaattaattagctgatgagttgtgtttaggctaattgtgttaaatatgtatagtttgtagtccgtgatgtttgcgataggttcgtttaatttagagaagcgtgagtattgcgcttagtcgtacgtcgataaccagtgttctcgtatgagtgatgtactatgcctctccgttaagtgtttaattctctaccctgtagcattgtttattatcgttctagtccttatgcattcatgtgcataatgcatctcatttaggtacgataattaatcacgtgatgcggaggaaaagaaccaagttggtctcaagatggtgcaaggagtggtcttcttcgcacaacgatgtcgtcagtcggaccaacctgaagggcaaactgaacaagtgccaacacaaaaggctagtcgctacctaacaaacactaacctagtgttatccaggcaagccccagtgcatttgccacctccttgctgttttaaaatcttttatcaccttgtttgatgcattaggtgataggagttgtgtgttaaaccattgatgcatttacttccttggaaaattgattacccttccttgatacccttttatgaaaaggatttttatgatgcttagccttgctttataaaaacaaaatgttttgttttaaaacaaaagtgatgcttcactgggtggggaatgttttcaaaaagaaaaacttgtgatggtggatccatcaggaccttgatgggttcaacatcggaaaagatgtacctctgctaggtaccaaactttgagttgaaaataataacactaagaccgggcggttgacttgcacgagaagggagtctcagtgtagtgtctccgtccgagtcgattaaggaccgtctcgatgtaggcttgctgatcgaggaccttttaactggtcacatgcctcatcatgggtaagctttgccttgggcagactaataccagaataggacaacacgtaatgggagtggagagatggcgagagtagcgtgtaccctccatgggaagaggccggacaatggtgtatatgtgctctcggttggcttgaacccgatctggacttaagaaccccagtggcgagttgacatatgcaagcattaagtgctacatatgtcgcgtgattggagatccccagctgggtattaatcgattcgaatcgccgttacttctcgaacatgaagacttggtcactgccctacacgtagcaatcatgtgaactaaagggatgatgaaaagacggctagtataggccaagtgcttgaactagggtagaaagaactctagatgcaggtaacttcacttaacctgacaataaaactggatttttaaggatccattattagtaatcatttctgcaaacagagtctttgattcttgataagccataccttgattcccaaaagccagcatatccttgagagtctttttccttagacggataagacttgcgaaagtacacttcgtacttagggttttcgaacccatgttgttgcaggtactagaattgtgctgttgtggatggtgttaagtgccggtgggcacgaccttcttataagtctaagtacttcttctatacttcttattgaggatggtcacttaagctagcatatatttcaaacttataaataatttataacagttcaaagttattttttgaatcacttttgtaatcactccgatcatgtacaatgtaaacttgatgtaacttgtaaaatttgataataagattttcg

SEQ ID NO: 68685 - DNA, 1967 bp, Zea Mays
aattaatctacactaccttgctccgcaaccaggaactgcccaatgcaaggtcatgtttgaaatattttgagaatggtggggacactatcctgggttatagagcggttcaggttaattggaaagatctggactattgcaatgtttgtgatatggatgaggagtatgaagacaacttattcttgcaatgtgacaagtgtcgtatgatggttcatgctagatgttatggtgaacttaaacaattggatggaggactttggctttgcaacttgtgtcgaccaggtgcacctcgtgtgtctccaaaatgctgtctatgtccagtcacaggtggtgcaatgaaacctacaacagatggccgttgggctcatctcgcatgtgctatatggatccctgaaacatgcttaaaggatgtaaagagaatggaacctattgatggactgagcagaatcaacaaggaccgttggaaacttgtatgcagcatttgcggagtttcatatggagtttgtatacagtgttctcatcctacctgtcgtgttgcgtatcaccctctttgtgcacgtgctgctgacctttgcattgaggtagttcagacagatatggcttcatcatctggttgtgcaaggaccgaaccctataatttacacaggagaaggggccaaaagcagccacaagttgtcgctactgcttctctgaaacgtttatatgtggagaatagacctcatattgtcagtggctactgccaaaacagagtaggcaatacatgcggagaatcaattcaaccgtttggtttgtcagatgctgtgcagcaagaagctattggcaatgtgtcttctatggttgaaaaatatacaatcgtgaaggctacatttaggaagagactaacttttggaaaatcaaaaattcatggatatggtgtctttgccaaggttgcacacaaggccggagatatgatggttgaatacataggggagattgttagaccaccgatatcagacactagagagcggcgaatttacaactcactagtgggtgctgggacatatatgttcaggatagatgatgaacgtgttatagatgccactcgggttggaagtatagcccgtctgatcaatcactcatgcgagcctaattgctattcacgtgccataactattcttggagatgaacacatcatcatttttgcgaaacgggacatagatccatgggaagagctgacatatgattataggtttttttcaagtgatcaacgacttccatgtttttgtggattccccaaatgccgtggagtagttaatgatgttgaggcagaggaacagtcggctaaaatcagagttaagagaagtgaattatttgaaaaaagtgaaaagtaaaggtacatcatattggttgggatatgacatgcttgtgtgatatgcttgccagtgcctaaaggcaaattctaaaaaatggttgagtttcattcttgaatcctgataattcttctcattatttgagtggaagacgaatctaattgtataggtacccaatataggatcggcaatccaatttggggacataagttgaatcaattgtcgtgtaccattgaaatgttagttgttacacatatttcggccatttatcttgttgaacctaccctattttcaaccgttggagctgggaatcggaggggtggtttggttaaatgatttgagatggcctgccatgtgtaatgtaatcgaagtacatggttgcacttttcggtgttgcccatatattatccataacaatatgtagtttcagctgttctgcatttacgaaaatgcattggaagagaaacgtccacttcaactgaatgtattctacgaaatctttatttatgggtatccgtctgttgtgcattctaacctttgtgaatatagagcgtgtatcttatactccttaagtttcaatttacaatttgtttgacttgactgactcgtcttattttttta

SEQ ID NO: 68686 - DNA, 2073 bp, Zea Mays
gtttggacaaattaatctacactaccttgctccgcaaccaggaactgcccaatgcaaggtcatgtttgaaatattttgagaatggtggggacactatcctgggttatagagcggttcaggttaattggaaagatctggactattgcaatgtttgtgatatggatgaggagtatgaagacaacttattcttgcaatgtgacaagtgtcgtatgatggttcatgctagatgttatggtgaacttaaacaattggatggaggactttggctttgcaacttgtgtcgaccaggtgcacctcgtgtgtctccaaaatgctgtctatgtccagtcacaggtggtgcaatgaaacctacaacagatggccgttgggctcatctcgcatgtgctatatggatccctgaaacatgcttaaaggatgtaaagagaatggaacctattgatggactgagcagaatcaacaaggaccgttggaaacttgtatgcagcatttgcggagtttcatatggagtttgtatacagtgttctcatcctacctgtcgtgttgcgtatcaccctctttgtgcacgtgctgctgacctttgcattgaggtagttcagacagatatggcttcatcatctggttgtgcaaggaccgaaccctataatttacacaggagaaggggccaaaagcagccacaagttgtcgctactgcttctctgaaacgtttatatgtggagaatagacctcatattgtcagtggctactgccaaaacagagtaggcaatacatgcggagaatcaattcaaccgtttggtttgtcagatgctgtgcagcaagaagctattggcaatgtgtcttctatggttgaaaaatatacaatcgtgaaggctacatttaggaagagactaacttttggaaaatcaaaaattcatggatatggtgtctttgccaaggttgcacacaaggccggagatatgatggttgaatacataggggagattgttagaccaccgatatcagacactagagagcggcgaatttacaactcactagtgggtgctgggacatatatgttcaggatagatgatgaacgtgttatagatgccactcgggttggaagtatagcccgtctgatcaatcactcatgcgagcctaattgctattcacgtgccataactattcttggagatgaacacatcatcatttttgcgaaacgggacatagatccatgggaagagctgacatatgattataggtttttttcaagtgatcaacgacttccatgtttttgtggattccccaaatgccgtggagtagttaatgatgttgaggcagaggaacagtcggctaaaatcagagttaagagaagtgaattatttgaaaaaagtgaaaagtaaagggtatacgtatgaatcgggatgtgggctctaaagaaatgaacacgatgataaatacaaacttagcgtttgaccatggcaattggtgaaaaaagagtggtacatcatattggttgggatatgacatgcttgtgtgatatgcttgccagtgcctaaaggcaaattctaaaaaatggttgagtttcattcttgaatcctgataattcttctcattatttgagtggaagacgaatctaattgtataggtacccaatataggatcggcaatccaatttggggacataagttgaatcaattgtcgtgtaccattgaaatgttagttgttacacatatttcggccatttatcttgttgaacctaccctattttcaaccgttggagctgggaatcggaggggtggtttggttaaatgatttgagatggcctgccatgtgtaatgtaatcgaagtacatggttgcacttttcggtgttgcccatatattatccataacaatatgtagtttcagctgttctgcatttacgaaaatgcattggaagagaaacgtccacttcaactgaatgtattctacgaaatctttatttatgggtatccgtctgttgtgcattctaacctttgtgaatatagagcgtgtatcttatactccttaagtttcaatttacaatttgtttgacttgactgactcgtcttattttttta

SEQ ID NO: 68687 - DNA, 2446 bp, Zea Mays
ccaaaaggaccccaagatacatggtaggatagtatctgactctgaccatttccataacaaaaaggatatatggcctgaaggatatactgctttcagaaagtacatgtcaatagaagacccacatgcagtaacattgtacaaaatggaagtacttaggaactctgatacaaaagcacgcccgttgtttagggtgatctcagaagacggggtgcagattgatggatctaccccaaatgcgtgctggaaagagatataccgcagaataaaggaaaaacagtgcactgaattggaaagaaacgtatgccaaagttctggttcctacatgtttggcttttcaaatccgcagataagacaacttattcaggaactgcccaatgcaaggtcatgtttgaaatattttgagaatggtggggacactatcctgggttatagagcggttcaggttaattggaaagatctggactattgcaatgtttgtgatatggatgaggagtatgaagacaacttattcttgcaatgtgacaagtgtcgtatgatggttcatgctagatgttatggtgaacttaaacaattggatggaggactttggctttgcaacttgtgtcgaccaggtgcacctcgtgtgtctccaaaatgctgtctatgtccagtcacaggtggtgcaatgaaacctacaacagatggccgttgggctcatctcgcatgtgctatatggatccctgaaacatgcttaaaggatgtaaagagaatggaacctattgatggactgagcagaatcaacaaggaccgttggaaacttgtatgcagcatttgcggagtttcatatggagtttgtatacagtgttctcatcctacctgtcgtgttgcgtatcaccctctttgtgcacgtgctgctgacctttgcattgagcttgaaaatgatgacaaaatccatcacatgtatcttgatgaagacgaggatccttgtattcgtttactctcgtactgcaaaaagcatagacagccttctgctgctgaacgtccatctttagaaagtgatcctcctgaacccattcaggtagttcagacagatatggcttcatcatctggttgtgcaaggaccgaaccctataatttacacaggagaaggggccaaaagcagccacaagttgtcgctactgcttctctgaaacgtttatatgtggagaatagacctcatattgtcagtggctactgccaaaacagagtaggcaatacatgcggagaatcaattcaaccgtttggtttgtcagatgctgtgcagcaagaagctattggcaatgtgtcttctatggttgaaaaatatacaatcgtgaaggctacatttaggaagagactaacttttggaaaatcaaaaattcatggatatggtgtctttgccaaggttgcacacaaggccggagatatgatggttgaatacataggggagattgttagaccaccgatatcagacactagagagcggcgaatttacaactcactagtgggtgctgggacatatatgttcaggatagatgatgaacgtgttatagatgccactcgggttggaagtatagcccgtctgatcaatcactcatgcgagcctaattgctattcacgtgccataactattcttggagatgaacacatcatcatttttgcgaaacgggacatagatccatgggaagagctgacatatgattataggtttttttcaagtgatcaacgacttccatgtttttgtggattccccaaatgccgtggagtagttaatgatgttgaggcagaggaacagtcggctaaaatcagagttaagagaagtgaattatttgaaaaaagtgaaaagtaaaggtacatcatattggttgggatatgacatgcttgtgtgatatgcttgccagtgcctaaaggcaaattctaaaaaatggttgagtttcattcttgaatcctgataattcttctcattatttgagtggaagacgaatctaattgtataggtacccaatataggatcggcaatccaatttggggacataagttgaatcaattgtcgtgtaccattgaaatgttagttgttacacatatttcggccatttatcttgttgaacctaccctattttcaaccgttggagctgggaatcggaggggtggtttggttaaatgatttgagatggcctgccatgtgtaatgtaatcgaagtacatggttgcacttttcggtgttgcccatatattatccataacaatatgtagtttcagctgttctgcatttacgaaaatgcattggaagagaaacgtccacttcaactgaatgtattctacgaaatctttatttatgggtatccgtctgttgtgcattctaacctttgtgaatatagagcgtgtatcttatactccttaagtttcaatttacaatttgtttgacttgactgactcgtcttattttttta

SEQ ID NO: 68688 - DNA, 2550 bp, Zea Mays
ccaaaaggaccccaagatacatggtaggatagtatctgactctgaccatttccataacaaaaaggatatatggcctgaaggatatactgctttcagaaagtacatgtcaatagaagacccacatgcagtaacattgtacaaaatggaagtacttaggaactctgatacaaaagcacgcccgttgtttagggtgatctcagaagacggggtgcagattgatggatctaccccaaatgcgtgctggaaagagatataccgcagaataaaggaaaaacagtgcactgaattggaaagaaacgtatgccaaagttctggttcctacatgtttggcttttcaaatccgcagataagacaacttattcaggaactgcccaatgcaaggtcatgtttgaaatattttgagaatggtggggacactatcctgggttatagagcggttcaggttaattggaaagatctggactattgcaatgtttgtgatatggatgaggagtatgaagacaacttattcttgcaatgtgacaagtgtcgtatgatggttcatgctagatgttatggtgaacttaaacaattggatggaggactttggctttgcaacttgtgtcgaccaggtgcacctcgtgtgtctccaaaatgctgtctatgtccagtcacaggtggtgcaatgaaacctacaacagatggccgttgggctcatctcgcatgtgctatatggatccctgaaacatgcttaaaggatgtaaagagaatggaacctattgatggactgagcagaatcaacaaggaccgttggaaacttgtatgcagcatttgcggagtttcatatggagtttgtatacagtgttctcatcctacctgtcgtgttgcgtatcaccctctttgtgcacgtgctgctgacctttgcattgagcttgaaaatgatgacaaaatccatcacatgtatcttgatgaagacgaggatccttgtattcgtttactctcgtactgcaaaaagcatagacagccttctgctgctgaacgtccatctttagaaagtgatcctcctgaacccattcaggtagttcagacagatatggcttcatcatctggttgtgcaaggaccgaaccctataatttacacaggagaaggggccaaaagcagccacaagttgtcgctactgcttctctgaaacgtttatatgtggagaatagacctcatattgtcagtggctactgccaaaacagagtaggcaatacatgcggagaatcaattcaaccgtttggtttgtcagatgctgtgcagcaagaagctattggcaatgtgtcttctatggttgaaaaatatacaatcgtgaaggctacatttaggaagagactaacttttggaaaatcaaaaattcatggatatggtgtctttgccaaggttgcacacaaggccggagatatgatggttgaatacataggggagattgttagaccaccgatatcagacactagagagcggcgaatttacaactcactagtgggtgctgggacatatatgttcaggatagatgatgaacgtgttatagatgccactcgggttggaagtatagcccgtctgatcaatcactcatgcgagcctaattgctattcacgtgccataactattcttggagatgaacacatcatcatttttgcgaaacgggacatagatccatgggaagagctgacatatgattataggtcagaaggttaagattttgctttttgaccttttgaacatcatagttttgtacaaaatgttgtccatgctttcttcaggtttttttcaagtgatcaacgacttccatgtttttgtggattccccaaatgccgtggagtagttaatgatgttgaggcagaggaacagtcggctaaaatcagagttaagagaagtgaattatttgaaaaaagtgaaaagtaaagggtatacgtatgaatcgggatgtgggctctaaagaaatgaacacgatgataaatacaaacttagcgtttgaccatggcaattggtgaaaaaagagtggtacatcatattggttgggatatgacatgcttgtgtgatatgcttgccagtgcctaaaggcaaattctaaaaaatggttgagtttcattcttgaatcctgataattcttctcattatttgagtggaagacgaatctaattgtataggtacccaatataggatcggcaatccaatttggggacataagttgaatcaattgtcgtgtaccattgaaatgttagttgttacacatatttcggccatttgagatggcctgccatgtgtaatgtaatcgaagtacatggttgcacttttcggtgttgcccatatattatccataacaatatgtagtttcagctgttctgcatttacgaaaatgcattggaagagaaacgtccacttcaactgaatgtattctacgaaatctttatttatgggtatccgtctgttgtgcattctaacctttgtgaatatagagcgtgtatcttatactccttaagtttcaatttacaatttgtttgacttgactgactcgtcttattttttta

SEQ ID NO: 68689 - DNA, 3656 bp, Zea Mays
cccaaaccccatcaccattgtcaccattgctcgccgaaccctagagagggcgcgggggcggataccttagctagccatggtcatcgccgttgagggcaacggcttcgtccacgacgacgaggaggacgacggagaccgccccatccgctaccttcccctcggccatatctactcctcttccacccccgcccccgcaccgcgcccgccggcccagaagaagccccgcttcgacgacggcagaccccccatgaaagtatattaccgccgccgtcgcaagaagctgcgggtcgatgaatcgctgtcgccgccctcgccaacgacggccccactcgcgccgcccgagagggacgagaaggctgggccctcgcgccggaaagactccctcaagcacgagctgctcagcctgggccccgcctcacctgcattggatggggaggagccggaacggcgtctaggacgaacgaggcgctgcggaggggctgaaaagacggtttgcttctcagaacctgagaggcggcggcagccggccaggcccaaggggtcggtcgggaggagatgggtcgagttggatattcagactgcggatcctaatgcctttgtcggattggtgtgcaaggttttctggccgctggatgatgattggtacaagggctccatcgcatggtacaatgaggcaaccaagaagcattcagtaaagtatgatgatggtgaagcagaggaccttagccttgcagatgaaaggataaagtttttcatctcctctgaagagatgaagtctttgaatctgaaacttggaatttccaatcaggataagaaggggcatgatgagttgcttgcacttgctgttagctttcatgactatcagggtctcgacccaggtgaccttgtgtgggcaaaaattacaggtcatgcaatgtggccggcggttgtggtggatgagtcaaatgtacctgcaactcgagctttgaagtcaattcggttggaccaatcaatattggtccaattctttggcactcacgattttgcaaggattaaattgaagcaagctgtgccgtttctgaatggtcttgtttcttctttgcatctcaaatgcaagcaagcaagtttcagtcggagcttagaagaagcaaaagaatttctccacacacagcagcttcctgaaattatgttgcagcttcggaaatctgttcaacatgatgtctctgatgttaattcctatgagggcaaggtagactcttgcagtaatttatcagaagctctagcattgcaaaatggagaggatgctgagatgactcaaatagaactagggaaccttcgtgtgagcaatttaggtaggatagtatctgactctgaccatttccataacaaaaaggatatatggcctgaaggatatactgctttcagaaagtacatgtcaatagaagattgatggatctaccccaaatgcgtgctggaaagagatataccgcagaataaaggaaaaacagtgcactgaattggaaagaaacgtatgccaaagttctggttcctacatgtttggcttttcaaatccgcagataagacaacttattcaggaactgcccaatgcaaggtcatgtttgaaatattttgagaatggtggggacactatcctgggttatagagcggttcaggttaattggaaagatctggactattgcaatgtttgtgatatggatgaggagtatgaagacaacttattcttgcaatgtgacaagtgtcgtatgatggttcatgctagatgttatggtgaacttaaacaattggatggaggactttggctttgcaacttgtgtcgaccaggtgcacctcgtgtgtctccaaaatgctgtctatgtccagtcacaggtggtgcaatgaaacctacaacagatggccgttgggctcatctcgcatgtgctatatggatccctgaaacatgcttaaaggatgtaaagagaatggaacctattgatggactgagcagaatcaacaaggaccgttggaaacttgtatgcagcatttgcggagtttcatatggagtttgtatacagtgttctcatcctacctgtcgtgttgcgtatcaccctctttgtgcacgtgctgctgacctttgcattgagcttgaaaatgatgacaaaatccatcacatgtatcttgatgaagacgaggatccttgtattcgtttactctcgtactgcaaaaagcatagacagccttctgctgctgaacgtccatctttagaaagtgatcctcctgaacccattcaggtagttcagacagatatggcttcatcatctggttgtgcaaggaccgaaccctataatttacacaggagaaggggccaaaagcagccacaagttgtcgctactgcttctctgaaacgtttatatgtggagaatagacctcatattgtcagtggctactgccaaaacagagtaggcaatacatgcggagaatcaattcaaccgtttggtttgtcagatgctgtgcagcaagaagctattggcaatgtgtcttctatggttgaaaaatatacaatcgtgaaggctacatttaggaagagactaacttttggaaaatcaaaaattcatggatatggtgtctttgccaaggttgcacacaaggccggagatatgatggttgaatacataggggagattgttagaccaccgatatcagacactagagagcggcgaatttacaactcactagtgggtgctgggacatatatgttcaggatagatgatgaacgtgttatagatgccactcgggttggaagtatagcccgtctgatcaatcactcatgcgagcctaattgctattcacgtgccataactattcttggagatgaacacatcatcatttttgcgaaacgggacatagatccatgggaagagctgacatatgattataggtttttttcaagtgatcaacgacttccatgtttttgtggattccccaaatgccgtggagtagttaatgatgttgaggcagaggaacagtcggctaaaatcagagttaagagaagtgaattatttgaaaaaagtgaaaagtaaaggtacatcatattggttgggatatgacatgcttgtgtgatatgcttgccagtgcctaaaggcaaattctaaaaaatggttgagtttcattcttgaatcctgataattcttctcattatttgagtggaagacgaatctaattgtataggtacccaatataggatcggcaatccaatttggggacataagttgaatcaattgtcgtgtaccattgaaatgttagttgttacacatatttcggccatttatcttgttgaacctaccctattttcaaccgttggagctgggaatcggaggggtggtttggttaaatgatttgagatggcctgccatgtgtaatgtaatcgaagtacatggttgcacttttcggtgttgcccatatattatccataacaatatgtagtttcagctgttctgcatttacgaaaatgcattggaagagaaacgtccacttcaactgaatgtattctacgaaatctttatttatgggtatccgtctgttgtgcattctaacctttgtgaatatagagcgtgtatcttatactccttaagtttcaatttacaatttgtttgacttgactgactcgtcttattttttta

SEQ ID NO: 68690 - DNA, 4038 bp, Zea Mays
cccaaaccccatcaccattgtcaccattgctcgccgaaccctagagagggcgcgggggcggataccttagctagccatggtcatcgccgttgagggcaacggcttcgtccacgacgacgaggaggacgacggagaccgccccatccgctaccttcccctcggccatatctactcctcttccacccccgcccccgcaccgcgcccgccggcccagaagaagccccgcttcgacgacggcagaccccccatgaaagtatattaccgccgccgtcgcaagaagctgcgggtcgatgaatcgctgtcgccgccctcgccaacgacggccccactcgcgccgcccgagagggacgagaaggctgggccctcgcgccggaaagactccctcaagcacgagctgctcagcctgggccccgcctcacctgcattggatggggaggagccggaacggcgtctaggacgaacgaggcgctgcggaggggctgaaaagacggtttgcttctcagaacctgagaggcggcggcagccggccaggcccaaggggtcggtcgggaggagatgggtcgagttggatattcagactgcggatcctaatgcctttgtcggattggtgtgcaaggttttctggccgctggatgatgattggtacaagggctccatcgcatggtacaatgaggcaaccaagaagcattcagtaaagtatgatgatggtgaagcagaggaccttagccttgcagatgaaaggataaagtttttcatctcctctgaagagatgaagtctttgaatctgaaacttggaatttccaatcaggataagaaggggcatgatgagttgcttgcacttgctgttagctttcatgactatcagggtctcgacccaggtgaccttgtgtgggcaaaaattacaggtcatgcaatgtggccggcggttgtggtggatgagtcaaatgtacctgcaactcgagctttgaagtcaattcggttggaccaatcaatattggtccaattctttggcactcacgattttgcaaggattaaattgaagcaagctgtgccgtttctgaatggtcttgtttcttctttgcatctcaaatgcaagcaagcaagtttcagtcggagcttagaagaagcaaaagaatttctccacacacagcagcttcctgaaattatgttgcagcttcggaaatctgttcaacatgatgtctctgatgttaattcctatgagggcaaggtagactcttgcagtaatttatcagaagctctagcattgcaaaatggagaggatgctgagatgactcaaatagaactagggaaccttcgtgtgagcaatttaggtaggatagtatctgactctgaccatttccataacaaaaaggatatatggcctgaaggatatactgctttcagaaagtacatgtcaatagaagacccacatgcagtaacattgtacaaaatggaagtacttaggaactctgatacaaaagcacgcccgttgtttagggtgatctcagaagacggggtgcagattgatggatctaccccaaatgcgtgctggaaagagatataccgcagaataaaggaaaaacagtgcactgaattggaaagaaacgtatgccaaagttctggttcctacatgtttggcttttcaaatccgcagataagacaacttattcagggaggtgttggacaacggaccagttgcaaaaaagagggttacaacaccctgaaagatgcccactttgtgatcaagaacatgaaaccattgatcatctcctcattggatgtgtctttgcaagggaattatggttcaaattgtttggacaaattaatctacactaccttgctccgcaaccaggaactgcccaatgcaaggtcatgtttgaaatattttgagaatggtggggacactatcctgggttatagagcggttcaggttaattggaaagatctggactattgcaatgtttgtgatatggatgaggagtatgaagacaacttattcttgcaatgtgacaagtgtcgtatgatggttcatgctagatgttatggtgaacttaaacaattggatggaggactttggctttgcaacttgtgtcgaccaggtgcacctcgtgtgtctccaaaatgctgtctatgtccagtcacaggtggtgcaatgaaacctacaacagatggccgttgggctcatctcgcatgtgctatatggatccctgaaacatgcttaaaggatgtaaagagaatggaacctattgatggactgagcagaatcaacaaggaccgttggaaacttgtatgcagcatttgcggagtttcatatggagtttgtatacagtgttctcatcctacctgtcgtgttgcgtatcaccctctttgtgcacgtgctgctgacctttgcattgagcttgaaaatgatgacaaaatccatcacatgtatcttgatgaagacgaggatccttgtattcgtttactctcgtactgcaaaaagcatagacagccttctgctgctgaacgtccatctttagaaagtgatcctcctgaacccattcaggtagttcagacagatatggcttcatcatctggttgtgcaaggaccgaaccctataatttacacaggagaaggggccaaaagcagccacaagttgtcgctactgcttctctgaaacgtttatatgtggagaatagacctcatattgtcagtggctactgccaaaacagagtaggcaatacatgcggagaatcaattcaaccgtttggtttgtcagatgctgtgcagcaagaagctattggcaatgtgtcttctatggttgaaaaatatacaatcgtgaaggctacatttaggaagagactaacttttggaaaatcaaaaattcatggatatggtgtctttgccaaggttgcacacaaggccggagatatgatggttgaatacataggggagattgttagaccaccgatatcagacactagagagcggcgaatttacaactcactagtgggtgctgggacatatatgttcaggatagatgatgaacgtgttatagatgccactcgggttggaagtatagcccgtctgatcaatcactcatgcgagcctaattgctattcacgtgccataactattcttggagatgaacacatcatcatttttgcgaaacgggacatagatccatgggaagagctgacatatgattataggtcagaaggttaagattttgctttttgaccttttgaacatcatagttttgtacaaaatgttgtccatgctttcttcaggtttttttcaagtgatcaacgacttccatgtttttgtggattccccaaatgccgtggagtagttaatgatgttgaggcagaggaacagtcggctaaaatcagagttaagagaagtgaattatttgaaaaaagtgaaaagtaaagggtatacgtatgaatcgggatgtgggctctaaagaaatgaacacgatgataaatacaaacttagcgtttgaccatggcaattggtgaaaaaagagtggtacatcatattggttgggatatgacatgcttgtgtgatatgcttgccagtgcctaaaggcaaattctaaaaaatggttgagtttcattcttgaatcctgataattcttctcattatttgagtggaagacgaatctaattgtataggtacccaatataggatcggcaatccaatttggggacataagttgaatcaattgtcgtgtaccattgaaatgttagttgttacacatatttcggccatttgagatggcctgccatgtgtaatgtaatcgaagtacatggttgcacttttcggtgttgcccatatattatccataacaatatgtagtttcagctgttctgcatttacgaaaatgcattggaagagaaacgtccacttcaactgaatgtattctacgaaatctttatttatgggtatccgtctgttgtgcattctaacctttgtgaatatagagcgtgtatcttatactccttaagtttcaatttacaatttgtttgacttgactgactcgtcttattttttta

SEQ ID NO: 68691 - DNA, 3737 bp, Zea Mays
cccaaaccccatcaccattgtcaccattgctcgccgaaccctagagagggcgcgggggcggataccttagctagccatggtcatcgccgttgagggcaacggcttcgtccacgacgacgaggaggacgacggagaccgccccatccgctaccttcccctcggccatatctactcctcttccacccccgcccccgcaccgcgcccgccggcccagaagaagccccgcttcgacgacggcagaccccccatgaaagtatattaccgccgccgtcgcaagaagctgcgggtcgatgaatcgctgtcgccgccctcgccaacgacggccccactcgcgccgcccgagagggacgagaaggctgggccctcgcgccggaaagactccctcaagcacgagctgctcagcctgggccccgcctcacctgcattggatggggaggagccggaacggcgtctaggacgaacgaggcgctgcggaggggctgaaaagacggtttgcttctcagaacctgagaggcggcggcagccggccaggcccaaggggtcggtcgggaggagatgggtcgagttggatattcagactgcggatcctaatgcctttgtcggattggtgtgcaaggttttctggccgctggatgatgattggtacaagggctccatcgcatggtacaatgaggcaaccaagaagcattcagtaaagtatgatgatggtgaagcagaggaccttagccttgcagatgaaaggataaagtttttcatctcctctgaagagatgaagtctttgaatctgaaacttggaatttccaatcaggataagaaggggcatgatgagttgcttgcacttgctgttagctttcatgactatcagggtctcgacccaggtgaccttgtgtgggcaaaaattacaggtcatgcaatgtggccggcggttgtggtggatgagtcaaatgtacctgcaactcgagctttgaagtcaattcggttggaccaatcaatattggtccaattctttggcactcacgattttgcaagctgtgccgtttctgaatggtcttgtttcttctttgcatctcaaatgcaagcaagcaagtttcagtcggagcttagaagaagcaaaagaatttctccacacacagcagcttcctgaaattatgttgcagcttcggaaatctgttcaacatgatgtctctgatgttaattcctatgagggcaaggtagactcttgcagtaatttatcagaagctctagcattgcaaaatggagaggatgctgagatgactcaaatagaactagggaaccttcgtgtgagcaatttaggtaggatagtatctgactctgaccatttccataacaaaaaggatatatggcctgaaggatatactgctttcagaaagtacatgtcaatagaagacccacatgcagtaacattgtacaaaatggaagtacttaggaactctgatacaaaagcacgcccgttgtttagggtgatctcagaagacggggtgcagattgatggatctaccccaaatgcgtgctggaaagagatataccgcagaataaaggaaaaacagtgcactgaattggaaagaaacgtatgccaaagttctggttcctacatgtttggcttttcaaatccgcagataagacaacttattcaggaactgcccaatgcaaggtcatgtttgaaatattttgagaatggtggggacactatcctgggttatagagcggttcaggttaattggaaagatctggactattgcaatgtttgtgatatggatgaggagtatgaagacaacttattcttgcaatgtgacaagtgtcgtatgatggttcatgctagatgttatggtgaacttaaacaattggatggaggactttggctttgcaacttgtgtcgaccaggtgcacctcgtgtgtctccaaaatgctgtctatgtccagtcacaggtggtgcaatgaaacctacaacagatggccgttgggctcatctcgcatgtgctatatggatccctgaaacatgcttaaaggatgtaaagagaatggaacctattgatggactgagcagaatcaacaaggaccgttggaaacttgtatgcagcatttgcggagtttcatatggagtttgtatacagtgttctcatcctacctgtcgtgttgcgtatcaccctctttgtgcacgtgctgctgacctttgcattgagcttgaaaatgatgacaaaatccatcacatgtatcttgatgaagacgaggatccttgtattcgtttactctcgtactgcaaaaagcatagacagccttctgctgctgaacgtccatctttagaaagtgatcctcctgaacccattcaggtagttcagacagatatggcttcatcatctggttgtgcaaggaccgaaccctataatttacacaggagaaggggccaaaagcagccacaagttgtcgctactgcttctctgaaacgtttatatgtggagaatagacctcatattgtcagtggctactgccaaaacagagtaggcaatacatgcggagaatcaattcaaccgtttggtttgtcagatgctgtgcagcaagaagctattggcaatgtgtcttctatggttgaaaaatatacaatcgtgaaggctacatttaggaagagactaacttttggaaaatcaaaaattcatggatatggtgtctttgccaaggttgcacacaaggccggagatatgatggttgaatacataggggagattgttagaccaccgatatcagacactagagagcggcgaatttacaactcactagtgggtgctgggacatatatgttcaggatagatgatgaacgtgttatagatgccactcgggttggaagtatagcccgtctgatcaatcactcatgcgagcctaattgctattcacgtgccataactattcttggagatgaacacatcatcatttttgcgaaacgggacatagatccatgggaagagctgacatatgattataggtttttttcaagtgatcaacgacttccatgtttttgtggattccccaaatgccgtggagtagttaatgatgttgaggcagaggaacagtcggctaaaatcagagttaagagaagtgaattatttgaaaaaagtgaaaagtaaaggtacatcatattggttgggatatgacatgcttgtgtgatatgcttgccagtgcctaaaggcaaattctaaaaaatggttgagtttcattcttgaatcctgataattcttctcattatttgagtggaagacgaatctaattgtataggtacccaatataggatcggcaatccaatttggggacataagttgaatcaattgtcgtgtaccattgaaatgttagttgttacacatatttcggccatttatcttgttgaacctaccctattttcaaccgttggagctgggaatcggaggggtggtttggttaaatgatttgagatggcctgccatgtgtaatgtaatcgaagtacatggttgcacttttcggtgttgcccatatattatccataacaatatgtagtttcagctgttctgcatttacgaaaatgcattggaagagaaacgtccacttcaactgaatgtattctacgaaatctttatttatgggtatccgtctgttgtgcattctaacctttgtgaatatagagcgtgtatcttatactccttaagtttcaatttacaatttgtttgacttgactgactcgtcttattttttta

SEQ ID NO: 68692 - DNA, 3791 bp, Zea Mays
cccaaaacttccctccccaaatcccccaaaccccatcaccattgtcaccattgctcgccgaaccctagagagggcgcgggggcggataccttagctagccatggtcatcgccgttgagggcaacggcttcgtccacgacgacgaggaggacgacggagaccgccccatccgctaccttcccctcggccatatctactcctcttccacccccgcccccgcaccgcgcccgccggcccagaagaagccccgcttcgacgacggcagaccccccatgaaagtatattaccgccgccgtcgcaagaagctgcgggtcgatgaatcgctgtcgccgccctcgccaacgacggccccactcgcgccgcccgagagggacgagaaggctgggccctcgcgccggaaagactccctcaagcacgagctgctcagcctgggccccgcctcacctgcattggatggggaggagccggaacggcgtctaggacgaacgaggcgctgcggaggggctgaaaagacggtttgcttctcagaacctgagaggcggcggcagccggccaggcccaaggggtcggtcgggaggagatgggtcgagttggatattcagactgcggatcctaatgcctttgtcggattggtgtgcaaggttttctggccgctggatgatgattggtacaagggctccatcgcatggtacaatgaggcaaccaagaagcattcagtaaagtatgatgatggtgaagcagaggaccttagccttgcagatgaaaggataaagtttttcatctcctctgaagagatgaagtctttgaatctgaaacttggaatttccaatcaggataagaaggggcatgatgagttgcttgcacttgctgttagctttcatgactatcagggtctcgacccaggtgaccttgtgtgggcaaaaattacaggtcatgcaatgtggccggcggttgtggtggatgagtcaaatgtacctgcaactcgagctttgaagtcaattcggttggaccaatcaatattggtccaattctttggcactcacgattttgcaagcaagctgtgccgtttctgaatggtcttgtttcttctttgcatctcaaatgcaagcaagcaagtttcagtcggagcttagaagaagcaaaagaatttctccacacacagcagcttcctgaaattatgttgcagcttcggaaatctgttcaacatgatgtctctgatgttaattcctatgagggcaaggtagactcttgcagtaatttatcagaagctctagcattgcaaaatggagaggatgctgagatgactcaaatagaactagggaaccttcgtgtgagcaatttaggtaggatagtatctgactctgaccatttccataacaaaaaggatatatggcctgaaggatatactgctttcagaaagtacatgtcaatagaagacccacatgcagtaacattgtacaaaatggaagtacttaggaactctgatacaaaagcacgcccgttgtttagggtgatctcagaagacggggtgcagattgatggatctaccccaaatgcgtgctggaaagagatataccgcagaataaaggaaaaacagtgcactgaattggaaagaaacgtatgccaaagttctggttcctacatgtttggcttttcaaatccgcagataagacaacttattcaggaactgcccaatgcaaggtcatgtttgaaatattttgagaatggtggggacactatcctgggttatagagcggttcaggttaattggaaagatctggactattgcaatgtttgtgatatggatgaggagtatgaagacaacttattcttgcaatgtgacaagtgtcgtatgatggttcatgctagatgttatggtgaacttaaacaattggatggaggactttggctttgcaacttgtgtcgaccaggtgcacctcgtgtgtctccaaaatgctgtctatgtccagtcacaggtggtgcaatgaaacctacaacagatggccgttgggctcatctcgcatgtgctatatggatccctgaaacatgcttaaaggatgtaaagagaatggaacctattgatggactgagcagaatcaacaaggaccgttggaaacttgtatgcagcatttgcggagtttcatatggagtttgtatacagtgttctcatcctacctgtcgtgttgcgtatcaccctctttgtgcacgtgctgctgacctttgcattgagcttgaaaatgatgacaaaatccatcacatgtatcttgatgaagacgaggatccttgtattcgtttactctcgtactgcaaaaagcatagacagccttctgctgctgaacgtccatctttagaaagtgatcctcctgaacccattcaggtagttcagacagatatggcttcatcatctggttgtgcaaggaccgaaccctataatttacacaggagaaggggccaaaagcagccacaagttgtcgctactgcttctctgaaacgtttatatgtggagaatagacctcatattgtcagtggctactgccaaaacagagtaggcaatacatgcggagaatcaattcaaccgtttggtttgtcagatgctgtgcagcaagaagctattggcaatgtgtcttctatggttgaaaaatatacaatcgtgaaggctacatttaggaagagactaacttttggaaaatcaaaaattcatggatatggtgtctttgccaaggttgcacacaaggccggagatatgatggttgaatacataggggagattgttagaccaccgatatcagacactagagagcggcgaatttacaactcactagtgggtgctgggacatatatgttcaggatagatgatgaacgtgttatagatgccactcgggttggaagtatagcccgtctgatcaatcactcatgcgagcctaattgctattcacgtgccataactattcttggagatgaacacatcatcatttttgcgaaacgggacatagatccatgggaagagctgacatatgattataggtttttttcaagtgatcaacgacttccatgtttttgtggattccccaaatgccgtggagtagttaatgatgttgaggcagaggaacagtcggctaaaatcagagttaagagaagtgaattatttgaaaaaagtgaaaagtaaagggtatacgtatgaatcgggatgtgggctctaaagaaatgaacacgatgataaatacaaacttagcgtttgaccatggcaattggtgaaaaaagagtggtacatcatattggttgggatatgacatgcttgtgtgatatgcttgccagtgcctaaaggcaaattctaaaaaatggttgagtttcattcttgaatcctgataattcttctcattatttgagtggaagacgaatctaattgtataggtacccaatataggatcggcaatccaatttggggacataagttgaatcaattgtcgtgtaccattgaaatgttagttgttacacatatttcggccatttgagatggcctgccatgtgtaatgtaatcgaagtacatggttgcacttttcggtgttgcccatatattatccataacaatatgtagtttcagctgttctgcatttacgaaaatgcattggaagagaaacgtccacttcaactgaatgtattctacgaaatctttatttatgggtatccgtctgttgtgcattctaacctttgtgaatatagagcgtgtatcttatactccttaagtttcaatttacaatttgtttgacttgactgactcgtcttattttttta

SEQ ID NO: 68693 - DNA, 3833 bp, Zea Mays
gtaaataaaaagagatgggatttgagggccccaaaacttccctccccaaatcccccaaaccccatcaccattgtcaccattgctcgccgaaccctagagagggcgcgggggcggataccttagctagccatggtcatcgccgttgagggcaacggcttcgtccacgacgacgaggaggacgacggagaccgccccatccgctaccttcccctcggccatatctactcctcttccacccccgcccccgcaccgcgcccgccggcccagaagaagccccgcttcgacgacggcagaccccccatgaaagtatattaccgccgccgtcgcaagaagctgcgggtcgatgaatcgctgtcgccgccctcgccaacgacggccccactcgcgccgcccgagagggacgagaaggctgggccctcgcgccggaaagactccctcaagcacgagctgctcagcctgggccccgcctcacctgcattggatggggaggagccggaacggcgtctaggacgaacgaggcgctgcggaggggctgaaaagacggtttgcttctcagaacctgagaggcggcggcagccggccaggcccaaggggtcggtcgggaggagatgggtcgagttggatattcagactgcggatcctaatgcctttgtcggattggtgtgcaaggttttctggccgctggatgatgattggtacaagggctccatcgcatggtacaatgaggcaaccaagaagcattcagtaaagtatgatgatggtgaagcagaggaccttagccttgcagatgaaaggataaagtttttcatctcctctgaagagatgaagtctttgaatctgaaacttggaatttccaatcaggataagaaggggcatgatgagttgcttgcacttgctgttagctttcatgactatcagggtctcgacccaggtgaccttgtgtgggcaaaaattacaggtcatgcaatgtggccggcggttgtggtggatgagtcaaatgtacctgcaactcgagctttgaagtcaattcggttggaccaatcaatattggtccaattctttggcactcacgattttgcaaggattaaattgaagcaagctgtgccgtttctgaatggtcttgtttcttctttgcatctcaaatgcaagcaagcaagtttcagtcggagcttagaagaagcaaaagaatttctccacacacagcagcttcctgaaattatgttgcagcttcggaaatctgttcaacatgatgtctctgatgttaattcctatgagggcaaggtagactcttgcagtaatttatcagaagctctagcattgcaaaatggagaggatgctgagatgactcaaatagaactagggaaccttcgtgtgagcaatttaggtaggatagtatctgactctgaccatttccataacaaaaaggatatatggcctgaaggatatactgctttcagaaagtacatgtcaatagaagacccacatgcagtaacattgtacaaaatggaagtacttaggaactctgatacaaaagcacgcccgttgtttagggtgatctcagaagacggggtgcagattgatggatctaccccaaatgcgtgctggaaagagatataccgcagaataaaggaaaaacagtgcactgaattggaaagaaacgtatgccaaagttctggttcctacatgtttggcttttcaaatccgcagataagacaacttattcaggaactgcccaatgcaaggtcatgtttgaaatattttgagaatggtggggacactatcctgggttatagagcggttcaggttaattggaaagatctggactattgcaatgtttgtgatatggatgaggagtatgaagacaacttattcttgcaatgtgacaagtgtcgtatgatggttcatgctagatgttatggtgaacttaaacaattggatggaggactttggctttgcaacttgtgtcgaccaggtgcacctcgtgtgtctccaaaatgctgtctatgtccagtcacaggtggtgcaatgaaacctacaacagatggccgttgggctcatctcgcatgtgctatatggatccctgaaacatgcttaaaggatgtaaagagaatggaacctattgatggactgagcagaatcaacaaggaccgttggaaacttgtatgcagcatttgcggagtttcatatggagtttgtatacagtgttctcatcctacctgtcgtgttgcgtatcaccctctttgtgcacgtgctgctgacctttgcattgagcttgaaaatgatgacaaaatccatcacatgtatcttgatgaagacgaggatccttgtattcgtttactctcgtactgcaaaaagcatagacagccttctgctgctgaacgtccatctttagaaagtgatcctcctgaacccattcaggtagttcagacagatatggcttcatcatctggttgtgcaaggaccgaaccctataatttacacaggagaaggggccaaaagcagccacaagttgtcgctactgcttctctgaaacgtttatatgtggagaatagacctcatattgtcagtggctactgccaaaacagagtaggcaatacatgcggagaatcaattcaaccgtttggtttgtcagatgctgtgcagcaagaagctattggcaatgtgtcttctatggttgaaaaatatacaatcgtgaaggctacatttaggaagagactaacttttggaaaatcaaaaattcatggatatggtgtctttgccaaggttgcacacaaggccggagatatgatggttgaatacataggggagattgttagaccaccgatatcagacactagagagcggcgaatttacaactcactagtgggtgctgggacatatatgttcaggatagatgatgaacgtgttatagatgccactcgggttggaagtatagcccgtctgatcaatcactcatgcgagcctaattgctattcacgtgccataactattcttggagatgaacacatcatcatttttgcgaaacgggacatagatccatgggaagagctgacatatgattataggtttttttcaagtgatcaacgacttccatgtttttgtggattccccaaatgccgtggagtagttaatgatgttgaggcagaggaacagtcggctaaaatcagagttaagagaagtgaattatttgaaaaaagtgaaaagtaaagggtatacgtatgaatcgggatgtgggctctaaagaaatgaacacgatgataaatacaaacttagcgtttgaccatggcaattggtgaaaaaagagtggtacatcatattggttgggatatgacatgcttgtgtgatatgcttgccagtgcctaaaggcaaattctaaaaaatggttgagtttcattcttgaatcctgataattcttctcattatttgagtggaagacgaatctaattgtataggtacccaatataggatcggcaatccaatttggggacataagttgaatcaattgtcgtgtaccattgaaatgttagttgttacacatatttcggccatttgagatggcctgccatgtgtaatgtaatcgaagtacatggttgcacttttcggtgttgcccatatattatccataacaatatgtagtttcagctgttctgcatttacgaaaatgcattggaagagaaacgtccacttcaactgaatgtattctacgaaatctttatttatgggtatccgtctgttgtgcattctaacctttgtgaatatagagcgtgtatcttatactccttaagtttcaatttacaatttgtttgacttgactgactcgtcttattttttta

SEQ ID NO: 68694 - DNA, 3244 bp, Zea Mays
gggaaacggtaaataaaaagagatgggatttgagggccccaaaacttccctccccaaatcccccaaaccccatcaccattgtcaccattgctcgccgaaccctagagagggcgcgggggcggataccttagctagccatggtcatcgccgttgagggcaacggcttcgtccacgacgacgaggaggacgacggagaccgccccatccgctaccttcccctcggccatatctactcctcttccacccccgcccccgcaccgcgcccgccggcccagaagaagccccgcttcgacgacggcagaccccccatgaaagtatattaccgccgccgtcgcaagaagctgcgggtcgatgaatcgctgtcgccgccctcgccaacgacggccccactcgcgccgcccgagagggacgagaaggctgggccctcgcgccggaaagactccctcaagcacgagctgctcagcctgggccccgcctcacctgcattggatggggaggagccggaacggcgtctaggacgaacgaggcgctgcggaggggctgaaaagacggtttgcttctcagaacctgagaggcggcggcagccggccaggcccaaggggtcggtcgggaggagatgggtcgagttggatattcagactgcggatcctaatgcctttgtcggattggtgtgcaaggttttctggccgctggatgatgattggtacaagggctccatcgcatggtacaatgaggcaaccaagaagcattcagtaaagtatgatgatggtgaagcagaggaccttagccttgcagatgaaaggataaagtttttcatctcctctgaagagatgaagtctttgaatctgaaacttggaatttccaatcaggataagaaggggcatgatgagttgcttgcacttgctgttagctttcatgactatcagggtctcgacccaggtgaccttgtgtgggcaaaaattacaggtcatgcaatgtggccggcggttgtggtggatgagtcaaatgtacctgcaactcgagctttgaagtcaattcggttggaccaatcaatattggtccaattctttggcactcacgattttgcaaggattaaattgaagcaagctgtgccgtttctgaatggtcttgtttcttctttgcatctcaaatgcaagcaagcaagtttcagtcggagcttagaagaagcaaaagaatttctccacacacagcagcttcctgaaattatgttgcagcttcggaaatctgttcaacatgatgtctctgatgttaattcctatgagggcaaggtagactcttgcagtaatttatcagaagctctagcattgcaaaatggagaggatgctgagatgactcaaatagaactagggaaccttcgtgtgagcaatttaggtaggatagtatctgactctgaccatttccataacaaaaaggatatatggcctgaaggatatactgctttcagaaagtacatgtcaatagaagacccacatgcagtaacattgtacaaaatggaagtacttaggaactctgatacaaaagcacgcccgttgtttagggtgatctcagaagacggggtgcagattgatggatctaccccaaatgcgtgctggaaagagatataccgcagaataaaggaaaaacagtgcactgaattggaaagaaacgtatgccaaagttctggttcctacatgtttggcttttcaaatccgcagataagacaacttattcaggaactgcccaatgcaaggtcatgtttgaaatattttgagaatggtggggacactatcctgggttatagagcggttcaggttaattggaaagatctggactattgcaatgtttgtgatatggatgaggagtatgaagacaacttattcttgcaatgtgacaagtgtcgtatgatggttcatgctagatgttatggtgaacttaaacaattggatggaggactttggctttgcaacttgtgtcgaccaggtgcacctcgtgtgtctccaaaatgctgtctatgtccagtcacaggtggtgcaatgaaacctacaacagatggccgttgggctcatctcgcatgtgctatatggatccctgaaacatgcttaaaggatgtaaagagaatggaacctattgatggactgagcagaatcaacaaggaccgttggaaacttgtatgcagcatttgcggagtttcatatggagtttgtatacagtgttctcatcctacctgtcgtgttgcgtatcaccctctttgtgcacgtgctgctgacctttgcattgagcttgaaaatgatgacaaaatccatcacatgtatcttgatgaagacgaggatccttgtattcgtttactctcgtactgcaaaaagcatagacagccttctgctgctgaacgtccatctttagaaagtgatcctcctgaacccattcaggtagttcagacagatatggcttcatcatctggttgtgcaaggaccgaaccctataatttacacaggagaaggggccaaaagcagccacaagttgtcgctactgcttctctgaaacgtttatatgtggagaatagacctcatattgtcagtggctactgccaaaacagagtaggcaatacatgcggagaatcaattcaaccgtttggtttgtcagatgctgtgcagcaagaagctattggcaatgtgtcttctatggttgaaaaatatacaatcgtgaaggctacatttaggaagagactaacttttggaaaatcaaaaattcatggatatggtgtctttgccaaggttgcacacaaggccggagatatgatggttgaatacataggggagattgttagaccaccgatatcagacactagagagcggcgaatttacaactcactagtgggtgctgggacatatatgttcaggatagatgatgaacgtgttatagatgccactcgggttggaagtatagcccgtctgatcaatcactcatgcgagcctaattgctattcacgtgccataactattcttggagatgaacacatcatcatttttgcgaaacgggacatagatccatgggaagagctgacatatgattataggtttttttcaagtgatcaacgacttccatgtttttgtggattccccaaatgccgtggagtagttaatgatgttgaggcagaggaacagtcggctaaaatcagagttaagagaagtgaattatttgaaaaaagtgaaaagtaaagtttctaggtaggctggttcgatccgag

SEQ ID NO: 68695 - DNA, 2908 bp, Zea Mays
cccaaaccccatcaccattgtcaccattgctcgccgaaccctagagagggcgcgggggcggataccttagctagccatggtcatcgccgttgagggcaacggcttcgtccacgacgacgaggaggacgacggagaccgccccatccgctaccttcccctcggccatatctactcctcttccacccccgcccccgcaccgcgcccgccggcccagaagaagccccgcttcgacgacggcagaccccccatgaaagtatattaccgccgccgtcgcaagaagctgcgggtcgatgaatcgctgtcgccgccctcgccaacgacggccccactcgcgccgcccgagagggacgagaaggctgggccctcgcgccggaaagactccctcaagcacgagctgctcagcctgggccccgcctcacctgcattggatggggaggagccggaacggcgtctaggacgaacgaggcgctgcggaggggctgaaaagacggtttgcttctcagaacctgagaggcggcggcagccggccaggcccaaggggtcggtcgggaggagatgggtcgagttggatattcagactgcggatcctaatgcctttgtcggattggtgtgcaaggttttctggccgctggatgatgattggtacaagggctccatcgcatggtacaatgaggcaaccaagaagcattcagtaaagtatgatgatggtgaagcagaggaccttagccttgcagatgaaaggataaagtttttcatctcctctgaagagatgaagtctttgaatctgaaacttggaatttccaatcaggataagaaggggcatgatgagttgcttgcacttgctgttagctttcatgactatcagggtctcgacccaggtgaccttgtgtgggcaaaaattacaggtcatgcaatgtggccggcggttgtggtggatgagtcaaatgtacctgcaactcgagctttgaagtcaattcggttggaccaatcaatattggtccaattctttggcactcacgattttgcaaggattaaattgaagcaagctgtgccgtttctgaatggtcttgtttcttctttgcatctcaaatgcaagcaagcaagtttcagtcggagcttagaagaagcaaaagaatttctccacacacagcagcttcctgaaattatgttgcagcttcggaaatctgttcaacatgatgtctctgatgttaattcctatgagggcaaggtagactcttgcagtaatttatcagaagctctagcattgcaaaatggagaggatgctgagatgactcaaatagaactagggaaccttcgtgtgagcaatttaggtaggatagtatctgactctgaccatttccataacaaaaaggatatatggcctgaaggatatactgctttcagaaagtacatgtcaatagaagacccacatgcagtaacattgtacaaaatggaagtacttaggaactctgatacaaaagcacgcccgttgtttagggtgatctcagaagacggggtgcagattgatggatctaccccaaatgcgtgctggaaagagatataccgcagaataaaggaaaaacagtgcactgaattggaaagaaacgtatgccaaagttctggttcctacatgtttggcttttcaaatccgcagataagacaacttattcaggaactgcccaatgcaaggtcatgtttgaaatattttgagaatggtggggacactatcctgggttatagagcggttcaggttaattggaaagatctggactattgcaatgtttgtgatatggatgaggagtatgaagacaacttattcttgcaatgtgacaagtgtcgtatgatggttcatgctagatgttatggtgaacttaaacaattggatggaggactttggctttgcaacttgtgtcgaccaggtgcacctcgtgtgtctccaaaatgctgtctatgtccagtcacaggtggtgcaatgaaacctacaacagatggccgttgggctcatctcgcatgtgctatatggatccctgaaacatgcttaaaggatgtaaagagaatggaacctattgatggactgagcagaatcaacaaggaccgttggaaacttgtatgcagcatttgcggagtttcatatggagtttgtatacagtgttctcatcctacctgtcgtgttgcgtatcaccctctttgtgcacgtgctgctgacctttgcattgagcttgaaaatgatgacaaaatccatcacatgtatcttgatgaagacgaggatccttgtattcgtttactctcgtactgcaaaaagcatagacagccttctgctgctgaacgtccatctttagaaagtgatcctcctgaacccattcaggtagttcagacagatatggcttcatcatctggttgtgcaaggaccgaaccctataatttacacaggagaaggggccaaaagcagccacaagttgtcgctactgcttctctgaaacgtttatatgtggagaatagacctcatattgtcagtggctactgccaaaacagagtaggcaatacatgcggagaatcaattcaaccgtttggtttgtcagatgctgtgcagcaagaagctattggcaatgtgtcttctatggttgaaaaatatacaatcgtgaaggctacatttaggaagagactaacttttggaaaatcaaaaattcatggatatggtgtctttgccaaggttgcacacaaggccggagatatgatggttgaatacataggggagattgttagaccaccgatatcagacactagagagcggcgaatttacaactcactagtggagaggtgtgctttatttcattacaggaagaatagagtgtacatagagtacaagggggaagaatcctcaaacacgcacacacacgcacacacaaag

SEQ ID NO: 68696 - DNA, 3883 bp, Zea Mays
aaacagtccaatcccaacacggcgacgacgccagcggaaatcgcatcgccctcttcctctttccctcgctgtgcaatctcccccaaactcccctctcgaaccctcgctctcgtcgccagagcaagcaaagcgcagttgctgaaacccgtgcgctgttgatggatgatgaccgttcccatggatagtgctagcgcagccccgtcctctgcgcgggactttgctgagcgtctccttactaggaataatgaacttgaagatcagcttcgcaagtccgcacaatccaaagtcccatcagatcccagcatatggcttcagatgcgtgacaactttgagaagattattctcatagatcatgacctatctgaacagaaagaggtagagtatctcctatggaagttgcattacaaaagaattgaggacttcaggaggagcattagtgctgcaagctcagctgcatctcagagtgggaagagcaacgctaatccagatcgagtcaagagaattaaattaaccttcaaaagcttcctttcagaagcaactggcttctatcacgacttgatgttaaagatcaaatcaaatttgggccttccactcagttactttccagagggcatcgacaatgcaaacaactctgcgcgagatgacaagacaacagtgcagttgaagaaaggtttgatttcatgccatcgctgcctgatatatttgggagatcttgctcgttacaagagctcgcaaggtgatggtgattctgctagccgtgaatacgcagcggcatctagttactacatggaggctgcttctatctatccttccagtggcaaccctcatcatcagcttgctatactagcatcttactcaggcaacgaggtggtagctgtttatagaatcgccaaagctatagacagctgccagacaacaacaaagttcccagcgctaaggcattacccccacggctatctgggaggggacaaggacggggagaagtaaagtttcagccaaaagatgttaacgcagaagcagctgaaagggaacaggagtgcaatgttcgtgatacattgaaggccttctatatacgatttgtcaggctcactggaattcttttcacgaggaccagtttggaaacatttggggagctgttttcttcagttagcaatgatttgcagattcttctttcttccggtcttgaggaggaccttaatttcggttctgatgctgcagaaaatgcattagctgctgttaggcttactatcatccttatattcacagtgcacaatgtaaataaagaacctgatagccagtcatattctgaacttgtgcaacgcagagtactgctccaaagtgcgtttacggctgcttttgattttgttggacgaattctcagaaggtgttcagaacttggtgatatcacatcaagcttctatctgccagccattctggtctacatcgaatggctggcgtcccatccagagttggctattgactcagagatggaggaacagcatgcaaatgccagatctttcttctggaaccaatgtatctcatttatgaataagttgatccttaccaaccttgcttctatggaggacaatgacgatgaggcttgcttttctaatatgagcatttatgaggagggtgaaactgggaacaggcttgccatttgggaagatcttgaattgagaggttttttgcccttggttcctgcacataccattttggatttctcaagcaaacacacatttggaaatgttggaagcaccaaggagaagaaagcacgggttcaacgaatttttgctgcaggaaagtcactgctgaactttgttcagattgatcagttgaggatatattttgatccatctttgaaaaagtttgtcttggccaagaactctcctgtttctagaactaacacccctcttcatgaatctcctgatgcacttaaaacaaatgggactgaaatggatcacaaggctgctagaagatttgattcagtttcttctaatgtgggctcactgcagtctaaagtgcagttttgtcctgatggtgatgatgaagaagaaattgttttcaagccaacagcttatgagaagttttcaaaagtttcttcagatctgtcagttaatggatacgtccatcctgtaccagtgtctgctgctggtgggccaaccaatgctagtttagtgcctgttcagaacactgcatcaatgtctgcaactcgtttaccatccaatccacatgcaactggtttgccatccaatggtgggtcacttccaagtactgcatctctatcagctgctggtaattacaacactgatcagtcgcttcccaggtcgtctgttggttggactgattgggctgtcaatagtgagcaaaatgttactcctagcattgctccaagatttgaactcatgcagtctgttgaggagcctgtttccagctggacaagcagtggggcacagcatgttggtcctcagcacaagcacacaggtttaactttcccagatgttgtctctgaaccatgtgtatctgcatcaatggttcaatgttttagtagctccgattattcgaaatttctcagagaacaagaaatattcttaatgaatggactgaagactgtcaacataactggaaatggctatctagagcagagattgcagcctggattgagtggtttacagtctatgggttattcatctcagatacctattcaacctggtggtaccactgcaaacctgatgcataatcatgtcaaaattactggagagactgtcccctctacacttgattcagttgtaccttcaatagcaccatcaggtggcatgccaatcaaacttacagaagcaccactaactgcttcgaagaagaaccctgttagtcgtccatcaaagcctgttggaccacctccaggatttaatcatgtaaccccaaagcgtcaagatgattctattccggttgaaaaactgcagaacccacaggtcgatgattacagctggctagatagctatcagcaatcgattgatcatgttcacagcttaagaactatttatcctggtgtcagtgatactagcactgcatttgccactccattctctttccctgggaggatacacacacaagggaccaatgaaaagacttggcaagatttccacctttttgagccttcaaaacagaacatgttccaaacttaccaccaaagaaatctgcaaagtggtcaaatggatgaacaagagccagcaaattctatctggtctagcagttaccatgtgtgatttggtaacttttaccaggatgattgctggagtttctggggacagactattggattaagtggcacgacctgatctattgagcttagcccatacctgcagcacttagtgttaaatttcttttgagaatggtagtctttcaagcatgacaatggctgctgttaagtttgaaagggttaatgaaacaaacttgaatccagtgattataggcactccgcacggaccacatgattcatctctcactggacatattgctaccacaagaagcggacggttgctgccgcaactaaaacatgccgtgtggatgtcagttttcagttggcctatgccatccagagagtaaaaagtgaggatcaacgagcatgttgccgagtagtttctcaagtataaattactgcgtctacttgctccttcgctttgggaacaatgtatcaggttgtaagttgcaattaaatgtttggaacagtttgtcatggtaattgtgtggctcctatatggctatattgttctctgtaattgtatggaccaaccctaagtgttacatacaaacatctttgatttgactcaatatcttgttcttcatccgtttttaaattataagaaattataagttctgttttctt

SEQ ID NO: 68697 - DNA, 3401 bp, Zea Mays
cgaaacagtccaatcccaacacggcgacgacgccagcggaaatcgcatcgccctcttcctctttccctcgctgtgcaatctcccccaaactcccctctcgaaccctcgctctcgtcgccagagcaagcaaagcgcagttgctgaaacccgtgcgctgttgatggatgatgaccgttcccatggatagtgctagcgcagccccgtcctctgcgcgggactttgctgagcgtctccttactaggaataatgaacttgaagatcagcttcgcaagtccgcacaatccaaagtcccatcagatcccagcatatggcttcagatgcgtgacaactttgagaagattattctcatagatcatgacctatctgaacagaaagaggtagagtatctcctatggaagttgcattacaaaagaattgaggacttcaggaggagcattagtgctgcaagctcagctgcatctcagagtgggaagagcaacgctaatccagatcgagtcaagagaattaaattaaccttcaaaagcttcctttcagaagcaactggcttctatcacgacttgatgttaaagatcaaatcaaatttgggccttccactcagttactttccagagggcatcgacaatgcaaacaactctgcgcgagatgacaagacaacagtgcagttgaagaaaggtttgatttcatgccatcgctgcctgatatatttgggagatcttgctcgttacaagagctcgcaaggtgatggtgattctgctagccgtgaatacgcagcggcatctagttactacatggaggctgcttctatctatccttccagtggcaaccctcatcatcagcttgctatactagcatcttactcaggcaacgaggtggtagctgtttataggtacttccgaagcttagctgcagatactccttttaccactgcacgtgacaacttgattattctttttgaaaagaatcgccaaagctatagacagctgccagacaacaacaaagttcccagcgctaaggcattacccccacggctatctgggaggggacaaggacggggagaagtaaagtttcagccaaaagatgttaacgcagaagcagctgaaagggaacaggagtgcaatgttcgtgatacattgaaggccttctatatacgatttgtcaggctcactggaattcttttcacgaggaccagtttggaaacatttggggagctgttttcttcagttagcaatgatttgcagattcttctttcttccggtcttgaggaggaccttaatttcggttctgatgctgcagaaaatgcattagctgctgttaggcttactatcatccttatattcacagtgcacaatgtaaataaagaacctgatagccagtcatattctgaacttgtgcaacgcagagtactgctccaaagtgcgtttacggctgcttttgattttgttggacgaattctcagaaggtgttcagaacttggtgatatcacatcaagcttctatctgccagccattctggtctacatcgaatggctggcgtcccatccagagttggctattgactcagagatggaggaacagcatgcaaatgccagatctttcttctggaaccaatgtatctcatttatgaataagttgatccttaccaaccttgcttctatggaggacaatgacgatgaggcttgcttttctaatatgagcatttatgaggagggtgaaactgggaacaggcttgccatttgggaagatcttgaattgagaggttttttgcccttggttcctgcacataccattttggatttctcaagcaaacacacatttggaaatgttggaagcaccaaggagaagaaagcacgggttcaacgaatttttgctgcaggaaagtcactgctgaactttgttcagattgatcagttgaggatatattttgatccatctttgaaaaagtttgtcttggccaagaactctcctgtttctagaactaacacccctcttcatgaatctcctgatgcacttaaaacaaatgggactgaaatggatcacaaggctgctagaagatttgattcagtttcttctaatgtgggctcactgcagtctaaagtgcagttttgtcctgatggtgatgatgaagaagaaattgttttcaagccaacagcttatgagaagttttcaaaagtttcttcagatctgtcagttaatggatacgtccatcctgtaccagtgtctgctgctggtgggccaaccaatgctagtttagtgcctgttcagaacactgcatcaatgtctgcaactcgtttaccatccaatccacatgcaactggtttgccatccaatggtgggtcacttccaagtactgcatctctatcagctgctggtaattacaacactgatcagtcgcttcccaggtcgtctgttggttggactgattgggctgtcaatagtgagcaaaatgttactcctagcattgctccaagatttgaactcatgcagtctgttgaggagcctgtttccagctggacaagcagtggggcacagcatgttggtcctcagcacaagcacacaggtttaactttcccagatgttgtctctgaaccatgtgtatctgcatcaatggttcaatgttttagtagctccgattattcgaaatttctcagagaacaagaaatattcttaatgaatggactgaagactgtcaacataactggaaatggctatctagagcagagattgcagcctggattgagtggtttacagtctatgggttattcatctcagatacctattcaacctggtggtaccactgcaaacctgatgcataatcatgtcaaaattactggagagactgtcccctctacacttgattcagttgtaccttcaatagcaccatcaggtggcatgccaatcaaacttacagaagcaccactaactgcttcgaagaagaaccctgttagtcgtccatcaaagcctgttggaccacctccaggatttaatcatgtaaccccaaagcgtcaagatgattctattccggttgaaaaactgcagaacccacaggtcgatgattacagctggctagatagctatcagcaatcgattgatcatgttcacagcttaagaactatttatcctggtgtcagtgatactagcactgcatttgccactccattctctttccctgggaggatacacacacaagggaccaatgaaaagacttggcaagatttccacctttttgagccttcaaaacagaacagtttgtcatggtaattgtgtggctcctatatggctatattgttctctgtaattgtatggaccaaccctaagtgttacatacaaacatctttgatttgactcaatatcttgttcttcatccgtttttaaattataagaaattataagttctgttttctt

SEQ ID NO: 68698 - DNA, 3882 bp, Zea Mays
cccgaaacagtccaatcccaacacggcgacgacgccagcggaaatcgcatcgccctcttcctctttccctcgctgtgcaatctcccccaaactcccctctcgaaccctcgctctcgtcgccagagcaagcaaagcgcagaataatgaacttgaagatcagcttcgcaagtccgcacaatccaaagtcccatcagatcccagcatatggcttcagatgcgtgacaactttgagaagattattctcatagatcatgacctatctgaacagaaagaggtagagtatctcctatggaagttgcattacaaaagaattgaggacttcaggaggagcattagtgctgcaagctcagctgcatctcagagtgggaagagcaacgctaatccagatcgagtcaagagaattaaattaaccttcaaaagcttcctttcagaagcaactggcttctatcacgacttgatgttaaagatcaaatcaaatttgggccttccactcagttactttccagagggcatcgacaatgcaaacaactctgcgcgagatgacaagacaacagtgcagttgaagaaaggtttgatttcatgccatcgctgcctgatatatttgggagatcttgctcgttacaagagctcgcaaggtgatggtgattctgctagccgtgaatacgcagcggcatctagttactacatggaggctgcttctatctatccttccagtggcaaccctcatcatcagcttgctatactagcatcttactcaggcaacgaggtggtagctgtttatagaatcgccaaagctatagacagctgccagacaacaacaaagttcccagcgctaaggcattacccccacggctatctgggaggggacaaggacggggagaagtaaagtttcagccaaaagatgttaacgcagaagcagctgaaagggaacaggagtgcaatgttcgtgatacattgaaggccttctatatacgatttgtcaggctcactggaattcttttcacgaggaccagtttggaaacatttggggagctgttttcttcagttagcaatgatttgcagattcttctttcttccggtcttgaggaggaccttaatttcggttctgatgctgcagaaaatgcattagctgctgttaggcttactatcatccttatattcacagtgcacaatgtaaataaagaacctgatagccagtcatattctgaacttgtgcaacgcagagtactgctccaaagtgcgtttacggctgcttttgattttgttggacgaattctcagaaggtgttcagaacttggtgatatcacatcaagcttctatctgccagccattctggtctacatcgaatggctggcgtcccatccagagttggctattgactcagagatggaggaacagcatgcaaatgccagatctttcttctggaaccaatgtatctcatttatgaataagttgatccttaccaaccttgcttctatggaggacaatgacgatgaggcttgcttttctaatatgagcatttatgaggagggtgaaactgggaacaggcttgccatttgggaagatcttgaattgagaggttttttgcccttggttcctgcacataccattttggatttctcaagcaaacacacatttggaaatgttggaagcaccaaggagaagaaagcacgggttcaacgaatttttgctgcaggaaagtcactgctgaactttgttcagattgatcagttgaggatatattttgatccatctttgaaaaagtttgtcttggccaagaactctcctgtttctagaactaacacccctcttcatgaatctcctgatgcacttaaaacaaatgggactgaaatggatcacaaggctgctagaagatttgattcagtttcttctaatgtgggctcactgcagtctaaagtgcagttttgtcctgatggtgatgatgaagaagaaattgttttcaagccaacagcttatgagaagttttcaaaagtttcttcagatctgtcagttaatggatacgtccatcctgtaccagtgtctgctgctggtgggccaaccaatgctagtttagtgcctgttcagaacactgcatcaatgtctgcaactcgtttaccatccaatccacatgcaactggtttgccatccaatggtgggtcacttccaagtactgcatctctatcagctgctggtaattacaacactgatcagtcgcttcccaggtcgtctgttggttggactgattgggctgtcaatagtgagcaaaatgttactcctagcattgctccaagatttgaactcatgcagtctgttgaggagcctgtttccagctggacaagcagtggggcacagcatgttggtcctcagcacaagcacacaggtttaactttcccagatgttgtctctgaaccatgtgtatctgcatcaatggttcaatgttttagtagctccgattattcgaaatttctcagagaacaagaaatattcttaatgaatggactgaagactgtcaacataactggaaatggctatctagagcagagattgcagcctggattgagtggtttacagtctatgggttattcatctcagatacctattcaacctggtggtaccactgcaaacctgatgcataatcatgtcaaaattactggagagactgtcccctctacacttgattcagttgtaccttcaatagcaccatcaggtggcatgccaatcaaacttacagaagcaccactaactgcttcgaagaagaaccctgttagtcgtccatcaaagcctgttggaccacctccaggatttaatcatgtaaccccaaagcgtcaagatgattctattccggttgaaaaactgcagaacccacaggtcgatgattacagctggctagatagctatcagcaatcgattgatcatgttcacagcttaagaactatttatcctggtgtcagtgatactagcactgcatttgccactccattctctttccctgggaggatacacacacaagggaccaatgaaaagacttggcaagatttccacctttttgagccttcaaaacagaacatgttccaaacttaccaccaaagaaatctgcaaagtggtcaaatggatgaacaagagccagcaaattctatctggtctagcagttaccatgtgtgatttggtaacttttaccaggatgattgctggagtttctggggacagactattggattaagtggcacgacctgatctattgagcttagcccatacctgcagcacttagtgttaaatttcttttgagaatggtagtctttcaagcatgacaatggctgctgttaagtttgggagtgccgccatcttttgggccaaagatggggtagaggatgattgatctgtcggcagtctgatggcgatgaattaatacgaggtcttcaatgctgacagaaagggttaatgaaacaaacttgaatccagtgattataggcactccgcacggaccacatgattcatctctcactggacatattgctaccacaagaagcggacggttgctgccgcaactaaaacatgccgtgtggatgtcagttttcagttggcctatgccatccagagagtaaaaagtgaggatcaacgagcatgttgccgagtagtttctcaagtataaattactgcgtctacttgctccttcgctttgggaacaatgtatcaggttgtaagttgcaattaaatgtttggaacagtttgtcatggtaattgtgtggctcctatatggctatattgttctctgtaattgtatggaccaaccctaagtgttacatacaaacatctttgatttgactcaatatcttgttcttcatccgtttttaaattataagaaattataagttctgttttctt

SEQ ID NO: 68699 - DNA, 4082 bp, Zea Mays
gagagcccgaaacagtccaatcccaacacggcgacgacgccagcggaaatcgcatcgccctcttcctctttccctcgctgtgcaatctcccccaaactcccctctcgaaccctcgctctcgtcgccagagcaagcaaagcgcagttgctgaaacccgtgcgctgttgatggatgatgaccgttcccatggatagtgctagcgcagccccgtcctctgcgcgggactttgctgagcgtctccttactaggaataatgaacttgaagatcagcttcgcaagtccgcacaatccaaagtcccatcagatcccagcatatggcttcagatgcgtgacaactttgagaagattattctcatagatcatgacctatctgaacagaaagaggtagagtatctcctatggaagttgcattacaaaagaattgaggacttcaggaggagcattagtgctgcaagctcagctgcatctcagagtgggaagagcaacgctaatccagatcgagtcaagagaattaaattaaccttcaaaagcttcctttcagaagcaactggcttctatcacgacttgatgttaaagatcaaatcaaatttgggccttccactcagttactttccagagggcatcgacaatgcaaacaactctgcgcgagatgacaagacaacagtgcagttgaagaaaggtttgatttcatgccatcgctgcctgatatatttgggagatcttgctcgttacaagagctcgcaaggtgatggtgattctgctagccgtgaatacgcagcggcatctagttactacatggaggctgcttctatctatccttccagtggcaaccctcatcatcagcttgctatactagcatcttactcaggcaacgaggtggtagctgtttataggtacttccgaagcttagctgcagatactccttttaccactgcacgtgacaacttgattattctttttgaaaagtacaacttcctgtgcagaatcgccaaagctatagacagctgccagacaacaacaaagttcccagcgctaaggcattacccccacggctatctgggaggggacaaggacggggagaagtaaagtttcagccaaaagatgttaacgcagaagcagctgaaagggaacaggagtgcaatgttcgtgatacattgaaggccttctatatacgatttgtcaggctcactggaattcttttcacgaggaccagtttggaaacatttggggagctgttttcttcagttagcaatgatttgcagattcttctttcttccggtcttgaggaggaccttaatttcggttctgatgctgcagaaaatgcattagctgctgttaggcttactatcatccttatattcacagtgcacaatgtaaataaagaacctgatagccagtcatattctgaacttgtgcaacgcagagtactgctccaaagtgcgtttacggctgcttttgattttgttggacgaattctcagaaggtgttcagaacttggtgatatcacatcaagcttctatctgccagccattctggtctacatcgaatggctggcgtcccatccagagttggctattgactcagagatggaggaacagcatgcaaatgccagatctttcttctggaaccaatgtatctcatttatgaataagttgatccttaccaaccttgcttctatggaggacaatgacgatgaggcttgcttttctaatatgagcatttatgaggagggtgaaactgggaacaggcttgccatttgggaagatcttgaattgagaggttttttgcccttggttcctgcacataccattttggatttctcaagcaaacacacatttggaaatgttggaagcaccaaggagaagaaagcacgggttcaacgaatttttgctgcaggaaagtcactgctgaactttgttcagattgatcagttgaggatatattttgatccatctttgaaaaagtttgtcttggccaagaactctcctgtttctagaactaacacccctcttcatgaatctcctgatgcacttaaaacaaatgggactgaaatggatcacaaggctgctagaagatttgattcagtttcttctaatgtgggctcactgcagtctaaagtgcagttttgtcctgatggtgatgatgaagaagaaattgttttcaagccaacagcttatgagaagttttcaaaagtttcttcagatctgtcagttaatggatacgtccatcctgtaccagtgtctgctgctggtgggccaaccaatgctagtttagtgcctgttcagaacactgcatcaatgtctgcaactcgtttaccatccaatccacatgcaactggtttgccatccaatggtgggtcacttccaagtactgcatctctatcagctgctggtaattacaacactgatcagtcgcttcccaggtcgtctgttggttggactgattgggctgtcaatagtgagcaaaatgttactcctagcattgctccaagatttgaactcatgcagtctgttgaggagcctgtttccagctggacaagcagtggggcacagcatgttggtcctcagcacaagcacacaggtttaactttcccagatgttgtctctgaaccatgtgtatctgcatcaatggttcaatgttttagtagctccgattattcgaaatttctcagagaacaagaaatattcttaatgaatggactgaagactgtcaacataactggaaatggctatctagagcagagattgcagcctggattgagtggtttacagtctatgggttattcatctcagatacctattcaacctggtggtaccactgcaaacctgatgcataatcatgtcaaaattactggagagactgtcccctctacacttgattcagttgtaccttcaatagcaccatcaggtggcatgccaatcaaacttacagaagcaccactaactgcttcgaagaagaaccctgttagtcgtccatcaaagcctgttggaccacctccaggatttaatcatgtaaccccaaagcgtcaagatgattctattccggttgaaaaactgcagaacccacaggtcgatgattacagctggctagatagctatcagcaatcgattgatcatgttcacagcttaagaactatttatcctggtgtcagtgatactagcactgcatttgccactccattctctttccctgggaggatacacacacaagggaccaatgaaaagacttggcaagatttccacctttttgagccttcaaaacagaacatgttccaaacttaccaccaaagaaatctgcaaagtggtcaaatggatgaacaagagccagcaaattctatctggtctagcagttaccatgtgtgatttggtaacttttaccaggatgattgctggagtttctggggacagactattggattaagtggcacgacctgatctattgagcttagcccatacctgcagcacttagtgttaaatttcttttgagaatggtagtctttcaagcatgacaatggctgctgttaagtttgggagtgccgccatcttttgggccaaagatggggtagaggatgattgatctgtcggcagtctgatggcgatgaattaatacgaggtcttcaatgctgacagaaagggttaatgaaacaaacttgaatccagtgattataggcactccgcacggaccacatgattcatctctcactggacatattgctaccacaagaagcggacggttgctgccgcaactaaaacatgccgtgtggatgtcagttttcagttggcctatgccatccagagagtaaaaagtgaggatcaacgagcatgttgccgagtagtttctcaagtataaattactgcgtctacttgctccttcgctttgggaacaatgtatcaggttgtaagttgcaattaaatgtttggaacagtttgtcatggtaattgtgtggctcctatatggctatattgttctctgtaattgtatggaccaaccctaagtgttacatacaaacatctttgatttgactcaatatcttgttcttcatccgtttttaaattataagaaattataagttctgttttctt
